United States Patent Application Publication US 2022/0040281 A1 - sequence listing, part 3

SEQ ID NO: 4470 - RNA, 1161 nt, Artificial Sequence
  derived and/or modified CDS sequence (opt3) from Pv(CSP38VK247)__ANS71618.1__CSP
augaagaacuucauccugcucgccgugagcuccauucuucuggucgacuuguuucccacccacugcggccauaauguugauuuaucuaaagcuauaaaccugaauggggugaacuucaauaacguagacgcaucaagucuaggagccgcgcacgugggucagagcgcuuccagaggcagggggcucggagagaauccugaugacgaagagggcgaugccaagaaaaagaaagacgguaagaaggcagaaccgaaaaacccacgggagaauaagcugaaacaacccgaagauggggccggagaccagccuggcgcuaacggcgcagggaaucagccaggagccaacggugcuggcaaucagcccggggccaacggagcgggcaaucaaccuggugcaaacggggccggaaaccagccaggcgcuaauggcgccgggaaccagcccggagcaaauggugcuggcaaccagccuggggccaauggagcgggcgaucaaccaggugccaacggggcaggcaaucagccgggagcuaacggcgccggggaccagcccggagcuaauggugccggcaaccagccuggggcaaauggagccggcaaccaaccaggugcuaauggggcgggcgaucagcccggagcaaacggcgccgggaaucagccuggagcuaacggugccggcgaccaaccaggggcaaacggagccggcaaucagcccggugcuaacggggccggcaaucagccgggagcaaacggcgcggggaaucagccuggagcuaacggcgccgguaaucaacccggggcaaacggagccggcggucaggcugccggcgggaaugcagcuaacaagaaagccggagaugcgggcgccgggcagggacagaauaacgagggcgcuaaugcaccaaacgagaagucugucaaggaauaccuugacaaagugcgcgccacaguugguacugaguggacgccuuguucggugaccugcggggucggagugcgaguacguagaaggguuaaugcugccaacaagaaacccgaagaccugacauugaacgauaucgagacugacguguguaccauggauaagugcgcaggcauuuuuaaugucgugucaaacagccucggucuggugauccugcucgucuuagcgcuguucaauuga

SEQ ID NO: 4471 - RNA, 1161 nt, Artificial Sequence
  derived and/or modified CDS sequence (opt3) from Pv(CSP48VK247)__ANS71628.1__CSP
augaagaacuucauccugcucgccgugagcuccauucuucuggucgacuuguuucccacccacugcggccauaauguugauuuaucuaaagcuauaaaccugaauggggugggauucaacaauguagacgcaucaagucuaggugccgcgcacgugggccagagcgcuuccagagggaggggacucggcgagaacccugaugacgaagagggugaugccaagaaaaagaaagacgggaagaaggcagaaccgaaaaauccacgggagaacaagcugaaacaacccgaagauggagccggcaaucagccuggcgcuaacggggcaggagaccagccaggugccaauggcgcugggaaccagcccggagccaauggcgcggguaaccaaccuggggcaaauggagccggcaaccagccaggcgcuaacggggccggaaaucagcccggugcaaacggcgcugggaaucagccuggagccaacggcgcgggugaucaaccaggggccaauggcgcaggaaaccagccgggcgcuaauggggccggaaaccagcccggugcuaauggcgccgggaaccagccuggagcaaauggcgccggugaccaaccaggggcuaacggcgcgggaaaucagcccggcgcaaacggggccggagaucagccuggugcuaauggcgccgggaaccaaccaggagcaaacggcgccgguaaucagcccggggcuaacggcgccggaaaucagccgggcgcaaacggggcgggaaaucagccuggcgcuaacggugccgggaaucaacccggagcaaacggcgccgguggccaggcugccgggggaaaugcagcuaacaagaaagccggcgacgcgggggccggacagggccagaauaacgagggugcuaaugcaccaaacgagaagucugucaaggaauaccuugauaaagugcgcgccacaguugggacugaguggacgccuuguucggugaccugcggagucggcgugcgaguacguagaaggguuaaugcugccaacaagaaacccgaagaccugacauugaacgaccucgagacugauguguguaccauggacaagugcgcagguaucuuuaaugucgugucaaacagccugggccuggugauucucuuaguccuggcgcuuuucaauuga

SEQ ID NO: 4472 - RNA, 1161 nt, Artificial Sequence
  derived and/or modified CDS sequence (opt3) from Pv(Nr01)__ADB92539.1__CSP
augaagaacuucauccugcucgccgugagcuccauucuucuggucgacuuguuucccacccacugcggccauaauguugauuuaucuaaagcuauaaaccugaauggggugggauucaacaauguagacgcaucaagucuaggugccgcgcacgugggccagagcgcuuccagagggaggggacucggcgagaacccugaugacgaagagggugaugccaagaaaaagaaagacgggaagaaggcagaaccgaaaaauccacgggagaacaagcugaaacaacccgaagauggagccggcgaccagccuggcgcuaauggggcaggaaaccagccaggugccaauggcgcugggaaccagcccggagccaauggcgcggguaaccaaccuggggcaaauggagccggcaaccagccaggcgcuaacggggccggaaaucagcccggugcaaacggcgcugggaaucagccuggagccaacggcgcgggugaucaaccaggggccaauggcgcagacgaucagccgggagcuaacggcgccgggaaucagcccggagcuaacggugccggcaaucagccuggggcaaacggagccggcgaccaaccaggugcuaauggggcgggcgaucagcccggagcaaacggcgccgggaaucagccuggagcuaacggugccggcgaccaaccaggggcaaauggagccggcaaccagcccggugcuaacggggccggcaaucagccgggagcaaacggcgcugggggacagccuggcgcgaauggugccgggaaccaacccggagcaaauggcgccgguggccaggcugccgggggaaacgcagcuaauaagaaagccggcgacgcgggggccggacagggccagaacaaugagggugcuaacgcaccaaaugagaagucugucaaggaauaccuugauaaagugcgcgccacaguugggacugaguggacgccuuguucggugaccugcggagucggcgugcgaguacguagaaggguuaacgcugccaauaagaaacccgaagaccugacauugaacgaucucgagacugacguguguaccauggauaagugcgcagguaucuuuaaugucgugucaaacagccugggccuggugauucucuuaguccuggcgcuuuucaacuga

SEQ ID NO: 4473 - RNA, 1161 nt, Artificial Sequence
  derived and/or modified CDS sequence (opt3) from Pv(Nr02)__ADB92540.1__CSP
augaagaacuucauccugcucgccgugagcuccauucuucuggucgacuuguuucccacccacugcggccauaauguugauuuaucuaaagcuauaaaccugaauggggugggauucaacaauguagacgcaucaagucuaggugccgcgcacgugggccagagcgcuuccagagggaggggacucggcgagaacccugaugacgaagagggugaugccaagaaaaagaaagacgggaagaaggcagaaccgaaaaauccacgggagaacaagcugaaacaacccgaagauggagccggcgaccagccuggcgcuaauggggcaggaaaccagccaggugccaauggcgcugggaaccagcccggagccaauggcgcggguaaccaaccuggggcaaauggagccggcaaccagccaggcgcuaacggggccggaaaucagcccggugcaaacggcgcugggaaucagccuggagccaacggcgcgggugaucaaccaggggccaauggcgcaggagaccagccgggcgcuaacggggccggaaaucagcccggugcuaacggcgccgggaaucagccuggagcaaacggcgccggugaucaaccaggggcuaauggcgcgggagaccagcccggcgcaaacggggccggaaaucagccuggugcuaacggcgccggggaucaaccaggagcaaauggcgccgguaaccagcccggggcuaacggcgccggaaaucagccgggcgcaaacggggcgggaaaucagccuggcgcuaacggugccgggaagcaacccggagcaaauggcgccgguggccaggcugccgggggaaacgcagcuaauaaaaaggccggcgacgcgggggccggacagggccagaacaaugagggugcuaacgcaccaaaugagaagucugucaaagaauaccuugacaaggugcgcgccacaguugggacugaguggacgccuuguucggugaccugcggagucggcgugcgaguacguagaaggguuaacgcugccaauaaaaagcccgaagaucugacauugaacgaccucgagacugauguguguaccauggacaaaugcgcagguaucuuuaaugucgugucaaacagccugggccuggugauucucuuaguccuggcgcuuuucaacuga

SEQ ID NO: 4474 - RNA, 1161 nt, Artificial Sequence
  derived and/or modified CDS sequence (opt3) from Pv(Nr05)__ADB92543.1__CSP
augaagaacuucauccugcucgccgugagcuccauucuucuggucgacuuguuucccacccacugcggccauaauguugauuuaucuaaagcuauaaaccugaauggggugggauucaacaauguagacgcaucaagucuaggugccgcgcacgugggccagagcgcuuccagagggaggggacucggcgagaacccugaugacgaagagggugaugccaagaaaaagaaagacgggaagaaggcagaaccgaaaaauccacgggagaacaagcugaaacaacccgaagauggagccggcgaccagccuggcgcuaauggggcaggaaaccagccaggugccaauggcgcugggaaccagcccggagccaauggcgcggguaaccaaccuggggcaaauggagccggcaaccagccaggcgcuaacggggccggaaaucagcccggugcaaacggcgcugggaaucagccuggagccaacggcgcggguaaucaaccaggggccaacggcgcagaugaccagccgggagcuaauggcgccgggaaccagcccggagcuaauggugccggcaaccagccuggggcaaauggagccggcaaccaaccaggugcuaauggggcgggcgaucagcccggagcaaacggcgccgggaaucagccuggagcuaacggugccggcgaccaaccaggggcaaacggagccggcaaucagcccggugcuaacggggccggcaaucagccgggagcaaacggcgcggggaaucagccuggagcuaacggcgccgguaaucaacccggggcaaacggagccggcggucaggcugccggcgggaaugcagcuaacaagaaagccggagaugcgggcgccgggcagggacagaauaacgagggcgcuaaugcaccaaacgagaagucugucaaggaauaccuugacaaagugcgcgccacaguugguacugaguggacgccuuguucggugaccugcggggucggagugcgaguacguagaaggguuaaugcugccaacaagaaacccgaagaccugacauugaacgaucucgagacugacguguguaccauggauaagugcgcaggcaucuuuaaugucgugucaaacagccugggucuggugauucucuuaguccuggcgcuuuucaauuga

SEQ ID NO: 4475 - RNA, 1161 nt, Artificial Sequence
  derived and/or modified CDS sequence (opt3) from Pv(Vc01)__ADB92544.1__CSP
augaagaacuucauccugcucgccgugagcuccauucuucuggucgacuuguuucccacccacugcggccauaauguugauuuaucuaaagcuauaaaccugaauggggugggauucaacaauguagacgcaucaagucuaggugccgcgcacgugggccagagcgcuuccagagggaggggacucggcgagaacccugaugacgaagagggugaugccaagaaaaagaaagacgggaagaaggcagaaccgaaaaauccacgggagaacaagcugaaacaacccgaagauggagccggcgaccagccuggcgcuaauggggcaggaaaccagccaggugccaauggcgcugggaaccagcccggagccaauggcgcggguaaccaaccuggggcaaauggagccggcaaccagccaggcgcuaacggggccggaaaucagcccggugcaaacggcgcugggaaucagccuggagccaacggcgcggguaaucaaccaggggccaacggcgcagaugaccagccgggagcuaauggcgccgggaaccagcccggagcuaauggugccggcaaccagccuggggcaaauggagccggcaaccaaccaggugcuaauggggcgggcgaucagcccggagcaaacggcgccgggaaucagccuggagcuaacggugccggcgaccaaccaggggcaaacggagccggcaaucagcccggugcuaacggggccggcaaucagccgggagcaaacggcgcggggaaucagccuggagcuaacggcgccgguaaucaacccggggcaaacggagccggcggucaggcugccggcgggaaugcagcuaacaagaaagccggagaugcgggcgggggacagggccagaauaacgagggugccaaugcuccaaacgagaagucugucaaggaauaccuugacaaagugcgcgcaacaguugggacugaguggacgccuuguucggugaccugcggagucggcgugcgaguacguagaaggguuaaugccgcuaacaagaaacccgaagaccugacauugaacgaucucgagacugacguguguaccauggauaagugcgccgguaucuuuaaugucgugucaaacagccugggccuggugauucucuuaguccuggcacuuuucaauuga

SEQ ID NO: 4476 - RNA, 1161 nt, Artificial Sequence
  derived and/or modified CDS sequence (opt3) from Pv(Vc02)__ADB92545.1__CSP
augaagaacuucauccugcucgccgugagcuccauucuucuggucgacuuguuucccacccacugcggccauaauguugauuuaucuaaagcuauaaaccugaauggggugggauucaacaauguagacgcaucaagucuaggugccgcgcacgugggccagagcgcuuccagagggaggggacucggcgagaacccugaugacgaagagggugaugccaagaaaaagaaagacgggaagaaggcagaaccgaaaaauccacgggagaacaagcugaaacaacccgaagauggagccggcgaccagccuggcgcuaauggggcaggaaaccagccaggugccaauggcgcugggaaccagcccggagccaauggcgcggguaaccaaccuggggcaaauggagccggcaaccagccaggcgcuaacggggccggaaaucagcccggugcaaacggcgcugggaaucagccuggagccaacggcgcgggugaucaaccaggggccaauggcgcagacgaucagccgggagcuaacggcgccgggaaucagcccggagcuaacggugccggcaaucagccuggggcaaacggagccggcgaccaaccaggugcuaauggggcgggcgaucagcccggagcaaacggcgccgggaaucagccuggagcuaacggugccggcgaccaaccaggggcaaauggagccggcaaccagcccggugcuaacggggccggcaaucagccgggagcaaacggcgcggggaaucagccuggagcuaacggcgccgguaaucaacccggggcaaacggagccggcggucaggcugccggcgggaaugcagcuaacaagaaagccggagacgcgggcgccgggcagggacagaauaacgagggcgcuaaugcaccaaacgagaagucugucaaggaauaccuugauaaagugcgcgccacaguugguacugaguggacgccuuguucggugaccugcggggucggagugcgaguacguagaaggguuaaugcugccaacaagaaacccgaagaccugacauugaaugaucucgagacugacguguguaccauggauaagugcgcaggcaucuuuaacgucgugucaaacagccugggucuggugauucucuuaguccuggcgcuuuucaauuga

SEQ ID NO: 4477 - RNA, 1158 nt, Artificial Sequence
  derived and/or modified CDS sequence (opt3) from Pv(Cam46)__AHL69652.1__CSP
augaagaacuucauccugcucgccgugagcuccauucuucuggucgacuuguuucccacccacugcggccauaauguugauuuaucuaaagcuauaaaccugaauggggugggauucaacaauguagacgcaucaagucuaggugccgcgcacgugggccagagcgcuuccagagggaggggacucggcgagaacccugaugacgaagagggugaugccaagaaaaagaaagacgggaagaaggcagaaccgaaaaauccacgggagaacaagcugaaacaacccgaagauggagccggcaaucagccuggcgcuaacggggcaggaaaucagccaggugccaacggcgcugggaaucagcccggagccaacggcgcggacgaucaaccuggugcaaauggggccggaaaccagccaggcgcuaacggcgccgggaaucagcccggagcaaacggugcuggcaaucagccuggggccaacggagcgggcaaucaaccaggugccaacggggcagacgaucagccgggcgcuaauggagccggcaaccagcccggggcuaauggagccgguaaccagccuggcgcaaauggggccggaaaccaaccaggcgcuaauggugcgggggaccagcccggcgcaaacggagccggcaaucagccuggggcuaacggagccgguaaccaaccaggcgcaaauggggccggaaaccagcccggcgcuaauggugccgggaaccagccgggcgcaaauggagcgggcaaccagccuggggcuaauggagccggcaaccaacccggugcaaauggggccggaggccaggcugccgguggcaacgcagggggaaaugcuggcgggaacgccggaggccagggucagaauaacgagggggcgaaugccccaaacgagaagucugucaaagaauaccuugauaaggugcgcgcuacaguuggaacugaguggacgccuuguucggugaccugcggcgucggugugcgaguacguagaaggguuaacgcagccaauaagaaacccgaagaccugacauugaacgaccucgagacugauguguguaccauggacaagugcgcuggcaucuuuaaugucgugucaaacagccuggggcuggugauucucuuaguccuggcccuuuucaauuga

SEQ ID NO: 4478 - RNA, 1143 nt, Artificial Sequence
  derived and/or modified CDS sequence (opt3) from Pv(Cam20)__AGN05250.1__CSP
augaagaacuucauccugcucgccgugagcuccauucuucuggucgacuuguuucccacccacugcggccauaauguugauuuaucuaaagcuauaaaccugaauggggugaacuucaauaacguagacgcaucaagucuaggagccgcgcacgugggucagagcgcuuccagaggcagggggcucggagagaauccugaugacgaagagggcgaugccaagaaaaagaaagacgguaagaaggcagaaccgaaaaacccacgggagaauaagcugaaacaacccggggaucgcgccgacggacagccugcuggcgaucgagcagacggccagccagccggggaucgugcugacggacagcccgccggugauagagcggcaggccaaccugccggggacagggcugacggacagccagccggcgaucgggcagcuggucagcccgccggggaccgcgcggauggacagccugccggcgacagagcagcuggccaaccagccggggauagggcugacggacagccggccggugaucgggcagccggccagcccgcuggggaccgcgcggauggacagccugcaggcgaccgagccgcuggucaaccagccggggauagagcagccggccagcccgcuggagacagggccgcaggccagccugcgggggaccgggcugauggacaaccagccggugaccgugcagccggccagcccgcuggggaucgcgccgcaggacagccggcuggcgacagagccgcgggucagccugccgggaacggcgcuggaggccaagcagccgggggaaaugcugccaacaagaaagcagaagaugcggguggcaaugccgggggacagggccagaacaaugagggugcuaacgcccccaacgagaagucugucaaggaauaccuugacaaagugagggcaacaguugggacugaguggacgccauguucggugaccugcggcgucggagugcggguacgacgcagaguuaaugcugccaacaagaaaccugaagaucugacauugaaugacaucgagacugauguguguaccauggacaagugcgcaggcauuuuuaacgucgugucaaauagccucgggcuggugauccugcucgucuuagcccuguucaacuga

SEQ ID NO: 4479 - RNA, 1143 nt, Artificial Sequence
  derived and/or modified CDS sequence (opt3) from Pv(Cam22)__AGN05252.1__CSP
augaagaacuucauccugcucgccgugagcuccauucuucuggucgacuuguuucccacccacugcggccauaauguugauuuaucuaaagcuauaaaccugaauggggugaacuucaauaacguagacgcaucaagucuaggagccgcgcacgugggucagagcgcuuccagaggcagggggcucggagagaauccugaugacgaagagggcgaugccaagaaaaagaaagacgguaagaaggcagaaccgaaaaacccacgggagaauaagcugaaacaacccggggaucgcgccgacggacagccugcuggcgaucgagcagacggccagccagccggggaucgugcugacggacagcccgccggugauagagcggcaggccaaccugccggggacagggcugacggacagccagccggcgaucgggcagcuggucagcccgccggggaccgcgcggauggacagccugccggcgacagagcagcuggccaaccagccggggauagggcugccggacagccggccggugaccgggcagauggccagcccgcuggggaccgcgcggcaggacagccugccggcgaucgagcugacggucaaccagccggggauagagcagccggccagcccgcuggagacagggccgcaggccagccugcgggggaccgggcugauggacaaccagccggugaccgugcagccggccagcccgcuggggaucgcgccgcaggacagccggcuggcgacagagccgcgggucagccugccgggaacggcgcuggaggccaagcagccgggggaaaugcugccaacaagaaagcagaagaugcggguggcaaugccgggggacagggccagaacaaugagggugcuaacgcccccaacgagaagucugucaaggaauaccuugacaaagugagggcaacaguugggacugaguggacgccauguucggugaccugcggcgucggagugcggguacgacgcagaguuaaugcugccaacaagaaaccugaagaucugacauugaaugacaucgagacugauguguguaccauggacaagugcgcaggcauuuuuaacgucgugucaaauagccucgggcuggugauccugcucgucuuagcccuguucaacuga

SEQ ID NO: 4480 - RNA, 1143 nt, Artificial Sequence
  derived and/or modified CDS sequence (opt3) from Pv(Cam36)__AHL69651.1__CSP
augaagaacuucauccugcucgccgugagcuccauucuucuggucgacuuguuucccacccacugcggccauaauguugauuuaucuaaagcuauaaaccugaauggggugaacuucaauaacguagacgcaucaagucuaggagccgcgcacgugggucagagcgcuuccagaggcagggggcucggagagaauccugaugacgaagagggcgaugccaagaaaaagaaagacgguaagaaggcagaaccgaaaaacccacgggagaauaagcugaaacaacccgccggggauggagcugcaguccagccugccggcgacggcgcugccgugcagccagcgggggauggagcagacggucagcccgccggcgauggggcugccguucaaccugcaggagacggcgcugccggucagccagcgggggaucgcgccgcaggacagcccgcuggcaaccgagccgcuggccagccugccggggaccgugcagacggacaaccagccggugauagagcugcgggccagccggcaggggacagggccgcuggacagcccgccggcgaucgggcagacggucagccugccggggaucgcgcugccggccaaccagcaggagacagagcggcuggccagcccgccggggauagggcagccggacagccugcuggugaccgggccgauggccaaccagcaggggaccgcgcugccggacagcccgcgggcgaucgagccgcuggucagccggcaggggacagagccgcuggccaggccgcaggaggcaaugccgggggaaacgcggguggcaaugcugggggaaacgccggcgguaaugcagggggcaacgcuggaggccaagggcagaacaaugaaggagccaacgcaccuaaugagaagucugugaaagaguaccuugacaaggucagggccacagugggcacugaauggacgcccuguucgguaaccugcgguguuggggugcggguccgucgcagagugaacgcugcgaauaagaaaccagaggaucugacauugaacgaccucgaaacugauguguguaccauggacaagugcgccggaaucuuuaaugucguuucaaacagccugggccuggugauucucuuaguacuggcacuuuucaauuga

SEQ ID NO: 4481 - RNA, 1137 nt, Artificial Sequence
  derived and/or modified CDS sequence (opt3) from Pv(Pt01.7)__ADB92550.1__CSP
augaagaacuucauccugcucgccgugagcuccauucuucuggucgacuuguuucccacccacugcggccauaauguugauuuaucuaaagcuauaaaccugaauggggugggauucaacaauguagacgcaucaagucuaggugccgcgcacgugggccagagcgcuuccagagggaggggacucggcgagaacccugaugacgaagagggugaugccaagaaaaagaaagacgggaagaaggcagaaccgaaaaauccacgggagaacaagcugaaacaacccgaagauggagccggcgaccagccuggcgcuaauggggcaggaaaccagccaggugccaauggcgcugggaaccagcccggagccaauggcgcggguaaccaaccuggggcaaauggagccggcaaccagccaggcgcuaacggggccgaugaccagcccggagcaaauggugcuggcaaccagccuggggccaauggagcgggcaaccaaccaggugccaauggggcaggcaaccagccgggagcuaauggcgccggggaucagcccggagcuaacggugccggcaaucagccuggggcaaacggagccggcgaccaaccaggugcuaauggggcgggcaaccagcccggagcaaauggcgccgggaaccagccuggagcuaauggugccggcaaccaaccaggggcaaacggagccggcaaucagcccggugcuaacggggccggcggacaggcagcgggcgggaaugcugccaacaagaaagcaggagaugccggcgcuggugggcaggccgcaggaggcaaugcugccaacaagaaggcgggugacgccggcgcugggcaaggacagaauaacgagggcgcaaaugccccgaacgagaaaucugucaaggaauaccuugacaaagugcgcgcuacaguugggacugaguggacgccuuguucggugaccugcggagucggcgugcgaguacguagaaggguuaaugccgcaaacaagaaacccgaagaucugacauugaaugaccucgagacugauguguguaccauggacaagugcgcggguaucuuuaacgucgugucaaauagccuggggcuggugauucucuuaguccuggcccuuuucaacuga

SEQ ID NO: 4482 - RNA, 1134 nt, Artificial Sequence
  derived and/or modified CDS sequence (opt3) from Pv(Cam39)__AGN05267.1__CSP
augaagaacuucauccugcucgccgugagcuccauucuucuggucgacuuguuucccacccacugcggccauaauguugauuuaucuaaagcuauaaaccugaauggggugggauucaacaauguagacgcaucaagucuaggugccgcgcacgugggccagagcgcuuccagagggaggggacucggcgagaacccugaugacgaagagggugaugccaagaaaaagaaagacgggaagaaggcagaaccgaaaaauccacgggagaacaagcugaaacaacccgccggagaucgcgcugacggccagccugcaggcgaucgagccgacgggcagccagcuggagaucgugccgacggucagcccgcgggcgauagagcagccgggcaaccugcuggagacagggccgacggccagccagcuggugaucgggcagccgggcagcccgcgggagaccgcgccgauggccagccugcaggcgacagagcugccgggcaaccagcuggagauagggccgacggucagccggcaggcgaucgggccgcugggcagcccgcgggagaccgcgcagccggccagccugcuggugaucgagccgcagggcaaccagccggcgacagagcugauggacagcccgccggcgacagggcagcggggcagccugcuggagaccgggccgauggucaaccagcaggcgaccgugccgcugggcagcccgccggagaucgcgcagcuggccagccggccggugacagagcggccgggcagccugcuggcaauggagcaggcgggcaagccgcuggagguaacgccggcgggaaugcaggaggcaacgcgggugggcagggccagaauaacgaaggagccaaugcucccaacgagaagucugucaaagaguaccuugauaaggugagggccacaguuggcacugaauggacgccauguucggugaccugcggggucggagugcggguacgacgcagaguuaacgcagcuaauaagaaaccugaggaccugacauugaacgaucucgaaacugacguguguaccauggauaagugcgccggcaucuuuaaugucgugucaaacagccugggucuggugauucucuuaguccuggcacuuuucaauuga

SEQ ID NO: 4483 - RNA, 1134 nt, Artificial Sequence
  derived and/or modified CDS sequence (opt3) from Pv(Nr03)__ADB92541.1__CSP
augaagaacuucauccugcucgccgugagcuccauucuucuggucgacuuguuucccacccacugcggccauaauguugauuuaucuaaagcuauaaaccugaauggggugaacuucaauaacguagacgcaucaagucuaggagccgcgcacgugggucagagcgcuuccagaggcagggggcucggagagaauccugaugacgaagagggcgaugccaagaaaaagaaagacgguaagaaggcagaaccgaaaaacccacgggagaauaagcugaaacaacccggggaucgcgccgacggacagccugcuggcgaucgagcagacggccagccagccggggaucgugcugacggacagcccgccggugauagagcggacggccaaccugcaggggacagggccgauggacagccagcuggcgaccgggccgauggucagcccgcaggggaccgcgcugauggacagccugccggcgacagagcggauggccaaccagccggggacagggcagauggacagccggcuggugaccgggccgauggccagcccgcuggggaccgcgccgacggacagccugcaggcgaucgagccgacggucaaccagcuggggauagagcggacggccagcccgcaggagauagggccgacggccagccugcuggggaucgggccgacggacaaccagcgggugaucgugccgacggccagcccgcuggggaucgcgccgcaggacagccggcgggcgacagagcugccggucagccugcaggggauagggccgcuggccaacccgccggaaacggcgcagggggacaggcugccgguggcaaugcagggggacagggccagaacaaugaaggugccaacgcuccaaaugagaagucugucaaagaguaccuugacaaggugcgggcaacaguugggacugaauggacgccuuguucggugaccugcggcgucggagugcgaguacgcagaaggguuaacgccgcuaacaagaaacccgaggaccugacauugaaugaucucgaaacugacguguguaccauggauaagugcgccggcaucuuuaacgucgugucaaauagccuggggcuggugauucucuuaguccuggcacuuuucaacuga

SEQ ID NO: 4484 - RNA, 1134 nt, Artificial Sequence
  derived and/or modified CDS sequence (opt3) from Pv(Pt04.1)__ADB92554.1__CSP
augaagaacuucauccugcucgccgugagcuccauucuucuggucgacuuguuucccacccacugcggccauaauguugauuuaucuaaagcuauaaaccugaauggggugaacuucaauaacguagacgcaucaagucuaggagccgcgcacgugggucagagcgcuuccagaggcagggggcucggagagaauccugaugacgaagagggcgaugccaagaaaaagaaagacgguaagaaggcagaaccgaaaaacccacgggagaauaagcugaaacaacccggggaucgcgccgacggacagccugcuggcgaucgagcagacggccagccagccggggaucgugcugacggacagcccgccggugauagagcggcaggccaaccugccggggacagggcugccggacagccagcaggcgaccgggcugauggucagcccgccggggaccgcgcggauggacagccugccggcgacagagcagauggccaaccagcuggggacagggccgauggacagccggcuggugaccgggccgcaggccagcccgccggggaucgcgcugcgggacagccugcaggcgaccgagccgauggucaaccagcuggggacagagccgcaggccagcccgccggagacagggcugauggccagccugccggggaccgggcagcgggacaaccagcuggugaucgugccgacggccagcccgcaggggaucgcgccgcuggacagccggccggcgacagagcagcuggucagccugccggggauagggcggccggccaagcugcaggagaccgggccgcuggccaggccgcagggggaaacgcggguggccaggggcagaauaacgaaggagccaaugcucccaacgagaagucugucaaagaguaccuugauaaggugcgagccacaguuggcacugaauggacgccauguucggugaccugcggugucggggugcgcguaagaaggcggguuaaugcagcuaacaagaaaccugaggaccugacauugaacgaucucgaaacugacguguguaccauggauaagugcgccggcaucuuuaaugucgugucaaacagccugggacuggugauucucuuaguccuggcacuuuucaauuga

SEQ ID NO: 4485 - RNA, 1134 nt, Artificial Sequence; identical to SEQ ID NO: 4450
  derived and/or modified CDS sequence (opt3) from Pv(Sal1)__ADB92528.1__CSP

SEQ ID NO: 4486 - RNA, 1131 nt, Artificial Sequence
  derived and/or modified CDS sequence (opt3) from Pv(Cam27)__AGN05255.1__CSP
augaagaacuucauccugcucgccgugagcuccauucuucuggucgacuuguuucccacccacugcggccauaauguugauuuaucuaaagcuauaaaccugaauggggugggauucaacaauguagacgcaucaagucuaggugccgcgcacgugggccagagcgcuuccagagggaggggacucggcgagaacccugaugacgaagagggugaugccaagaaaaagaaagacgggaagaaggcagaaccgaaaaauccacgggagaacaagcugaaacaacccgccggagcucgcgcagauggccagccugccggcgaccgagcugaugggcagccagccggagaccgugcggauggucagcccgcaggcgacagagccgcugggcaaccugccggagauagggcagacggccagccagcuggugaccgggccgcggggcagcccgccggagaucgcgcagacggccagccugcuggcgauagagccgcugggcaaccagccggagacagggcagauggucagccggccggcgaccgggcugcggggcagcccgcaggagaucgcgccgcuggccagccugccggugaccgagcagaugggcaaccagccggcgacagagcugccggacagcccgcaggcgauagggcggacgggcagccugcuggagaccgggccgcaggucaaccagccggcgaucgugcugccgggcagcccgcaggagaccgcgcugccggccagccggcggguaauggggccggcggacaggcugcaggcgggaacgccggagguaaugcuggcgggaacgccggaggcaaugcgggugggaacgcaggcggacaaggccagaauaacgaaggggccaacgcuccuaaugagaagucugucaaagaguaccuugauaaggugagagccacaguuggaacugaauggacgcccuguucggugaccugcggcgucggugugaggguacggcgacgcguuaacgcagcuaauaagaaaccagaggaccugacauugaacgaucucgaaacugacguguguaccauggauaagugcgccgggaucuuuaaugucgugucaaacagccugggacuggugauucucuuaguccuggcacuuuucaauuga

SEQ ID NO: 4487 - RNA, 1131 nt, Artificial Sequence
  derived and/or modified CDS sequence (opt3) from Pv(Cam46)__AGN05273.2__CSP
augaagaacuucauccugcucgccgugagcuccauucuucuggucgacuuguuucccacccacugcggccauaauguugauuuaucuaaagcuauaaaccugaauggggugaacuucaauaacguagacgcaucaagucuaggagccgcgcacgugggucagagcgcuuccagaggcagggggcucggagagaauccugaugacgaagagggcgaugccaagaaaaagaaagacgguaagaaggcagaaccgaaaaacccacgggagaauaagcugaaacaacccgccggggaucgcgcugacggacagccugcaggcgaucgagccgacggccagccagcuggggaucgugccgacggacagcccgcgggugauagagcagccggccaaccugcuggggacagggccgacggacagccagcaggcgaucgggcugccggucagcccgcgggggaccgcgccgauggacagccugcaggcgacagagcugccggccaaccagcuggggauagggccgacggacagccggcgggugaucgggccgcuggccagcccgcgggggaccgcgcagccggacagccugcuggcgaucgagccgacggucaaccagcaggggauagagccgcuggccagcccgccggagacagggcagacggccagccugcgggggaucgggcugccggacaaccagccggugaccgugcagcuggccagcccgccggggaucgcgcagcuggacagccggccggcaacggugcagggggccaggccgcuggaggcaaugcagggggaaacgccgguggcaaugcugggggaaacgccggcgguaaugcagggggccaaggacagaacaacgaaggcgcgaaugccccuaacgagaagucugucaaagaguaccuugacaaggugagagcuacaguugggacugaauggacgcccuguucggugaccugcggagucggcgugaggguacggcgacgcguuaaugccgcaaacaagaaaccagaggaucugacauugaaugaccucgaaacugauguguguaccauggacaagugcgcugguaucuuuaacgucgugucaaauagccuggggcuggugauucucuuaguccuggcccuuuucaacuga

SEQ ID NO: 4488 - RNA, 1128 nt, Artificial Sequence
  derived and/or modified CDS sequence (opt3) from Pv(CSP10VK210)__ANS71590.1__CSP
augaagaacuucauccugcucgccgugagcuccauucuucuggucgacuuguuucccacccacugcggccauaauguugauuuaucuaaagcuauaaaccugaauggggugaacuucaauaacguagacgcaucaagucuaggagccgcgcacgugggucagagcgcuuccagaggcagggggcucggagagaauccugaugacgaagagggcgaugccaagaaaaagaaagacgguaagaaggcagaaccgaaaaacccacgggagaauaagcugaaacaacccggggaucgcgccgacggacagccugcuggcgaucgagcagacggccagccagccggggaucgugcugacggacagcccgccggugauagagcggacggccaaccugcaggggacagggccgcuggacagccagccggcgaucgggcagcuggucagcccgccggggaccgcgcggauggacagccugccggcgacagagcagcuggccaaccagccggggauagggcugacggacagccggccggugaucgggcagccggccagcccgcuggggaccgcgcggcaggacagccugccggcgaucgagcugccggucaaccagcaggggacagagccgauggccagcccgcuggagacagggccgcaggccagccugcgggggaccgggcugccggacaaccagcgggugaucgugccgcuggccagcccgccggggaccgcgcagcuggacagccggccggcaacggugcagggggccaggccgcuggaggcaaugcagccaacaagaaagcugaagaugccgggggaaaugcggguggcaacgcagggggacaaggccagaauaacgagggugccaacgcuccuaaugagaagucugucaaggaauaccuugacaaagugagagccacaguugggacugaguggacgcccuguucggugaccugcggcgucggagugaggguacggcgacgcguuaacgcagcuaauaagaaaccagaagaucugacauugaacgaccucgagacugauguguguaccauggacaagugcgccggcaucuuuaaugucgugucaaacagccuggggcuggugauucucuuaguccuggcacuuuucaauuga

SEQ ID NO: 4489 - RNA, 1122 nt, Artificial Sequence
  derived and/or modified CDS sequence (opt3) from Pv(Cam19)__AGN05249.1__CSP
augaagaacuucauccugcucgccgugagcuccauucuucuggucgacuuguuucccacccacugcggccauaauguugauuuaucuaaagcuauaaaccugaauggggugggauucaacaauguagacgcaucaagucuaggugccgcgcacgugggccagagcgcuuccagagggaggggacucggcgagaacccugaugacgaagagggugaugccaagaaaaagaaagacgggaagaaggcagaaccgaaaaauccacgggagaacaagcugaaacaacccgccggagaucgcgcugacggccagccugcaggcgaucgagccgacgggcagccagcuggagaucgugccgacggucagcccgcgggcgauagagcagacgggcaaccugccggagacagggcugauggccagccagccggugaccgggcagcugggcagcccgccggagaucgcgcggacggccagccugccggcgauagagcagcugggcaaccagccggagacagggcugauggucagccggccggcgaccgggcagaugggcagcccgccggagaccgcgcugcgggccagccugccggugaucgagcagacgggcaaccagcuggcgacagagccgcaggacagcccgccggcgauagggcugacgggcagccugccggagaucgggcagcgggucaaccagcuggcgaccgugccgcagggcagcccgccggagaucgcgcugccggccagccggcagguaauggggcuggcggacaggccgcgggcgggaacgccggagguaaugcuggcgggaacgcaggaggcaaugccggugcugggcaaggccagaacaaugaaggagccaacgcaccuaacgagaagucugucaaagaguaccuugacaaggugagagcgacaguuggcacugaauggacgcccuguucggugaccugcggggucggagugaggguacggcgacgcguuaaugccgcuaacaagaaaccagaggaucugacauugaaugaccucgaaacugauguguguaccauggacaagugcgccggcaucuuuaacgucgugucaaauagccugggucuggugauucucuuaguccuggcacuuuucaacuga

SEQ ID NO: 4490 - RNA, 1119 nt, Artificial Sequence
  derived and/or modified CDS sequence (opt3) from Pv(Cam10)__AGN05241.2__CSP
augaagaacuucauccugcucgccgugagcuccauucuucuggucgacuuguuucccacccacugcggccauaauguugauuuaucuaaagcuauaaaccugaauggggugggauucaacaauguagacgcaucaagucuaggugccgcgcacgugggccagagcgcuuccagagggaggggacucggcgagaacccugaugacgaagagggugaugccaagaaaaagaaagacgggaagaaggcagaaccgaaaaauccacgggagaacaagcugaaacaacccgccggagaucgcgcugacggccagccugcaggcgaucgagccgacgggcagccagcuggagaucgugccgacggucagcccgcgggcgauagagcagccgggcaaccugcuggagacagggccgacggccagccagcuggugaucgggcagccgggcagcccgcgggagaccgcgccgauggccagccugcaggcgacagagcugccgggcaaccagcuggagauagggccgacggucagccggcaggcgaucgggccgcugggcagcccgcgggagaccgcgcagccggccagccugcuggugaucgagccgacgggcaaccagcaggcgauagagccgcuggacagcccgccggcgacagggcagacgggcagccugcgggagaucgggcugccggucaaccagcaggcgaccgugccgcugggcagcccgccggagaucgcgcagcuggccagccggccgguaauggggcgggcggacaggccgcuggcgggaacgcaggagguaaugccggcgggaacgcuggaggcaaugccggugggcaaggccagaacaaugaaggagcaaacgcgccuaacgagaagucugucaaagaguaccuugacaaggugagagccacaguuggcacugaauggacgcccuguucggugaccugcggggucggagugaggguacggcgacgcguuaaugcugccaacaagaaaccagaggaucugacauugaaugaccucgaaacugauguguguaccauggacaagugcgcaggcaucuuuaacgucgugucaaauagccugggucuggugauucucuuaguccuggcucuuuucaacuga

SEQ ID NO: 4491 - RNA, 1119 nt, Artificial Sequence
  derived and/or modified CDS sequence (opt3) from Pv(Cam3)__AGN05234.2__CSP
augaagaacuucauccugcucgccgugagcuccauucuucuggucgacuuguuucccacccacugcggccauaauguugauuuaucuaaagcuauaaaccugaauggggugaacuucaauaacguagacgcaucaagucuaggagccgcgcacgugggucagagcgcuuccagaggcagggggcucggagagaauccugaugacgaagagggcgaugccaagaaaaagaaagacgguaagaaggcagaaccgaaaaacccacgggagaauaagcugaaacaacccgccggggaucgcgcugacggacagccugcaggcgaucgagccgacggccagccagcuggggaucgugccgacggacagcccgcgggugauagagcagccggccaaccugcuggggacagggccgacggacagccagcaggcgaucgggcugccggucagcccgcgggggaccgcgccgauggacagccugcaggcgacagagcugccggccaaccagcuggggauagggccgacggacagccggcgggugaucgggccgcuggccagcccgcgggggaccgcgcagccggacagccugcuggcgaucgagccgacggucaaccagcaggggauagagccgcuggccagcccgccggagacagggcagacggccagccugcgggggaucgggcugccggacaaccagccggugaccgugcagcuggccagcccgccggggaucgcgcagcuggacagccggccggcaacggugcagggggccaggccgcuggaggcaaugcagggggaaacgccgguggcaaugcugggggaaacgccggcggucaagggcagaauaacgaaggcgcaaacgcgccuaaugagaagucugucaaagaguaccuugacaaggugagagccacaguuggaacugaauggacgcccuguucggugaccugcggcgucggggugaggguacggcgacgcguuaacgcugccaauaagaaaccagaggaucugacauugaacgaccucgaaacugauguguguaccauggacaagugcgcaggaaucuuuaaugucgugucaaacagccugggccuggugauucucuuaguccuggcucuuuucaauuga

SEQ ID NO: 4492 - RNA, 1119 nt, Artificial Sequence
  derived and/or modified CDS sequence (opt3) from Pv(Cam30)__AGN05258.1__CSP
augaagaacuucauccugcucgccgugagcuccauucuucuggucgacuuguuucccacccacugcggccauaauguugauuuaucuaaagcuauaaaccugaauggggugaacuucaauaacguagacgcaucaagucuaggagccgcgcacgugggucagagcgcuuccagaggcagggggcucggagagaauccugaugacgaagagggcgaugccaagaaaaagaaagacgguaagaaggcagaaccgaaaaacccacgggagaauaagcugaaacaacccgccggggauggagcugcaguccagccugccggcgacggcgcugccgugcagccagcgggggauggagcagacggucagcccgccggcgauggggcugccggacaaccugcaggcgaccgcgcugauggucagccagccggggaccgagcggccggacagcccgcaggcgaccgugcugauggccagccugccggggacagagcugccggacaaccagcgggugauagggccgacggccagccggcuggggaucgggcggcaggacagcccgccggcgaccgcgcugccggucagccugcaggggauagagccgacggccaaccagcuggagauagggccgcaggccagcccgcgggggaccgggcugauggacagccugccggugaccgcgcagccggccaaccagcuggggaccgagccgcaggacagcccgcuggcgauagagccgcgggucagccggccgggaacggcgcuggaggccaggcagccgggggaaaugcugguggcaacgccgggggaaaugcaggcgguaacgcagggggccaaggacagaauaacgaaggcgccaacgcuccuaaugagaagucuguuaaagaguaccuugacaaggugagggccacagucgggacugaauggacgcccuguucggugaccugcggaguaggcguucgggugcgucgcagagucaacgcagcuaauaagaaaccagaggaucugacauugaacgaccucgaaacugauguguguaccauggacaagugcgccgguaucuuuaauguggucucaaacagccuggggcugguuauucucuuagugcuggcacuuuucaauuga

SEQ ID NO: 4493 - RNA, 1119 nt, Artificial Sequence
  derived and/or modified CDS sequence (opt3) from Pv(Cam43)__AGN05271.1__CSP
augaagaacuucauccugcucgccgugagcuccauucuucuggucgacuuguuucccacccacugcggccauaauguugauuuaucuaaagcuauaaaccugaauggggugggauucaacaauguagacgcaucaagucuaggugccgcgcacgugggccagagcgcuuccagagggaggggacucggcgagaacccugaugacgaagagggugaugccaagaaaaagaaagacgggaagaaggcagaaccgaaaaauccacgggagaacaagcugaaacaacccgccggagaucgcgcugacggccagccugcaggcgaucgagccgacgggcagccagcuggagaucgugccgacggucagcccgcgggcgauagagcagacgggcaaccugccggagacagggcugauggccagccagccggugaccgggcagcugggcagcccgccggagaucgcgcggacggccagccugccggcgauagagcagcugggcaaccagccggagacagggcugauggucagccggccggcgaccgggcagaugggcagcccgccggagaccgcgcugcgggccagccugccggugaucgagcagacgggcaaccagcuggcgacagagccgcaggacagcccgccggcgauagggcugacgggcagccugccggagaucgggcagcgggucaaccagcuggcgaccgugccgcagggcagcccgccggaaauggcgcuggugggcaggccgcaggcggaaacgcuggcgggaaugccggagguaacgcgggcgggaaugccggaggcaacgcuggugggaaugcaggcgccggacagggccaaaacaacgaaggggcuaaugccccgaacgagaagucugucaaagaguaccuugauaaggugcgcgcaacaguuggaacugaauggacgccuuguucggugaccugcggcgucggugugagaguaaggcggcgaguuaaugcggccaacaagaaacccgaggaccugacauugaaugaucucgaaacugacguguguaccauggauaagugcgcugggaucuuuaacgucgugucaaauagccugggacuggugauucucuuaguccuggcccuuuucaacuga

SEQ ID NO: 4494 - RNA, 1116 nt, Artificial Sequence
  derived and/or modified CDS sequence (opt3) from Pv(Cam40)__AGN05268.1__CSP
augaagaacuucauccugcucgccgugagcuccauucuucuggucgacuuguuucccacccacugcggccauaauguugauuuaucuaaagcuauaaaccugaauggggugggauucaacaauguagacgcaucaagucuaggugccgcgcacgugggccagagcgcuuccagagggaggggacucggcgagaacccugaugacgaagagggugaugccaagaaaaagaaagacgggaagaagacagaaccgaaaaauccacgggagaacaagcugaaacaacccggagaucgcgcagacggccagccugccggcgaucgagcugacgggcagccagcaggagaucgugccgcuggucagcccgccggcgacagagcggaugggcaaccugcaggagacagggccgacggccagccagcuggugaucgggccgcagggcagcccgcuggagaccgcgccgauggccagccugcgggcgacagagccgcagggcaaccagcuggagauagggccgacggucagccggcuggcgaucgggccgcagggcagcccgccggagaccgcgcugcgggccagccugccggugaucgagcagacgggcaaccagcuggcgauagagccgcaggacagcccgccggcgacagggcugacgggcagccugccggagaucgggcagcgggucaaccagcuggcgaccgugccgcagggcagcccgccggagaucgcgcugccggccagccggcagguaauggggcuggcggacaggccgcgggcgggaacgccggagguaaugcuggcgggaacgcaggaggcaaugccggugggcaaggccagaacaaugaaggagcuaacgccccuaacgagaagucugucaaagaguaccuugacaaggugagagcaacuguuggcacggaauggacccccuguucggugacaugcggggucggagugaggguacggcgacgcguuaaugcggccaacaagaaaccagaggaucugacuuugaaugaccucgaaaccgauguguguacaauggacaagugcgcuggcaucuuuaacgucgugucaaauagccugggucuggugauucucuuaguccuggcccuuuucaacuga

SEQ ID NO: 4495 - RNA, 1116 nt, Artificial Sequence
  derived and/or modified CDS sequence (opt3) from Pv(CSP14VK210)__ANS71594.1__CSP
augaagaacuucauccugcucgccgugagcuccauucuucuggucgacuuguuucccacccacugcggccauaauguugauuuaucuaaagcuauaaaccugaauggggugaacuucaauaacguagacgcaucaagucuaggagccgcgcacgugggucagagcgcuuccagaggcagggggcucggagagaauccugaugacgaagagggcgaugccaagaaaaagaaagacgguaagaaggcagaaccgaaaaacccacgggagaauaagcugaaacaacccggggaucgcgccgacggacagccugcuggcgaucgagcagacggccagccagccggggaucgugcugccggacagcccgcgggugacagagcagauggccaaccugccggggacagggcugccggacagccagcaggcgaccgggcugauggucagcccgccggggaccgcgcggccggacagccugcaggcgauagagcugacggccaaccagccggggauagggcugccggacagccggccggugaccgggcagauggccagcccgcuggggaccgcgcggcaggacagccugccggcgaucgagcugccggucaaccagcaggggacagagccgauggccagcccgcuggagacagggccgacggccagccugcaggggaucgggcggcuggacaaccagccggugaccgugcagccggccagcccgcuggggaucgcgccgcaggacagccggcuggcaacggugccgggggccaggcggccggaggcaaugcugcaaacaagaaagccgaagacgcugggggaaaugccgguggccaagggcagaacaaugagggagcaaacgcgccuaacgagaagucugucaaggaauaccuugauaaagugagagccacaguuggcacugaguggacgcccuguucggugaccugcggugucggggugaggguacggcgacgcguuaaugcugccaacaagaaaccagaagaccugacauugaaugauaucgagacugacguguguaccauggauaagugcgcaggcauuuuuaacgucgugucaaauagccucggacuggugauccugcucgucuuagcucuguucaacuga

SEQ ID NO: 4496 - RNA, 1116 nt, Artificial Sequence
  derived and/or modified CDS sequence (opt3) from Pv(CSP22VK210)__ANS71602.1__CSP
augaagaacuucauccugcucgccgugagcuccauucuucuggucgacuuguuucccacccacugcggccauaauguugauuuaucuaaagcuauaaaccugaauggggugaacuucaauaacguagacgcaucaagucuaggagccgcgcacgugggucagagcgcuuccagaggcagggggcucggagagaauccugaugacgaagagggcgaugccaagaaaaagaaagacgguaagaaggcagaaccgaaaaacccacgggagaauaagcugaaacaacccggggaucgcgccgacggacagccugcuggcgaucgagcagacggccagccagccggggaucgugcugacggacagcccgccggugauagagcggcaggccaaccugccggggacagggcugacggacagccagccggcgaucgggcagcuggucagcccgccggggaccgcgcggauggacagccugccggcgacagagcagcuggccaaccagccggggauagggcugccggacagccggcgggugaccgggccgauggccagcccgcuggggaccgcgcggcaggacagccugccggcgaucgagcugccggucaaccagcaggggacagagccgauggccagcccgcuggagacagggccgcaggccagccugcgggggaccgggcugccggacaaccagccggugaucgugcagcuggccagcccgccggggaccgcgcagcuggacagccggccggcaacggugcagggggccaggccgcuggaggcaaugcagccaacaagaaagcugaagaugccgggggaaaugcggguggccaagggcagaacaaugagggagcaaacgccccuaacgagaagucugucaaggaauaccuugacaaagugagagcuacaguuggcacugaguggacgcccuguucggugaccugcggugucggggugaggguacggcgacgcguuaaugccgcaaacaagaaaccagaagaucugacauugaaugacaucgagacugauguguguaccauggacaagugcgcuggcauuuuuaacgucgugucaaauagccucggacuggugauccugcucgucuuagcccuguucaacuga

SEQ ID NO: 4497 - RNA, 1116 nt, Artificial Sequence
  derived and/or modified CDS sequence (opt3) from Pv(CSP28VK210)__ANS71608.1__CSP
augaagaacuucauccugcucgccgugagcuccauucuucuggucgacuuguuucccacccacugcggccauaauguugauuuaucuaaagcuauaaaccugaauggggugaacuucaauaacguagacgcaucaagucuaggagccgcgcacgugggucagagcgcuuccagaggcagggggcucggagagaauccugaugacgaagagggcgaugccaagaaaaagaaagacgguaagaaggcagaaccgaaaaacccacgggagaauaagcugaaacaacccggggaucgcgccgacggacagccugcuggcgaucgagcagacggccagccagccggggaucgugcugacggacagcccgccggugauagagcggcaggccaaccugccggggacagggcugacggacagccagccggcgaucgggcagcuggucagcccgccggggaccgcgcggauggacagccugccggcgacagagcagcuggccaaccagccggggauagggcugacggacagccggccggugaucgggcagccggccagcccgcuggggaccgcgcggauggacagccugcaggcgaccgagccgcuggucaaccagccggggauagagcagccggccagcccgcuggagacagggccgacggccagccugcaggggaucgggcggcuggacaaccagccggugaccgugcagccggccagcccgcuggggaucgcgccgcaggacagccggcuggcaacggugccgggggccaggcggccggaggcaaugcugcaaacaagaaagccgaagacgcugggggaaaugccgguggccaagggcagaacaaugagggagcaaacgcgccuaacgagaagucugucaaggaauaccuugauaaagugagagccacaguuggcacugaguggacgcccuguucggugaccugcggugucggggugaggguacggcgacgcguuaaugcugccaacaagaaaccagaagaccugacauugaaugauaucgagacugacguguguaccauggauaagugcgcaggcauuuuuaacgucgugucaaauagccucggacuggugauccugcucgucuuagcucuguucaacuga

SEQ ID NO: 4498 - RNA, 1116 nt, Artificial Sequence
  derived and/or modified CDS sequence (opt3) from Pv(CSP31VK210)__ANS71611.1__CSP
augaagaacuucauccugcucgccgugagcuccauucuucuggucgacuuguuucccacccacugcggccauaauguugauuuaucuaaagcuauaaaccugaauggggugaacuucaauaacguagacgcaucaagucuaggagccgcgcacgugggucagagcgcuuccagaggcagggggcucggagagaauccugaugacgaagagggcgaugccaagaaaaagaaagacgguaagaaggcagaaccgaaaaacccacgggagaauaagcugaaacaacccggggaucgcgccgacggacagccugcuggcgaucgagcagacggccagccagccggggaucgugcugccggacagcccgcgggugacagagcagauggccaaccugccggggacagggcugccggacagccagcaggcgaccgggcugauggucagcccgccggggaccgcgcggccggacagccugcaggcgauagagcugacggccaaccagccggggauagggcugacggacagccggccggugaucgggcagccggccagcccgcuggggaccgcgcggcaggacagccugccggcgaucgagcugccggucaaccagcaggggacagagccgauggccagcccgcuggagacagggccgcaggccagccugcgggggaccgggcugccggacaaccagcgggugaucgugccgcuggccagcccgccggggaccgcgcagcuggacagccggccggcaacggugcagggggccaggccgcuggaggcaaugcagccaacaagaaagcugaagaugccgggggaaaugcggguggccaagggcagaacaaugagggagcaaacgccccuaacgagaagucugucaaggaauaccuugacaaagugagagcuacaguuggcacugaguggacgcccuguucggugaccugcggugucggggugaggguacggcgacgcguuaaugccgcaaacaagaaaccagaagaucugacauugaaugacaucgagacugauguguguaccauggacaagugcgcuggcauuuuuaacgucgugucaaauagccucggacuggugauccugcucgucuuagcccuguucaacuga

SEQ ID NO: 4499 - RNA, 1116 nt, Artificial Sequence
  derived and/or modified CDS sequence (opt3) from Pv(CSP37VK210)__ANS71617.1__CSP
augaagaacuucauccugcucgccgugagcuccauucuucuggucgacuuguuucccacccacugcggccauaauguugauuuaucuaaagcuauaaaccugaauggggugaacuucaauaacguagacgcaucaagucuaggagccgcgcacgugggucagagcgcuuccagaggcagggggcucggagagaauccugaugacgaagagggcgaugccaagaaaaagaaagacgguaagaaggcagaaccgaaaaacccacgggagaauaagcugaaacaacccggggaucgcgccgacggacagccugcuggcgaucgagcagacggccagccagccggggaucgugcugacggacagcccgccggugauagagcggcaggccaaccugccggggacagggcugccggacagccagcaggcgaccgggcugccggucagcccgcgggggaucgcgccgacggacagccugcaggcgauagagcugccggccaaccagcuggggacagggccgauggacagccggcgggugaccgggccgcuggccagcccgcgggggaucgcgcagacggacagccugccggcgaucgagcugccggucaaccagcaggggacagagccgcuggccagcccgccggagauagggcagacggccagccugcgggggaccgggcugccggacaaccagccggugaucgugcagcuggccagcccgccggggaccgcgcagcuggacagccggccggcaacggugcagggggccaggccgcuggaggcaaugcagccaacaagaaagcugaagaugccgggggaaaugcggguggccaagggcagaacaaugagggagcaaacgccccuaacgagaagucugucaaggaauaccuugacaaagugagagcuacaguuggcacugaguggacgcccuguucggugaccugcggugucggggugaggguacggcgacgcguuaaugccgcaaacaagaaaccagaagaucugacauugaaugacaucgagacugauguguguaccauggacaagugcgcuggcauuuuuaacgucgugucaaauagccucggacuggugauccugcucgucuuagcccuguucaacuga

SEQ ID NO: 4500 - RNA, 1116 nt, Artificial Sequence
  derived and/or modified CDS sequence (opt3) from Pv(CSP50VK210)__ANS71630.1__CSP
augaagaacuucauccugcucgccgugagcuccauucuucuggucgacuuguuucccacccacugcggccauaauguugauuuaucuaaagcuauaaaccugaauggggugaacuucaauaacguagacgcaucaagucuaggagccgcgcacgugggucagagcgcuuccagaggcagggggcucggagagaauccugaugacgaagagggcgaugccaagaaaaagaaagacgguaagaaggcagaaccgaaaaacccacgggagaauaagcugaaacaacccggggaucgcgccgacggacagccugcuggcgaucgagcagacggccagccagccggggaucgugcugccggacagcccgcgggugacagagcagauggccaaccugccggggacagggcugccggacagccagcaggcgaccgggcugauggucagcccgccggggaccgcgcggccggacagccugcaggcgauagagcugacggccaaccagccggggauagggcugccggacagccggcgggugaccgggccgauggccagcccgcuggggaccgcgcggcaggacagccugccggcgaucgagcugccggucaaccagcaggggacagagccgauggccagcccgcuggagacagggccgcaggccagccugcgggggaccgggcugccggacaaccagccggugaucgugcagcuggccagcccgccggggaccgcgcagcuggacagccggccggcaacggugcagggggccaggccgcuggaggcaaugcagccaacaagaaagcugaagaugccgggggaaaugcggguggccaagggcagaacaaugagggagcaaacgccccuaacgagaagucugucaaggaauaccuugacaaagugagagcuacaguuggcacugaguggacgcccuguucggugaccugcggugucggggugaggguacggcgacgcguuaaugccgcaaacaagaaaccagaagaucugacauugaaugacaucgagacugauguguguaccauggacaagugcgcuggcauuuuuaacgucgugucaaauagccucggacuggugauccugcucgucuuagcccuguucaacuga

SEQ ID NO: 4501 - RNA, 1107 nt, Artificial Sequence
  derived and/or modified CDS sequence (opt3) from Pv(Cam16)__AGN05247.1__CSP
augaagaacuucauccugcucgccgugagcuccauucuucuggucgacuuguuucccacccacugcggccauaauguugauuuaucuaaagcuauaaaccugaauggggugaacuucaauaacguagacgcaucaagucuaggagccgcgcacgugggucagagcgcuuccagaggcagggggcucggagagaauccugaugacgaagagggcgaugccaagaaaaagaaagacgguaagaaggcagaaccgaaaaacccacgggagaauaagcugaaacaacccgccggggaucgcgcugacggacagccugcaggcgaucgagccgacggccagccagcuggggaucgugccgcgggacagcccgccggugacagagcagauggccaaccugcuggggacagggccgacggacagccagcaggcgaucgggcugccggucagcccgcgggggaccgcgccgauggacagccugcaggcgacagagcugccggccaaccagcuggggauagggccgacggacagccggccggugaucgggcagacggccagcccgcuggggaucgcgcggcaggacagccugccggcgaccgagcugauggucaaccagccggggacagagcagccggccagcccgcuggagacagggccgauggccagccugcaggggaccgggcggcuggacaaccagccggugaucgugcagccggccagcccgcuggggaccgcgccgcaggacagccggcuggcaacggugccgggggccaggcggccggaggcaaugcugggggaaacgccgguggcaaugcagggggacaaggccagaacaaugaaggugcuaacgccccuaacgagaagucugucaaagaguaccuugauaaggugagagcaacaguugggacugaauggacgcccuguucggugaccugcggcgucggagugaggguacggcgacgcguuaaugcggccaacaagaaaccagaggaccugacauugaaugaucucgaaacugacguguguaccauggauaagugcgcuggcaucuuuaacgucgugucaaauagccuggggcuggugauucucuuaguccuggcccuuuucaacuga

SEQ ID NO: 4502 - RNA, 1107 nt, Artificial Sequence
  derived and/or modified CDS sequence (opt3) from Pv(Cam32)__AGN05260.1__CSP
augaagaacuucauccugcucgccgugagcuccauucuucuggucgacuuguuucccacccacugcggccauaauguugauuuaucuaaagcuauaaaccugaauggggugggauucaacaauguagacgcaucaagucuaggugccgcgcacgugggccagagcgcuuccagagggaggggacucggcgagaacccugaugacgaagagggugaugccaagaaaaagaaagacgggaagaaggcagaaccgaaaaauccacgggagaacaagcugaaacaacccgccggagaucgcgcugacggccagccugcaggcgaucgagccgacgggcagccagcuggagaucgugccgacggucagcccgcgggcgauagagcagccgggcaaccugcuggagacagggccgacggccagccagcuggugaucgggcagccgggcagcccgcgggagaccgcgccgauggccagccugcaggcgacagagcugccgggcaaccagcuggagauagggccgacggucagccggcaggcgaucgggccgcugggcagcccgcgggagaccgcgcagccggccagccugcuggugaucgagccgacgggcaaccagcaggcgauagagccgcuggacagcccgccggcgacagggcagacgggcagccugcgggagaucgggcugccggucaaccagcaggcgaccgugccgcugggcagcccgccggagaucgcgcagcuggccagccggccgguaauggggcgggcggacaggccgcuggcgggaacgcaggagguaaugccggcgggaacgcuggaggccaaggucagaauaacgaaggggccaaugcaccuaacgagaagucugucaaagaguaccuugacaaggugagagcgacaguuggcacugaauggacgcccuguucggugaccugcggagucggcgugaggguacggcgacgcguuaacgccgcuaauaagaaaccagaggaucugacauugaacgaccucgaaacugauguguguaccauggacaagugcgccgggaucuuuaaugucgugucaaacagccugggacuggugauucucuuaguccuggcacuuuucaauuga

SEQ ID NO: 4503 - RNA, 1107 nt, Artificial Sequence
  derived and/or modified CDS sequence (opt3) from Pv(Cam38)__AGN05266.1__CSP
augaagaacuucauccugcucgccgugagcuccauucuucuggucgacuuguuucccacccacugcggccauaauguugauuuaucuaaagcuauaaaccugaauggggugaacuucaauaacguagacgcaucaagucuaggagccgcgcacgugggucagagcgcuuccagaggcagggggcucggagagaauccugaugacgaagagggcgaugccaagaaaaagaaagacgguaagaaggcagaaccgaaaaacccacgggagaauaagcugaaacaacccggggaucgcgccgacggacagccugcuggcgaucgagcagacggccagccagccggggaucgugcugccggacagcccgcgggugacagagcagauggccaaccugccggggacagggcugccggacagccagcaggcgaccgggcugauggucagcccgccggggaccgcgcggccggacagccugcaggcgauagagcugacggccaaccagccggggauagggcugccggacagccggccggugaccgggcagauggccagcccgcuggggaccgcgcggcaggacagccugccggcgaucgagcugacggucaaccagccggggauagagcagccggccagcccgcuggagacagggccgcaggccagccugcgggggaccgggcugauggacaaccagccggugaccgugcagccggccagcccgcuggggaucgcgccgcaggacagccggcuggcgacagagccgcgggucagccugccgggaacggcgcuggaggccaagcagccgggggaaaugcugguggccaggggcagaacaaugaaggagccaacgcacccaaugagaagucugucaaagaguaccuugauaaggugagggcgacaguuggcacugaauggacgccauguucggugaccugcggugucggggugcggguacgacgcagaguuaacgccgcuaacaagaaaccugaggaccugacauugaaugaucucgaaacugacguguguaccauggauaagugcgccggcaucuuuaacgucgugucaaauagccugggacuggugauucucuuaguccuggcacuuuucaacuga

SEQ ID NO: 4504 - RNA, 1104 nt, Artificial Sequence
  derived and/or modified CDS sequence (opt3) from Pv(CSP19VK210)__ANS71599.1__CSP
augaagaacuucauccugcucgccgugagcuccauucuucuggucgacuuguuucccacccacugcggccauaauguugauuuaucuaaagcuauaaaccugaauggggugaacuucaauaacguagacgcaucaagucuaggagccgcgcacgugggucagagcgcuuccagaggcagggggcucggagagaauccugaugacgaagagggcgaugccaagaaaaagaaagacgguaagaaggcagaaccgaaaaacccacgggagaauaagcugaaacaacccggggaucgcgccgacggacagccugcuggcgaucgagcagacggccagccagccggggaucgugcugacggacagcccgccggugauagagcggcaggccaaccugccggggacagggcugacggacagccagccggcgaucgggcagcuggucagcccgccggggaccgcgcggauggacagccugccggcgacagagcagcuggccaaccagccggggauagggcugacggacagccggccggugaucgggcagccggccagcccgcuggggaccgcgcggauggacagccugcaggcgaccgagccgcuggucaaccagccggggauagagcagccggccagcccgcuggagacagggccgacggccagccugcaggggaucgggcggcuggacaaccagccggugaccgugcagccggccagcccgcuggggaucgcgccgcaggacagccggcuggcaacggugccgggggccaggcggccggaggcaaugcugcaaacaagaaagccgaagacgcugggggacaaggucagaauaacgagggcgccaaugcaccuaacgagaagucugucaaggaauaccuugauaaagugagagcgacaguugggacugaguggacgcccuguucggugaccugcggagucggcgugaggguacggcgacgcguuaacgccgcuaauaagaaaccagaagaccugacauugaacgauaucgagacugacguguguaccauggauaagugcgccgguauuuuuaaugucgugucaaacagccucgggcuggugauccugcucgucuuagcacuguucaauuga

SEQ ID NO: 4505 - RNA, 1089 nt, Artificial Sequence
  derived and/or modified CDS sequence (opt3) from Pv(CSP24VK210)__ANS71604.1__CSP
augaagaacuucauccugcucgccgugagcuccauucuucuggucgacuuguuucccacccacugcggccauaauguugauuuaucuaaagcuauaaaccugaauggggugaacuucaauaacguagacgcaucaagucuaggagccgcgcacgugggucagagcgcuuccagaggcagggggcucggagagaauccugaugacgaagagggcgaugccaagaaaaagaaagacgguaagaaggcagaaccgaaaaacccacgggagaauaagcugaaacaacccggggaucgcgccgacggacagccugcuggcgaucgagcagacggccagccagccggggaucgugcugacggacagcccgccggugauagagcggcaggccaaccugccggggacagggcugacggacagccagccggcgaucgggcagcuggucagcccgccggggaccgcgcggauggacagccugccggcgacagagcagcuggccaaccagccggggauagggcugacggacagccggccggugaucgggcagccggccagcccgcuggggaccgcgcggauggacagccugcaggcgaccgagccgcuggucaaccagccggggauagagcagccggccagcccgcuggagacagggccgacggccagccugcaggggaucgggcggcuggacaaccagccggugaccgugcagccggccagcccgcugggaacggagccggcggucaggcagcugggggcaaugccgcgaacaagaaagccgaagaugcuggaggcaaugcagggggacagggucaaaacaaugagggcgccaacgcuccgaacgagaagucugucaaggaauaccuugacaaagugcgcgccacaguugggacugaguggacgccuuguucggugaccugcggagucggcgugagaguaaggcggcgaguuaaugcagcgaacaagaaacccgaagaucugacauugaaugacaucgagacugauguguguaccauggacaagugcgccgguauuuuuaacgucgugucaaauagccucgggcuggugauccugcucgucuuagcucuguucaacuga

SEQ ID NO: 4506 - RNA, 1089 nt, Artificial Sequence
  derived and/or modified CDS sequence (opt3) from Pv(CSP35VK210)__ANS71615.1__CSP
augaagaacuucauccugcucgccgugagcuccauucuucuggucgacuuguuucccacccacugcggccauaauguugauuuaucuaaagcuauaaaccugaauggggugaacuucaauaacguagacgcaucaagucuaggagccgcgcacgugggucagagcgcuuccagaggcagggggcucggagagaauccugaugacgaagagggcgaugccaagaaaaagaaagacgguaagaaggcagaaccgaaaaacccacgggagaauaagcugaaacaacccggggaucgcgccgacggacagccugcuggcgaucgagcagacggccagccagccggggaucgugcugccggacagcccgcgggugacagagcagauggccaaccugccggggacagggcugccggacagccagcaggcgaccgggcugauggucagcccgccggggaccgcgcggccggacagccugcaggcgauagagcugacggccaaccagccggggauagggcugccggacagccggccggugaccgggcagauggccagcccgcuggggaccgcgcggcaggacagccugccggcgaucgagcugccggucaaccagcaggggacagagccgauggccagcccgcuggagacagggccgcaggccagccugcgggggaccgggcugccggacaaccagccggugaucgugcagcuggccagcccgccgggaacggagcaggcggucaggcugccgggggcaaugcggccaacaagaaagcugaagacgcaggaggcaaugccgggggacagggucaaaacaaugagggcgcuaacgccccgaacgagaagucugucaaggaauaccuugauaaagugcgcgcaacaguugggacugaguggacgccuuguucggugaccugcggagucggcgugagaguaaggcggcgaguuaaugcggccaacaagaaacccgaagaccugacauugaaugauaucgagacugacguguguaccauggauaagugcgcugguauuuuuaacgucgugucaaauagccucgggcuggugauccugcucgucuuagcccuguucaacuga

SEQ ID NO: 4507 - RNA, 1062 nt, Artificial Sequence
  derived and/or modified CDS sequence (opt3) from Pv(CSP9VK210)__ANS71589.1__CSP
augaagaacuucauccugcucgccgugagcuccauucuucuggucgacuuguuucccacccacugcggccauaauguugauuuaucuaaagcuauaaaccugaauggggugaacuucaauaacguagacgcaucaagucuaggagccgcgcacgugggucagagcgcuuccagaggcagggggcucggagagaauccugaugacgaagagggcgaugccaagaaaaagaaagacgguaagaaggcagaaccgaaaaacccacgggagaauaagcugaaacaacccggggaucgcgccgacggacagccugcuggcgaucgagcagacggccagccagccggggaucgugcugccggacagcccgcgggugacagagcagauggccaaccugccggggacagggcugccggacagccagcaggcgaccgggcugauggucagcccgccggggaccgcgcggccggacagccugcaggcgauagagcugacggccaaccagccggggauagggcugccggacagccggccggugaccgggcagcuggccagcccgcgggggaucgcgcagacggacagccugccggcgaucgagcugccggucaaccagcaggggacagagccgcuggccagcccgccggagauagggcagcgggccagccugcuggggaccgggccgcaggacaaccagccgguaacggcgcugggggacaggccgcaggcgguaaugcugccaacaagaaagcggaagacgccgggggcaaugcuggaggccaggggcagaacaaugagggagcaaacgcccccaacgagaagucugucaaggaauaccuugauaaagugcgugcuacaguugguacugaguggacgccguguucggugaccugcggcgucggggugcgcguaagaaggcggguuaaugccgcaaacaagaaaccugaagaccugacauugaaugauaucgagacugacguguguaccauggauaagugcgcgggaauuuuuaacgucgugucaaauagccucggccuggugauccugcucgucuuagcccuguucaacuga

SEQ ID NO: 4508 - RNA, 894 nt, Artificial Sequence
  derived and/or modified CDS sequence (opt3) from Pv(Pt02.2)__ADB92552.1__CSP
augaagaacuucauccugcucgccgugagcuccauucuucuggucgacuuguuucccacccacugcggccauaauguugauuuaucuaaagcuauaaaccugaauggggugggauucaacaauguagacgcaucaagucuaggugccgcgcacgugggccagagcgcuuccagagggaggggacucggcgagaacccugaugacgaagagggugaugccaagaaaaagaaagacgggaagaaggcagaaccgaaaaauccacgggagaacaagcugaaacaacccgaagauggagccggcgaccagccuggcgcuaauggggcaggaaaccagccaggugccaauggcgcugggaaccagcccggagccaauggcgcggguaaccaaccuggggcaaauggagccggcaaccagccaggcgcuaacggggccggaaaucagcccggugcaaacggcgcugggaaucagccuggagccaacggcgcgggugggcaagccgcaggcggaaaugcugccaacaagaaagcuggcgaugccggggcaggaggucaggccgcuggcgggaaugcggcaaacaagaaggccggagacgcuggcgccggucaggggcagaauaacgagggcgcaaaugccccaaacgagaaaucugucaaggaauaccuugauaaagugcgcgcuacaguuggaacugaguggacgccguguucggugaccugcggcgucggggugcgaguacguagaaggguuaaugccgcaaacaagaaacccgaagaccugacauugaaugaucucgagacugacguguguaccauggacaagugcgcgggaaucuuuaacgucgugucaaacagccugggucuggugauucucuuaguccuggcucuuuucaauuga

SEQ ID NO: 4509 - RNA, 840 nt, Artificial Sequence
  derived and/or modified CDS sequence (opt3) from Pv(Pt04.5)__ADB92555.1__CSP
augaagaacuucauccugcucgccgugagcuccauucuucuggucgacuuguuucccacccacugcggccauaauguugauuuaucuaaagcuauaaaccugaauggggugggauucaacaauguagacgcaucaagucuaggugccgcgcacgugggccagagcgcuuccagagggaggggacucggcgagaacccugaugacgaagagggugaugccaagaaaaagaaagacgggaagaaggcagaaccgaaaaauccacgggagaacaagcugaaacaacccgaagauggagccggcgaccagccuggcgcuaauggggcaggaaaccagccaggugccaauggcgcugggaaccagcccggagccaauggcgcggguaaccaaccuggggcaaauggagccggcaaccagccaggcgcuaacggggccggaggucaggcagcuggcgggaaugccgcgaacaagaaagccggagaugcaggcgcuggugggcaggccgcuggcggaaaugccgcaaacaagaaggccggcgacgcuggggcgggacaaggucagaauaacgagggcgcaaaugcccccaacgagaaaucugucaaggaauaccuugauaaagugcgcgcuacaguugggacugaguggacgccuuguucggugaccugcggagucggcgugcgaguacguagaaggguuaaugccgcaaacaagaaaccagaagaccugacauugaaugaucucgagacugacguguguaccauggacaagugcgccgguaucuuuaacgucgugucaaauagccuggggcuggugauucucuuaguccuggcucuuuucaacuga

SEQ ID NO: 4510 - RNA, 1023 nt, Artificial Sequence; identical to SEQ ID NO: 179
  derived and/or modified CDS sequence (opt3) from Pb(ANKA)__XP_022712148.1__CSP

SEQ ID NO: 4511 - RNA, 1194 nt, Artificial Sequence; identical to SEQ ID NO: 185
  derived and/or modified CDS sequence (opt4) from Pf(3D7)__XP_001351122.1__CSP

SEQ ID NO: 4512 - RNA, 1335 nt, Artificial Sequence
  derived and/or modified CDS sequence (opt4) from Pf(Pal97-089)__BAM84949.1__CSP
augaugagaaagcuggccauccugagcgugagcagcuuccuguucguggaggcccuguuccaggaguaccagugcuacggcagcagcagcaacaccagagugcugaacgagcugaacuacgacaacgccggcaccaaccuguacaacgagcuggagaugaacuacuacggcaagcaggagaacugguacagccugaagaagaacagcagaagccugggcgagaacgacgacggcgacaacgacaacggcgacaacggcagagagggcaaggacgaggacaagagagacggcaacaacgaggacaacgagaagcugagaaagcccaagcacaagaagcugaagcagcccggcgacggcaaccccgaccccaacgccaaccccaacguggaccccaacgccaaccccaacguggaccccaacgccaaccccaacgccaaccccaacgccaaccccaacgccaaccccaacgccaaccccaacgccaaccccaacgccaaccccaacgccaaccccaacgccaaccccaacgccaaccccaacgccaaccccaacgccaaccccaacgccaaccccaacgccaaccccaacgccaaccccaacgccaaccccaacgccaaccccaacgccaaccccaacgccaaccccaacgccaaccccaacgccaaccccaacgccaaccccaacgccaaccccaacgccaaccccaacgccaaccccaacgccaaccccaacgccaaccccaacgccaaccccaacgccaaccccaacgccaaccccaacgccaaccccaacgccaaccccaacgccaaccccaacgccaaccccaacgccaaccccaacgccaaccccaacgccaaccccaacgccaaccccaacgccaaccccaacgccaaccccaacgccaaccccaacgccaaccccaacgccaaccccaacgccaaccccaacgccaaccccaacaagaacaaccagggcaacggccagggccacaacaugcccaacgaccccaacagaaacguggacgagaacgccaacgccaacaacgccgugaagaacaacaacaacgaggagcccagcgacaagcacaucgagcaguaccugaagaagauccaguacagccugagcaccgaguggagccccugcagcgugaccugcggcaacggcauccaggugagaaucaagcccggcagcgccgacaagcccaaggaccagcuggacuacgagaacgacaucgagaagaagaucugcaagauggagaagugcagcagcguguucaacguggugaacagcagcaucggccugaucauggugcugagcuuccuguuccugaacuga

SEQ ID NO: 4513 - RNA, 1329 nt, Artificial Sequence
  derived and/or modified CDS sequence (opt4) from Pf(T9/94)__BAD73956.1__CSP
augaugagaaagcuggccauccugagcgugagcagcuuccuguucguggaggcccuguuccaggaguaccagugcuacggcagcagcagcaacaccagagugcugaacgagcugaacuacgacaacgccggcaccaaccuguacaacgagcuggagaugaacuacuacggcaagcaggagaacugguacagccugaagaagaacagcagaagccugggcgagaacgacgacggcgacaacgacaacggcaacaacaacaacggcaacaacaacaacggcgacaacggcagagagggcaaggacgaggacaagagagacggcaacaacgaggacaacgagaagcugagaaagcccaagcacaagaagcugaagcagcccggcgacgacaaccccgaccccaacgccaaccccaacguggaccccaacgccaaccccaacguggaccccaacgccaaccccaacgccaaccccaacgccaaccccaacgccaaccccaacgccaaccccaacgccaaccccaacgccaaccccaacgccaaccccaacgccaaccccaacgccaaccccaacgccaaccccaacgccaaccccaacgccaaccccaacgccaaccccaacgccaaccccaacguggaccccaacgccaaccccaacgccaaccccaacgccaaccccaacgccaaccccaacgccaaccccaacgccaaccccaacgccaaccccaacgccaaccccaacgccaaccccaacgccaaccccaacgccaaccccaacgccaaccccaacgccaaccccaacgccaaccccaacgccaaccccaacgccaaccccaacgccaaccccaacgccaaccccaacgccaaccccaacgccaaccccaacgccaaccccaacgccaaccccaacgccaaccccaacgccaaccccaacgccaaccccaacgccaaccccaacaagaacaaccagggcaacggccagggccacaacaugcccaacgaccccaacagaaacguggacgagaacgccaacgccaacaacgccgugaagaacaacaacaacgaggagcccagcgacaagcacaucgagcaguaccugaagaagauccagaacagccugagcaccgaguggagccccugcagcgugaccugcggcaacggcauccaggugagaaucaagcccggcagcgccgacaagcccaaggaccagcuggacuacgagaacgacaucgagaagaagaucugcaagauggagaagugcagcagcguguucaacguggugaacagcagcaucggccugaucauggugcugagcuuccuguuccugaacuga

SEQ ID NO: 4514 - RNA, 1329 nt, Artificial Sequence
  derived and/or modified CDS sequence (opt4) from Pf(Tq/94)__AAA29551.1__CSP
augaugagaaagcuggccauccugagcgugagcagcuuccuguucguggaggcccuguuccaggaguaccagugcuacggcagcagcagcaacaccagagugcugaacgagcugaacuacgacaacgccggcaucaaccuguacaacgagcuggagaugaacuacuacggcaagcaggagaacugguacagccugaagaagaacagcagaagccugggcgagaacgacgacggcgacaacgacaacggcaacaacaacaacggcaacaacaacaacggcgacaacggcagagagggcaaggacgaggacaagagagacggcaacaacgaggacaacgagaagcugagaaagcccaagcacaagaagcugaagcagcccggcgacggcaaccccgaccccaacgccaaccccaacguggaccccaacgccaaccccaacguggaccccaacgccaaccccaacgccaaccccaacgccaaccccaacgccaaccccaacgccaaccccaacgccaaccccaacgccaaccccaacgccaaccccaacgccaaccccaacgccaaccccaacgccaaccccaacgccaaccccaacgccaaccccaacgccaaccccaacgccaaccccaacguggaccccaacgccaaccccaacgccaaccccaacgccaaccccaacgccaaccccaacgccaaccccaacgccaaccccaacgccaaccccaacgccaaccccaacgccaaccccaacgccaaccccaacgccaaccccaacgccaaccccaacgccaaccccaacgccaaccccaacgccaaccccaacgccaaccccaacgccaaccccaacgccaaccccaacgccaaccccaacgccaaccccaacgccaaccccaacgccaaccccaacgccaaccccaacgccaaccccaacgccaaccccaacgccaaccccaacaagaacaaccagggcaacggccagggccacaacaugcccaacgaccccaacagaaacguggacgagaacgccaacgccaacaacgccgugaagaacaacaacaacgaggagcccagcgacaagcacaucgagcaguaccugaagaagauccagaacagccugagcaccgaguggagccccugcagcgugaccugcggcaacggcauccaggugagaaucaagcccggcagcgccgacaagcccaaggaccagcuggacuacgagaacgacaucgagaagaagaucugcaagauggagaagugcagcagcguguucaacguggugaacagcagcaucggccugaucauggugcugagcuuccuguuccugaacuga

SEQ ID NO: 4515 - RNA, 1329 nt, Artificial Sequence
  derived and/or modified CDS sequence (opt4) from Pf(Wellcome)__AAA29554.1__CSP
augaugagaaagcuggccauccugagcgugagcagcuuccuguucguggaggcccuguuccaggaguaccagugcuacggcagcagcagcaacaccagagugcugaacgagcugaacuacgacaacgccggcaccaaccuguacaacgagcuggagaugaacuacuacggcaagcaggagaacugguacagccugaagaagaacagcagaagccugggcgagaacgacgacggcgacaacgacaacggcaacaacaacaacggcaacaacaacaacggcgacaacggcagagagggcaaggacgaggacaagagagacggcaacaacgaggacaacgagaagcugagaaagcccaagcacaagaagcugaagcagcccggcgacggcaaccccgaccccaacgccaaccccaacguggaccccaacgccaaccccaacguggaccccaacgccaaccccaacgccaaccccaacgccaaccccaacgccaaccccaacgccaaccccaacgccaaccccaacgccaaccccaacgccaaccccaacgccaaccccaacgccaaccccaacgccaaccccaacgccaaccccaacgccaaccccaacgccaaccccaacgccaaccccaacguggaccccaacgccaaccccaacgccaaccccaacgccaaccccaacgccaaccccaacgccaaccccaacgccaaccccaacgccaaccccaacgccaaccccaacgccaaccccaacgccaaccccaacgccaaccccaacgccaaccccaacgccaaccccaacgccaaccccaacgccaaccccaacgccaaccccaacgccaaccccaacgccaaccccaacgccaaccccaacgccaaccccaacgccaaccccaacgccaaccccaacgccaaccccaacgccaaccccaacgccaaccccaacgccaaccccaacaagaacaaccagggcaacggccagggccacaacaugcccaacgaccccaacagaaacguggacgagaacgccaacgccaacaacgccgugaagaacaacaacaacgaggagcccagcgacaagcacaucgagcaguaccugaagaagauccagaacagccugagcaccgaguggagccccugcagcgugaccugcggcaacggcauccaggugagaaucaagcccggcagcgccgacaagcccaaggaccagcuggacuacgagaacgacaucgagaagaagaucugcaagauggagaagugcagcagcguguucaacguggugaacagcagcaucggccugaucauggugcugagcuuccuguuccugaacuga

SEQ ID NO: 4516 - RNA, 1323 nt, Artificial Sequence
  derived and/or modified CDS sequence (opt4) from Pf(Pal97-115)__BAM84958.1__CSP
augaugagaaagcuggccauccugagcgugagcagcuuccuguucguggaggcccuguuccaggaguaccagugcuacggcagcagcagcaacaccagagugcugaacgagcugaacuacgacaacgccggcaccaaccuguacaacgagcuggagaugaacuacuacggcaagcaggagaacugguacagccugaagaagaacagcagaagccugggcgagaacgacgacggcaacaacaacaacggcgacaacggcagagagggcaaggacgaggacaagagagacggcaacaacgaggacaacgagaagcugagaaagcccaagcacaagaagcugaagcagcccggcgacggcaaccccgaccccaacgccaaccccaacguggaccccaacgccaaccccaacguggaccccaacgccaaccccaacguggaccccaacgccaaccccaacgccaaccccaacgccaaccccaacgccaaccccaacgccaaccccaacgccaaccccaacgccaaccccaacgccaaccccaacgccaaccccaacgccaaccccaacgccaaccccaacgccaaccccaacgccaaccccaacgccaaccccaacgccaaccccaacgccaaccccaacgccaaccccaacgccaaccccaacgccaaccccaacgccaaccccaacgccaaccccaacgccaaccccaacguggaccccaacgccaaccccaacgccaaccccaacgccaaccccaacgccaaccccaacgccaaccccaacgccaaccccaacgccaaccccaacgccaaccccaacgccaaccccaacgccaaccccaacgccaaccccaacgccaaccccaacgccaaccccaacgccaaccccaacgccaaccccaacgccaaccccaacgccaaccccaacgccaaccccaacgccaaccccaacaagaacaaccagggcaacggccagggccacaacaugcccaacgaccccaacagaaacguggacgagaacgccaacgccaacaacgccgugaagaacaacaacaacgaggagcccagcgaccagcacaucgagaaguaccugaagaucauccagaacagccugagcaccgaguggagccccugcagcgugaccugcggcaacggcauccaggugagaaucaagcccggcagcgccgacaagcccaaggaccagcuggacuacgccaacgacaucgagaagaagaucugcaagauggagaagugcagcagcguguucaacguggugaacagcagcaucggccugaucauggugcugagcuuccuguuccugaacuga

SEQ ID NO: 4517 - RNA, 1323 nt, Artificial Sequence
  derived and/or modified CDS sequence (opt4) from Pf(PMS5)__BAN59428.1__CSP
augaugagaaagcuggccauccugagcgugagcagcuuccuguucguggaggcccuguuccaggaguaccagugcuacggcagcagcagcaacaccagagugcugaacgagcugaacuacgacaacgccggcaccaaccuguacaacgagcuggagaugaacuacuacggcaagcaggagaacugguacagccugaagaagaacagcagaagccugggcgagaacgacgacggcaacaacaacaacggcgacaacggcagagagggcaaggacgaggacaagagagacggcaacaacgaggacaacgagaagcugagaaagcccaagcacaagaagcugaagcagcccggcgacggcaaccccgaccccaacgccaaccccaacguggaccccaacgccaaccccaacguggaccccaacgccaaccccaacguggaccccaacgccaaccccaacgccaaccccaacgccaaccccaacgccaaccccaacgccaaccccaacgccaaccccaacgccaaccccaacgccaaccccaacgccaaccccaacgccaaccccaacgccaaccccaacgccaaccccaacgccaaccccaacgccaaccccaacgccaaccccaacgccaaccccaacgccaaccccaacgccaaccccaacgccaaccccaacgccaaccccaacgccaaccccaacgccaaccccaacgccaaccccaacgccaaccccaacgccaaccccaacgccaaccccaacgccaaccccaacgccaaccccaacgccaaccccaacgccaaccccaacgccaaccccaacgccaaccccaacgccaaccccaacgccaaccccaacgccaaccccaacgccaaccccaacgccaaccccaacgccaaccccaacgccaaccccaacgccaaccccaacgccaaccccaacgccaaccccaacaagaacaaccagggcaacggccagggccacaacaugcccaacgaccccaacagaaacguggacgagaacgccaacgccaacaacgacgugaagaacaacaacaacgaggagcccagcgacaagcacaucgagcaguaccugaagaagauccaguacagccugagcaccgaguggagccccugcagcgugaccugcggcaacggcauccaggugagaaucaagcccggcagcgccgacaagcccaaggaccagcuggacuacgagaacgacaucgagaagaagaucugcaagauggagaagugcagcagcguguucaacguggugaacagcagcaucggccugaucauggugcugagcuuccuguuccugaacuga

SEQ ID NO: 4518 - RNA, 1320 nt, Artificial Sequence
  derived and/or modified CDS sequence (opt4) from Pf(J2)__ACO49408.1__CSP
augagaaagcuggccauccugagcgugagcagcuuccuguucguggaggcccuguuccaggaguaccagugcuacggcagcagcagcaacaccagagugcugaacgagcugaacuacgacaacgccggcaccaaccuguacaacgagcuggagaugaacuacuacggcaagcaggagaacugguacagccugaagaagaacagcagaagccugggcgagaacgacgacggcaacaacaacaacggcgacaacggcagagagggcaaggacgaggacaagagagacggcaacaacgaggacaacgagaagcugagaaagcccaagcacaagaagcugaagcagcccggcgacggcaaccccgaccccaacgccaaccccaacguggaccccaacgccaaccccaacguggaccccaacgccaaccccaacguggaccccaacgccaaccccaacgccaaccccaacgccaaccccaacgccaaccccaacgccaaccccaacgccaaccccaacgccaaccccaacgccaaccccaacgccaaccccaacgccaaccccaacgccaaccccaacgccaaccccaacgccaaccccaacgccaaccccaacgccaaccccaacgccaaccccaacguggaccccaacgccaaccccaacgccaaccccaacgccaaccccaacgccaaccccaacgccaaccccaacgccaaccccaacgccaaccccaacgccaaccccaacgccaaccccaacgccaaccccaacgccaaccccaacgccaaccccaacgccaaccccaacgccaaccccaacgccaaccccaacgccaaccccaacgccaaccccaacgccaaccccaacgccaaccccaacgccaaccccaacgccaaccccaacgccaaccccaacgccaaccccaacgccaaccccaacgccaaccccaacaagaacaaccagggcaacggccagggccacaacaugcccaacgaccccaacagaaacguggacgagaacgccaacgccaacaacgacgugaagaacaacaacaacgaggagcccagcgacaagcacaucgagcaguaccugaagaagauccaguacagccugagcaccgaguggagccccugcagcgugaccugcggcaacggcauccaggugagaaucaagcccggcagcgccgacaagcccaaggaccagcuggacuacgagaacgacaucgagaagaagaucugcaagauggagaagugcagcagcguguucaacguggugaacagcagcaucggccugaucauggugcugagcuuccuguuccugaacuga

SEQ ID NO: 4519 - RNA, 1320 nt, Artificial Sequence
  derived and/or modified CDS sequence (opt4) from Pf(M4)__ACO49420.1__CSP
augagaaagcuggccauccugagcgugagcagcuuccuguucguggaggcccuguuccaggaguaccagugcuacggcagcagcagcaacaccagagugcugaacgagcugaacuacgacaacgccggcaccaaccuguacaacgagcuggagaugaacuacuacggcaagcaggagaacugguacagccugaagaagaacagcagaagccugggcgagaacgacgacggcaacaacaacaacggcgacaacggcagagagggcaaggacgaggacaagagagacggcaacaacgaggacaacgagaagcugagaaagcccaagcacaagaagcugaagcagcccggcgacggcaaccccgaccccaacgccaaccccaacguggaccccaacgccaaccccaacguggaccccaacgccaaccccaacgccaaccccaacgccaaccccaacgccaaccccaacgccaaccccaacgccaaccccaacgccaaccccaacgccaaccccaacgccaaccccaacgccaaccccaacgccaaccccaacgccaaccccaacgccaaccccaacgccaaccccaacgccaaccccaacgccaaccccaacguggaccccaacgccaaccccaacgccaaccccaacgccaaccccaacgccaaccccaacgccaaccccaacgccaaccccaacgccaaccccaacgccaaccccaacgccaaccccaacgccaaccccaacgccaaccccaacgccaaccccaacgccaaccccaacgccaaccccaacgccaaccccaacgccaaccccaacgccaaccccaacgccaaccccaacgccaaccccaacgccaaccccaacgccaaccccaacgccaaccccaacgccaaccccaacgccaaccccaacgccaaccccaacgccaaccccaacgccaaccccaacaagaacaaccagggcaacggccagggccacaacaugcccaacgaccccaacagaaacguggacgagaacgccaacgccaacaacgccgugaagaacaacaacaacgaggagcccagcgacaagcacaucaccgaguaccugaagaagauccagaacagccugagcaccgaguggagccccugcagcgugaccugcggcaacggcauccaggugagaaucaagcccggcagcgccggcaagagcaaggacgagcuggacuacgagaacgacaucgagaagaagaucugcaagauggagaagugcagcagcguguucaacguggugaacagcagcaucggccugaucauggugcugagcuuccuguuccugaacuga

SEQ ID NO: 4520 - RNA, 1320 nt, Artificial Sequence
  derived and/or modified CDS sequence (opt4) from Pf(TMS121)__ACO49498.1__CSP
augagaaagcuggccauccugagcgugagcagcuuccuguucguggaggcccuguuccaggaguaccagugcuacggcagcagcagcaacaccagagugcugaacgagcugaacuacgacaacgccggcaccaaccuguacaacgagcuggagaugaacuacuacggcaagcaggagaacugguacagccugaagaagaacagcagaagccugggcgagaacgacgacggcaacaacaacaacggcgacaacggcagagagggcaaggacgaggacaagagagacggcaacaacgaggacaacgagaagcugagaaagcccaagcacaagaagcugaagcagcccggcgacggcaaccccgaccccaacgccaaccccaacguggaccccaacgccaaccccaacguggaccccaacgccaaccccaacguggaccccaacgccaaccccaacgccaaccccaacgccaaccccaacgccaaccccaacgccaaccccaacgccaaccccaacgccaaccccaacgccaaccccaacgccaaccccaacgccaaccccaacgccaaccccaacgccaaccccaacgccaaccccaacgccaaccccaacgccaaccccaacgccaaccccaacgccaaccccaacgccaaccccaacgccaaccccaacgccaaccccaacgccaaccccaacgccaaccccaacgccaaccccaacgccaaccccaacgccaaccccaacgccaaccccaacgccaaccccaacgccaaccccaacgccaaccccaacgccaaccccaacgccaaccccaacgccaaccccaacgccaaccccaacgccaaccccaacgccaaccccaacgccaaccccaacgccaaccccaacgccaaccccaacgccaaccccaacgccaaccccaacgccaaccccaacgccaaccccaacaagaacaaccagggcaacggccagggccacaacaugcccaacgaccccaacagaaacguggacgagaacgccaacgccaacaacgacgugaagaacaacaacaacgaggagcccagcgacaagcacaucgagcaguaccugaagaagauccagaacagccugagcaccgaguggagccccugcagcgugaccugcggcaacggcauccaggugagaaucaagcccggcagcgccaacaagcccaaggacgagcuggacuacgagaacgacaucgagaagaagaucugcaagauggagaagugcagcagcguguucaacguggugaacagcagcaucggccugaucauggugcugagcuuccuguuccugaacuga

SEQ ID NO: 4521 - RNA, 1320 nt, Artificial Sequence
  derived and/or modified CDS sequence (opt4) from Pf(TMS180)__ACO49505.1__CSP
augagaaagcuggccauccugagcgugagcagcuuccuguucguggaggcccuguuccaggaguaccagugcuacggcagcagcagcaacaccagagugcugaacgagcugaacuacgacaacgccggcaccaaccuguacaacgagcuggagaugaacuacuacggcaagcaggagaacugguacagccugaagaagaacagcagaagccugggcgagaacgacgacggcaacaacaacaacggcgacaacggcagagagggcaaggacgaggacaagagagacggcaacaacgaggacaacgagaagcugagaaagcccaagcacaagaagcugaagcagcccggcgacggcaaccccgaccccaacgccaaccccaacguggaccccaacgccaaccccaacguggaccccaacgccaaccccaacguggaccccaacgccaaccccaacgccaaccccaacgccaaccccaacgccaaccccaacgccaaccccaacgccaaccccaacgccaaccccaacgccaaccccaacgccaaccccaacgccaaccccaacgccaaccccaacgccaaccccaacgccaaccccaacgccaaccccaacgccaaccccaacgccaaccccaacgccaaccccaacgccaaccccaacgccaaccccaacgccaaccccaacgccaaccccaacgccaaccccaacgccaaccccaacgccaaccccaacgccaaccccaacgccaaccccaacgccaaccccaacgccaaccccaacgccaaccccaacgccaaccccaacgccaaccccaacgccaaccccaacgccaaccccaacgccaaccccaacgccaaccccaacgccaaccccaacgccaaccccaacgccaaccccaacgccaaccccaacgccaaccccaacgccaaccccaacgccaaccccaacaagaacaaccagggcaacggccagggccacaacaugcccaacgaccccaacagaaacguggacgagaacgccaacgccaacaacgacgugaagaacaacaacaacgaggagcccagcgacaagcacaucgagcaguaccugaagaagauccaguacagccugagcaccgaguggagccccugcagcgugaccugcggcaacggcauccaggugagaaucaagcccggcagcgccgacaagcccaaggaccagcuggacuacgagaacgacaucgagaagaagaucugcaagauggagaagugcagcagcguguucaacguggugaacagcagcaucggccugaucauggugcugagcuuccuguuccugaacuga

SEQ ID NO: 4522 - RNA, 1311 nt, Artificial Sequence
  derived and/or modified CDS sequence (opt4) from Pf(836)__AAA29576.1__CSP
augaugagaaagcuggccauccugagcgugagcagcuuccuguucguggaggcccuguuccaggaguaccagugcuacggcagcagcagcaacaccagagugcugaacgagcugaacuacgacaacgccggcaucaaccuguacaacgagcuggagaugaacuacuacggcaagcaggagaacugguacagccugaagaagaacagcagaagccugggcgagaacgacgacggcaacaacaacaacggcgacaacggcagagagggcaaggacgaggacaagagagacggcaacaacgaggacaacgagaagcugagaaagcccaagcacaagaagcugaagcagcccggcgacggcaaccccgaccccaacgccaaccccaacguggaccccaacgccaaccccaacguggaccccaacgccaaccccaacgccaaccccaacgccaaccccaacgccaaccccaacgccaaccccaacgccaaccccaacgccaaccccaacgccaaccccaacgccaaccccaacgccaaccccaacgccaaccccaacgccaaccccaacgccaaccccaacgccaaccccaacgccaaccccaacguggaccccaacgccaaccccaacgccaaccccaacgccaaccccaacgccaaccccaacgccaaccccaacgccaaccccaacgccaaccccaacgccaaccccaacgccaaccccaacgccaaccccaacgccaaccccaacgccaaccccaacgccaaccccaacgccaaccccaacgccaaccccaacgccaaccccaacgccaaccccaacgccaaccccaacgccaaccccaacgccaaccccaacgccaaccccaacgccaaccccaacgccaaccccaacgccaaccccaacgccaaccccaacgccaaccccaacgccaaccccaacaagaacaaccagggcaacggccagggccacaacaugcccaacgaccccaacagaaacguggacgagaacgccaacgccaacaacgccgugaagaacaacaacaacgaggagcccagcgacaagcacaucaccgaguaccugaagaagauccagaacagccugagcaccgaguggagccccugcagcgugaccugcggcaacggcauccaggugagaaucaagcccggcagcgccggcaagagcaaggacgagcuggacuacgagaacgacaucgagaagaagaucugcaagauggagaagugcagcagcguguucaacguggugaacagcagcaucggccugaucauggugcugagcuuccuguuccugaacuga

SEQ ID NO: 4523 - RNA, 1311 nt, Artificial Sequence
  derived and/or modified CDS sequence (opt4) from Pf(842)__AAA29545.1__CSP
augaugagaaagcuggccauccugagcgugagcagcuuccuguucguggaggcccuguuccaggaguaccagugcuacggcagcagcagcaacaccagagugcugaacgagcugaacuacgacaacgccggcaucaaccuguacaacgagcuggagaugaacuacuacggcaagcaggagaacugguacagccugaagaagaacagcagaagccugggcgagaacgacgacggcaacaacaacaacggcgacaacggcagagagggcaaggacgaggacaagagagacggcaacaacgaggacaacgagaagcugagaaagcccaagcacaagaagcugaagcagcccggcgacggcaaccccgaccccaacgccaaccccaacguggaccccaacgccaaccccaacguggaccccaacgccaaccccaacguggaccccaacgccaaccccaacgccaaccccaacgccaaccccaacgccaaccccaacgccaaccccaacgccaaccccaacgccaaccccaacgccaaccccaacgccaaccccaacgccaaccccaacgccaaccccaacgccaaccccaacgccaaccccaacgccaaccccaacgccaaccccaacgccaaccccaacgccaaccccaacgccaaccccaacgccaaccccaacgccaaccccaacgccaaccccaacgccaaccccaacgccaaccccaacgccaaccccaacgccaaccccaacgccaaccccaacgccaaccccaacgccaaccccaacgccaaccccaacgccaaccccaacgccaaccccaacgccaaccccaacgccaaccccaacgccaaccccaacgccaaccccaacgccaaccccaacgccaaccccaacgccaaccccaacgccaaccccaacgccaaccccaacgccaaccccaacaagaacaaccagggcaacggccagggccacaacaugcccaacgaccccaacagaaacguggacgagaacgccaacgccaacaacgacgugaagaacaacaacaacgaggagcccagcgacaagcacaucgagcaguaccugaagaagauccaguacagccugagcaccgaguggagccccugcagcgugaccugcggcaacggcauccaggugagaaucaagcccggcagcgccgacaagcccaaggaccagcuggacuacgagaacgacaucgagaagaagaucugcaagauggagaagugcagcagcguguucaacguggugaacagcagcaucggccugaucauggugcugagcuuccuguuccugaacuga

SEQ ID NO: 4524 - RNA, 1311 nt, Artificial Sequence
  derived and/or modified CDS sequence (opt4) from Pf(India)__AAN87576.1__CSP
augaugagaaagcuggccauccugagcgugagcagcuuccuguucguggaggcccuguuccaggaguaccagugcuacggcagcagcagcaacaccagagugcugaacgagcugaacuacgacaacgccggcaccaaccuguacaacgagcuggagaugaacuacuacggcaagcaggagaacugguacagccugaagaagaacagcagaagccugggcgagaacgacgacggcaacaacaacaacggcgacaacggcagagagggcaaggacgaggacaagagagacggcaacaacgaggacaacgagaagcugagaaagcccaagcacaagaagcugaagcagcccggcgacggcaaccccgaccccaacgccaaccccaacguggaccccaacgccaaccccaacguggaccccaacgccaaccccaacgccaaccccaacgccaaccccaacgccaaccccaacgccaaccccaacgccaaccccaacgccaaccccaacgccaaccccaacgccaaccccaacgccaaccccaacgccaaccccaacgccaaccccaacgccaaccccaacgccaaccccaacgccaaccccaacgccaaccccaacgccaaccccaacgccaaccccaacgccaaccccaacgccaaccccaacgccaaccccaacgccaaccccaacgccaaccccaacgccaaccccaacgccaaccccaacgccaaccccaacgccaaccccaacgccaaccccaacgccaaccccaacgccaaccccaacgccaaccccaacgccaaccccaacgccaaccccaacgccaaccccaacgccaaccccaacgccaaccccaacgccaaccccaacgccaaccccaacgccaaccccaacgccaaccccaacgccaaccccaacgccaaccccaacgccaaccccaacaagaacaaccagggcaacggccagggccacaacaugcccaacgaccccaacagaaacguggacgagaacgccaacgccaacaacgacgugaagaacaacaacaacgaggagcccagcgacaagcacaucgaggaguaccugaagaagauccagaacagccugagcaccgaguggagccccugcagcgugaccugcggcaacggcauccaggugagaaucaagcccggcagcgccaacaagcccaaggacgagcugaacuacgagaacgacaucgagaagaagaucugcaagauggagaagugcagcagcguguucaacguggugaacagcagcaucggccugaucauggugcugagcuuccuguuccugaacuga

SEQ ID NO: 4525 - RNA, 1311 nt, Artificial Sequence
  derived and/or modified CDS sequence (opt4) from Pf(India)__AAN87620.1__CSP
augaugagaaagcuggccauccugagcgugagcagcuuccuguucguggaggcccuguuccaggaguaccagugcuacggcagcagcagcaacaccagagugcugaacgagcugaacuacgacaacgccggcaccaaccuguacaacgagcuggagaugaacuacuacggcaagcaggagaacugguacagccugaagaagaacagcagaagccugggcgagaacgacgacggcaacaacaacaacggcgacaacggcagagagggcaaggacgaggacaagagagacggcaacaacgaggacaacgagaagcugagaaagcccaagcacaagaagcugaagcagcccggcggcgacaaccccgaccccaacgccaaccccaacguggaccccaacgccaaccccaacgccaaccccaacgccaaccccaacgccaaccccaacgugaaccccaacgccaaccccaacgccaaccccaacgccaaccccaacgccaaccccaacgccaaccccaacgccaaccccaacgccaaccccaacgccaaccccaacguggaccccaacgccaaccccaacgccaaccccaacgccaaccccaacgccaaccccaacgccaaccccaacgccaaccccaacgccaaccccaacgccaaccccaacgccaaccccaacgccaaccccaacgccaaccccaacgccaaccccaacgccaaccccaacgccaaccccaacgccaaccccaacgccaaccccaacgccaaccccaacgccaaccccaacgccaaccccaacgccaaccccaacgccaaccccaacgccaaccccaacgccaaccccaacgccaaccccaacgccaaccccaacgccaaccccaacgccaaccccaacgccaaccccaacgccaaccccaacgccaaccccaacgccaaccccaacaagaacaaccagggcaacggccagggccacaacaugcccaacgaccccaacagaaacguggacgagaacgccaacgccaacaacgccgugaagaacaacaacaacgaggagcccagcgacaagcacaucgagcaguaccugaagaagauccagaacagccugagcaccgaguggagccccugcagcgugaccugcggcaacggcauccaggugagaaucaagcccggcagcgccaacaagcccaaggacgagcuggacuacgagaacgacaucgagaagaagaucugcaagauggagaagugcagcagcguguucaacguggugaacagcagcaucggccugaucauggugcugagcuuccuguuccugaacuga

SEQ ID NO: 4526 - RNA, 1311 nt, Artificial Sequence
  derived and/or modified CDS sequence (opt4) from Pf(PFS19)__BAN59401.1__CSP
augaugagaaagcuggccauccugagcgugagcagcuuccuguucguggaggcccuguuccaggaguaccagugcuacggcagcagcagcaacaccagagugcugaacgagcugaacuacgacaacgccggcaccaaccuguacaacgagcuggagaugaacuacuacggcaagcaggagaacugguacagccugaagaagaacagcagaagccugggcgagaacgacgacggcaacaacaacaacggcgacaacggcagagagggcaaggacgaggacaagagagacggcaacaacgaggacaacgagaagcugagaaagcccaagcacaagaagcugaagcagcccggcgacggcaaccccgaccccaacgccaaccccaacguggaccccaacgccaaccccaacguggaccccaacgccaaccccaacguggaccccaacgccaaccccaacgccaaccccaacgccaaccccaacgccaaccccaacgccaaccccaacgccaaccccaacgccaaccccaacgccaaccccaacgccaaccccaacgccaaccccaacgccaaccccaacgccaaccccaacgccaaccccaacgccaaccccaacgccaaccccaacgccaaccccaacgccaaccccaacgccaaccccaacgccaaccccaacgccaaccccaacgccaaccccaacgccaaccccaacgccaaccccaacgccaaccccaacgccaaccccaacgccaaccccaacgccaaccccaacgccaaccccaacgccaaccccaacgccaaccccaacgccaaccccaacgccaaccccaacgccaaccccaacgccaaccccaacgccaaccccaacgccaaccccaacgccaaccccaacgccaaccccaacgccaaccccaacgccaaccccaacgccaaccccaacaagaacaaccagggcaacggccagggccacaacaugcccaacgaccccaacagaaacguggacgagaacgccaacgccaacaacgccgugaagaacaacaacaacgaggagcccagcgacaagcacaucgagcaguaccugaagaagauccagaacagccugagcaccgaguggagccccugcagcgugaccugcggcaacggcauccaggugagaaucaagcccggcagcgccaacaagcccaaggacgagcuggacuacgagaacgacaucgagaagaagaucugcaagauggagaagugcagcagcguguucaacguggugaacagcagcaucggccugaucauggugcugagcuuccuguuccugaacuga

SEQ ID NO: 4527 - RNA, 1311 nt, Artificial Sequence
  derived and/or modified CDS sequence (opt4) from Pf(Sol95-121)__BAM85068.1__CSP
augaugagaaagcuggccauccugagcgugagcagcuuccuguucguggaggcccuguuccaggaguaccagugcuacggcagcagcagcaacaccagagugcugaacgagcugaacuacgacaacgccggcaccaaccuguacaacgagcuggagaugaacuacuacggcaagcaggagaacugguacagccugaagaagaacagcagaagccugggcgagaacgacgacggcaacaacaacaacggcgacaacggcagagagggcaaggacgaggacaagagagacggcaacaacgaggacaacgagaagcugagaaagcccaagcacaagaagcugaagcagcccguggacggcaaccccgaccccaacgccaaccccaacguggaccccaacgccaaccccaacguggaccccaacgccaaccccaacguggaccccaacgccaaccccaacgccaaccccaacgccaaccccaacgccaaccccaacgccaaccccaacgccaaccccaacgccaaccccaacgccaaccccaacgccaaccccaacgccaaccccaacgccaaccccaacgccaaccccaacgccaaccccaacgccaaccccaacgccaaccccaacgccaaccccaacgccaaccccaacgccaaccccaacgccaaccccaacgccaaccccaacgccaaccccaacgccaaccccaacgccaaccccaacgccaaccccaacgccaaccccaacgccaaccccaacgccaaccccaacgccaaccccaacgccaaccccaacgccaaccccaacgccaaccccaacgccaaccccaacgccaaccccaacgccaaccccaacgccaaccccaacgccaaccccaacgccaaccccaacgccaaccccaacgccaaccccaacgccaagcccaacgccaaccccaacaagaacaaccagggcaacggccagggccacaacaugcccaacgaccccaacagaaacguggacgagaacgccaacgccaacaacgccgugaagaacaacaacaacgaggagcccagcgacaagcacaucgagcaguaccugaagaagauccagaacagccugagcaccgaguggagccccugcagcgugaccugcggcaacggcauccaggugagaaucaagcccggcagcgccgacaagcccaaggaccagcuggacuacgagaacgacaucgagaagaagaucugcaagauggagaagugcagcagcguguucaacguggugaacagcagcaucggccugaucauggugcugagcuuccuguuccugaacuga

SEQ ID NO: 4528 - RNA, 1311 nt, Artificial Sequence
  derived and/or modified CDS sequence (opt4) from Pf(T837)__BAM84914.1__CSP
augaugagaaagcuggccauccugagcgugagcagcuuccuguucguggaggcccuguuccaggaguaccagugcuacggcagcagcagcaacaccagagugcugaacgagcugaacuacgacaacgccggcaccaaccuguacaacgagcuggagaugaacuacuacggcaagcaggagaacugguacagccugaagaagaacagcagaagccugggcgagaacgacgacggcaacaacaacaacggcgacaacggcagagagggcaaggacgaggacaagagagacggcaacaacgaggacaacgagaagcugagaaagcccaagcacaagaagcugaagcagcccggcgacggcaaccccgaccccaacgccaaccccaacguggaccccaacgccaaccccaacguggaccccaacgccaaccccaacgccaaccccaacgccaaccccaacgccaaccccaacgccaaccccaacgccaaccccaacgccaaccccaacgccaaccccaacgccaaccccaacgccaaccccaacgccaaccccaacgccaaccccaacgccaaccccaacgccaaccccaacgccaaccccaacguggaccccaacgccaaccccaacgccaaccccaacgccaaccccaacgccaaccccaacgccaaccccaacgccaaccccaacgccaaccccaacgccaaccccaacgccaaccccaacgccaaccccaacgccaaccccaacgccaaccccaacgccaaccccaacgccaaccccaacgccaaccccaacgccaaccccaacgccaaccccaacgccaaccccaacgccaaccccaacgccaaccccaacgccaaccccaacgccaaccccaacgccaaccccaacgccaaccccaacgccaaccccaacgccaaccccaacgccaaccccaacaagaacaaccagggcaacggccagggccacaacaugcccaacgaccccaacagaaacguggacgagaacgccaacgccaacaacgccgugaagaacaacaacaacgaggagcccagcgacaagcacaucaccgaguaccugaagaagauccagaacagccugagcaccgaguggagccccugcagcgugaccugcggcaacggcauccaggugagaaucaagcccggcagcgccggcaagagcaaggacgagcuggacuacgagaacgacaucgagaagaagaucugcaagauggagaagugcagcagcguguucaacguggugaacagcagcaucggccugaucauggugcugagcuuccuguuccugaacuga

SEQ ID NO: 4529 - RNA, 1311 nt, Artificial Sequence
  derived and/or modified CDS sequence (opt4) from Pf(TiMS95-071)__BAM84865.1__CSP
augaugagaaagcuggccauccugagcgugagcagcuuccuguucguggaggcccuguuccaggaguaccagugcuacggcagcagcagcaacaccagagugcugaacgagcugaacuacgacaacgccggcaccaaccuguacaacgagcuggagaugaacuacuacggcaagcaggagaacugguacagccugaagaagaacagcagaagccugggcgagaacgacgacggcaacaacaacaacggcgacaacggcagagagggcaaggacgaggacaagagagacggcaacaacgaggacaacgagaagcugagaaagcccaagcacaagaagcugaagcagcccggcgacggcaaccccgaccccaacgccaaccccaacguggaccccaacgccaaccccaacguggaccccaacgccaaccccaacguggaccccaacgccaaccccaacgccaaccccaacgccaaccccaacgccaaccccaacgccaaccccaacgccaaccccaacgccaaccccaacgccaaccccaacgccaaccccaacgccaaccccaacgccaaccccaacgccaaccccaacgccaaccccaacgccaaccccaacgccaaccccaacgccaaccccaacgccaaccccaacgccaaccccaacgccaaccccaacgccaaccccaacgccaaccccaacgccaaccccaacgccaaccccaacgccaaccccaacgccaaccccaacgccaaccccaacgccaaccccaacgccaaccccaacgccaaccccaacgccaaccccaacgccaaccccaacgccaaccccaacgccaaccccaacgccaaccccaacgccaaccccaacgccaaccccaacgccaaccccaacgccaaccccaacgccaaccccaacgccaaccccaacgccaaccccaacaagaacaaccagggcaacggccagggccacaacaugcccaacgaccccaacagaaacguggacgagaacgccaacgccaacaacgacgugaagaacaacaacaacgaggagcccagcgacaagcacaucgagcaguaccugaagaagauccaguacagccugagcaccgaguggagccccugcagcgugaccugcggcaacggcauccaggugagaaucaagcccggcagcgccgacaagcccaaggaccagcuggacuacgagaacgacaucgagaagaagaucugcaagauggagaagugcagcagcguguucaacguggugaacagcagcaucggccugaucauggugcugagcuuccuguuccugaacuga

SEQ ID NO: 4530 - RNA, 1308 nt, Artificial Sequence
  derived and/or modified CDS sequence (opt4) from Pf(TM69)__ACO49446.1__CSP
augagaaagcuggccauccugagcgugagcagcuuccuguucguggaggcccuguuccaggaguaccagugcuacggcagcagcagcaacaccagagugcugaacgagcugaacuacgacaacgccggcaccaaccuguacaacgagcuggagaugaacuacuacggcaagcaggagaacugguacagccugaagaagaacagcagaagccugggcgagaacgacgacggcaacaacaacaacggcgacaacggcagagagggcaaggacgaggacaagagagacggcaacaacgaggacaacgagaagcugagaaagcccaagcacaagaagcugaagcagcccggcgacggcaaccccgaccccaacgccaaccccaacguggaccccaacgccaaccccaacguggaccccaacgccaaccccaacguggaccccaacgccaaccccaacgccaaccccaacgccaaccccaacgccaaccccaacgccaaccccaacgccaaccccaacgccaaccccaacgccaaccccaacgccaaccccaacgccaaccccaacgccaaccccaacgccaaccccaacgccaaccccaacgccaaccccaacgccaaccccaacgccaaccccaacgccaaccccaacgccaaccccaacgccaaccccaacgccaaccccaacgccaaccccaacgccaaccccaacgccaaccccaacgccaaccccaacgccaaccccaacgccaaccccaacgccaaccccaacgccaaccccaacgccaaccccaacgccaaccccaacgccaaccccaacgccaaccccaacgccaaccccaacgccaaccccaacgccaaccccaacgccaaccccaacgccaaccccaacgccaaccccaacgccaaccccaacgccaaccccaacgccaaccccaacaagaacaaccagggcaacggccagggccacaacaugcccaacgaccccaacagaaacguggacgagaacgccaacgccaacaacgacgugaagaacaacaacaacgaggagcccagcgacaagcacaucgagcaguaccugaagaagauccaguacagccugagcaccgaguggagccccugcagcgugaccugcggcaacggcauccaggugagaaucaagcccggcagcgccgacaagcccaaggaccagcuggacuacgagaacgacaucgagaagaagaucugcaagauggagaagugcagcagcguguucaacguggugaacagcagcaucggccugaucauggugcugagcuuccuguuccugaacuga

SEQ ID NO: 4531 - RNA, 1308 nt, Artificial Sequence
  derived and/or modified CDS sequence (opt4) from Pf(TMS177)__ACO49503.1__CSP
augagaaagcuggccauccugagcgugagcagcuuccuguucguggaggcccuguuccaggaguaccagugcuacggcagcagcagcaacaccagagugcugaacgagcugaacuacgacaacgccggcaccaaccuguacaacgagcuggagaugaacuacuacggcaagcaggagaacugguacagccugaagaagaacagcagaagccugggcgagaacgacgacggcaacaacaacaacggcgacaacggcagagagggcaaggacgaggacaagagagacggcaacaacgaggacaacgagaagcugagaaagcccaagcacaagaagcugaagcagcccggcgacggcaaccccgaccccaacgccaaccccaacguggaccccaacgccaaccccaacguggaccccaacgccaaccccaacguggaccccaacgccaaccccaacgccaaccccaacgccaaccccaacgccaaccccaacgccaaccccaacgccaaccccaacgccaaccccaacgccaaccccaacgccaaccccaacgccaaccccaacgccaaccccaacgccaaccccaacgccaaccccaacgccaaccccaacgccaaccccaacgccaaccccaacgccaaccccaacgccaaccccaacgccaaccccaacgccaaccccaacgccaaccccaacgccaaccccaacgccaaccccaacgccaaccccaacgccaaccccaacgccaaccccaacgccaaccccaacgccaaccccaacgccaaccccaacgccaaccccaacgccaaccccaacgccaaccccaacgccaaccccaacgccaaccccaacgccaaccccaacgccaaccccaacgccaaccccaacgccaaccccaacgccaaccccaacgccaaccccaacgccaaccccaacaagaacaaccagggcaacggccagggccacaacaugcccaacgaccccaacagaaacguggacgagaacgccaacgccaacaacgccgugaagaacaacaacaacgaggagcccagcgacaagcacaucgagcaguaccugaagaagauccagaacagccugagcaccgaguggagccccugcagcgugaccugcggcaacggcauccaggugagaaucaagcccggcagcgccaacaagcccaaggacgagcuggacuacgagaacgacaucgagaagaagaucugcaagauggagaagugcagcagcguguucaacguggugaacagcagcaucggccugaucauggugcugagcuuccuguuccugaacuga

SEQ ID NO: 4532 - RNA, 1308 nt, Artificial Sequence
  derived and/or modified CDS sequence (opt4) from Pf(TMS178)__ACO49504.1__CSP
augagaaagcuggccauccugagcgugagcagcuuccuguucguggaggcccuguuccaggaguaccagugcuacggcagcagcagcaacaccagagugcugaacgagcugaacuacgacaacgccggcaccaaccuguacaacgagcuggagaugaacuacuacggcaagcaggagaacugguacagccugaagaagaacagcagaagccugggcgagaacgacgacggcaacaacaacaacggcgacaacggcagagagggcaaggacgaggacaagagagacggcaacaacgaggacaacgagaagcugagaaagcccaagcacaagaagcugaagcagcccggcgacggcaaccccgaccccaacgccaaccccaacguggaccccaacgccaaccccaacguggaccccaacgccaaccccaacgccaaccccaacgccaaccccaacgccaaccccaacgccaaccccaacgccaaccccaacgccaaccccaacgccaaccccaacgccaaccccaacgccaaccccaacgccaaccccaacgccaaccccaacgccaaccccaacgccaaccccaacgccaaccccaacguggaccccaacgccaaccccaacgccaaccccaacgccaaccccaacgccaaccccaacgccaaccccaacgccaaccccaacgccaaccccaacgccaaccccaacgccaaccccaacgccaaccccaacgccaaccccaacgccaaccccaacgccaaccccaacgccaaccccaacgccaaccccaacgccaaccccaacgccaaccccaacgccaaccccaacgccaaccccaacgccaaccccaacgccaaccccaacgccaaccccaacgccaaccccaacgccaaccccaacgccaaccccaacgccaaccccaacgccaaccccaacaagaacaaccagggcaacggccagggccacaacaugcccaacgaccccaacagaaacguggacgagaacgccaacgccaacaacgccgugaagaacaacaacaacgaggagcccagcgacaagcacaucaccgaguaccugaagaagauccagaacagccugagcaccgaguggagccccugcagcgugaccugcggcaacggcauccaggugagaaucaagcccggcagcgccggcaagagcaaggacgagcuggacuacgagaacgacaucgagaagaagaucugcaagauggagaagugcagcagcguguucaacguggugaacagcagcaucggccugaucauggugcugagcuuccuguuccugaacuga

SEQ ID NO: 4533 - RNA, 1305 nt, Artificial Sequence
  derived and/or modified CDS sequence (opt4) from Pf(YL864)__ADF48458.1__CSP
augagaaagcuggccauccugagcgugagcagcuuccuguucguggaggcccuguuccaggaguaccagugcuacggcagcagcagcaacaccagagugcugaacgagcugaacuacgacaacgccggcaccaaccuguacaacgagcuggagaugaacuacuacggcaagcaggagaacugguacagccugaagaagaacagcagaagccugggcgagaacgacgacggcaacaacaacaacggcgacaacggcagagagggcaaggacgaggacaagagagacggcaacaacgaggacaacgagaagcugagaaagcccaagcacaagaagcugaagcagcccggcgacggcaaccccgaccccaacgccaaccccaacguggaccccaacgccaaccccaacguggaccccaacgccaaccccaacguggaccccaacgccaaccccaacgccaaccccaacgccaaccccaacgccaaccccaacgccaaccccaacgccaaccccaacgccaaccccaacgccaaccccaacgccaaccccaacgccaaccccaacgccaaccccaacgccaaccccaacgccaaccccaacgccaaccccaacgccaaccccaacguggaccccaacgccaaccccaacgccaaccccaacgccaaccccaacgccaaccccaacgccaaccccaacgccaaccccaacgccaaccccaacgccaaccccaacgccaaccccaacgccaaccccaacgccaaccccaacgccaaccccaacgccaaccccaacgccaaccccaacgccaaccccaacgccaaccccaacgccaaccccaacgccaaccccaacgccaaccccaacgccaaccccaacgccaaccccaacgccaaccccaacgccaaccccaacgccaaccccaacgccaaccccaacaagaacaaccagggcaacggccagggccacaacaugcccaacgaccccaacagaaacguggacgagaacgccaacgccaacaacgacgagaacaacaacaacgaggagcccagcgacaagcacaucgagcaguaccugaagaagauccaguacagccugagcaccgaguggagccccugcagcgugaccugcggcaacggcauccaggugagaaucaagcccggcagcgccgacaagcccaaggaccagcuggacuacgagaacgacaucgagaagaagaucugcaagauggagaagugcagcagcguguucaacguggugaacagcagcaucggccugaucauggugcugagcuuccuguuccugaacuga

SEQ ID NO: 4534 - RNA, 1299 nt, Artificial Sequence
  derived and/or modified CDS sequence (opt4) from Pf(838)__AAA29543.1__CSP
augaugagaaagcuggccauccugagcgugagcagcuuccuguucguggaggcccuguuccaggaguaccagugcuacggcagcagcagcaacaccagagugcugaacgagcugaacuacgacaacgccggcaucaaccuguacaacgagcuggagaugaacuacuacggcaagcaggagaacugguacagccugaagaagaacagcagaagccugggcgagaacgacgacggcaacaacaacaacggcgacaacggcagagagggcaaggacgaggacaagagagacggcaacaacgaggacaacgagaagcugagaaagcccaagcacaagaagcugaagcagcccggcgacggcaaccccgaccccaacgccaaccccaacguggaccccaacgccaaccccaacguggaccccaacgccaaccccaacguggaccccaacgccaaccccaacgccaaccccaacgccaaccccaacgccaaccccaacgccaaccccaacgccaaccccaacgccaaccccaacgccaaccccaacgccaaccccaacgccaaccccaacgccaaccccaacgccaaccccaacgccaaccccaacgccaaccccaacgccaaccccaacgccaaccccaacgccaaccccaacgccaaccccaacgccaaccccaacgccaaccccaacgccaaccccaacgccaaccccaacgccaaccccaacgccaaccccaacgccaaccccaacgccaaccccaacgccaaccccaacgccaaccccaacgccaaccccaacgccaaccccaacgccaaccccaacgccaaccccaacgccaaccccaacgccaaccccaacgccaaccccaacgccaaccccaacgccaaccccaacgccaaccccaacgccaaccccaacgccaaccccaacaagaacaaccagggcaacggccagggccacaacaugcccaacgaccccaacagaaacguggacgagaacgccaacgccaacaacgccgugaagaacaacaacaacgaggagcccagcgacaagcacaucgagcaguaccugaagaagauccagaacagccugagcaccgaguggagccccugcagcgugaccugcggcaacggcauccaggugagaaucaagcccggcagcgccaacaagcccaaggacgagcuggacuacgagaacgacaucgagaagaagaucugcaagauggagaagugcagcagcguguucaacguggugaacagcagcaucggccugaucauggugcugagcuuccuguuccugaacuga

SEQ ID NO: 4535 - RNA, 1299 nt, Artificial Sequence
  derived and/or modified CDS sequence (opt4) from Pf(834a)__AAA29571.1__CSP
augaugagaaagcuggccauccugagcgugagcagcuuccuguucguggaggcccuguuccaggaguaccagugcuacggcagcagcagcaacaccagagugcugaacgagcugaacuacgacaacgccggcaucaaccuguacaacgagcuggagaugaacuacuacggcaagcaggagaacugguacagccugaagaagaacagcagaagccugggcgagaacgacgacggcaacaacaacaacggcgacaacggcagagagggcaaggacgaggacaagagagacggcaacaacgaggacaacgagaagcugagaaagcccaagcacaagaagcugaagcagcccggcgacggcaaccccgaccccaacgccaaccccaacguggaccccaacgccaaccccaacguggaccccaacgccaaccccaacguggaccccaacgccaaccccaacguggaccccaacgccaaccccaacgccaaccccaacgccaaccccaacgccaaccccaacgccaaccccaacgccaaccccaacgccaaccccaacgccaaccccaacgccaaccccaacgccaaccccaacgccaaccccaacgccaaccccaacgccaaccccaacgccaaccccaacgccaaccccaacgccaaccccaacgccaaccccaacgccaaccccaacgccaaccccaacgccaaccccaacgccaaccccaacgccaaccccaacgccaaccccaacgccaaccccaacgccaaccccaacgccaaccccaacgccaaccccaacgccaaccccaacgccaaccccaacgccaaccccaacgccaaccccaacgccaaccccaacgccaaccccaacgccaaccccaacgccaaccccaacgccaaccccaacgccaaccccaacgccaaccccaacaagaacaaccagggcaacggccagggccacaacaugcccaacgaccccaacagaaacguggacgagaacgccaacgccaacaacgccgugaagaacaacaacaacgaggagcccagcgacaagcacaucgagcaguaccugaagaagauccagaacagccugagcaccgaguggagccccugcagcgugaccugcggcaacggcauccaggugagaaucaagcccggcagcgccaacaagcccaaggacgagcuggacuacgagaacgacaucgagaagaagaucugcaagauggagaagugcagcagcguguucaacguggugaacagcagcaucggccugaucauggugcugagcuuccuguuccugaacuga

SEQ ID NO: 4536 - RNA, 1299 nt, Artificial Sequence
  derived and/or modified CDS sequence (opt4) from Pf(India)__AAN87622.1__CSP
augaugagaaagcuggccauccugagcgugagcagcuuccuguucguggaggcccuguuccaggaguaccagugcuacggcagcagcagcaacaccagagugcugaacgagcugaacuacgacaacgccggcaccaaccuguacaacgagcuggagaugaacuacuacggcaagcaggagaacugguacagccugaagaagaacagcagaagccugggcgagaacgacgacggcaacaacaacaacggcgacaacggcagagagggcaaggacgaggacaagagagacggcaacaacgaggacaacgagaagcugagaaagcccaagcacaagaagcugaagcagcccgccgacggcaaccccgaccccaacgccaaccccaacguggaccccaacgccaaccccaacgccaaccccaacgccaaccccaacgccaaccccaacgccaaccccaacgccaaccccaacgccaaccccaacgccaaccccaacgccaaccccaacgccaaccccaacgccaaccccaacgccaaccccaacguggaccccaacgccaaccccaacgccaaccccaacgccaaccccaacgccaaccccaacgccaaccccaacgccaaccccaacgccaaccccaacgccaaccccaacgccaaccccaacgccaaccccaacgccaaccccaacgccaaccccaacgccaaccccaacgccaaccccaacgccaaccccaacgccaaccccaacgccaaccccaacgccaaccccaacgccaaccccaacgccaaccccaacgccaaccccaacgccaaccccaacgccaaccccaacgccaaccccaacgccaaccccaacgccaaccccaacgccaaccccaacgccaaccccaacgccaaccccaacgccaaccccaacgccaaccccaacaagaacaaccagggcaacggccagggccacaacaugcccaacgaccccaacagaaacguggacgagaacgccaacgccaacaacgccgugaagaacaacaacaacgaggagcccagcgacaagcacaucgagcaguaccugaagaagauccagaacagccugagcaccgaguggagccccugcagcgugaccugcggcaacggcauccaggugagaaucaagcccggcagcgccaacaagcccaaggacgagcuggacuacgagaacgacaucgagaagaagaucugcaagauggagaagugcagcagcguguucaacguggugaacagcagcaucggccugaucauggugcugagcuuccuguuccugaacuga

SEQ ID NO: 4537 - RNA, 1299 nt, Artificial Sequence
  derived and/or modified CDS sequence (opt4) from Pf(PFS31)__BAN59407.1__CSP
augaugagaaagcuggccauccugagcgugagcagcuuccuguucguggaggcccuguuccaggaguaccagugcuacggcagcagcagcaacaccagagugcugaacgagcugaacuacgacaacgccggcaccaaccuguacaacgagcuggagaugaacuacuacggcaagcaggagaacugguacagccugaagaagaacagcagaagccugggcgagaacgacgacggcaacaacaacaacggcgacaacggcagagagggcaaggacgaggacaagagagacggcaacaacgaggacaacgagaagcugagaaagcccaagcacaagaagcugaagcagcccggcgacggcaaccccgaccccaacgccaaccccaacguggaccccaacgccaaccccaacguggaccccaacgccaaccccaacguggaccccaacgccaaccccaacgccaaccccaacgccaaccccaacgccaaccccaacgccaaccccaacgccaaccccaacgccaaccccaacgccaaccccaacgccaaccccaacgccaaccccaacgccaaccccaacgccaaccccaacgccaaccccaacgccaaccccaacgccaaccccaacgccaaccccaacgccaaccccaacgccaaccccaacgccaaccccaacgccaaccccaacgccaaccccaacgccaaccccaacgccaaccccaacgccaaccccaacgccaaccccaacgccaaccccaacgccaaccccaacgccaaccccaacgccaaccccaacgccaaccccaacgccaaccccaacgccaaccccaacgccaaccccaacgccaaccccaacgccaaccccaacgccaaccccaacgccaaccccaacgccaaccccaacgccaaccccaacgccaaccccaacaagaacaaccagggcaacggccagggccacaacaugcccaacgaccccaacagaaacguggacgagaacgccaacgccaacaacgacgugaagaacaacaacaacgaggagcccagcgacaagcacaucgaggaguaccugaagaagauccagaacagccugagcaccgaguggagccccugcagcgugaccugcggcaacggcauccaggugagaaucaagcccggcagcgccaacaagcccaaggacgagcugaacuacgagaacgacaucgagaagaagaucugcaagauggagaagugcagcagcguguucaacguggugaacagcagcaucggccugaucauggugcugagcuuccuguuccugaacuga

SEQ ID NO: 4538 - RNA, 1299 nt, Artificial Sequence
  derived and/or modified CDS sequence (opt4) from Pf(PNG912-070)__BAM85010.1__CSP
augaugagaaagcuggccauccugagcgugagcagcuuccuguucguggaggcccuguuccaggaguaccagugcuacggcagcagcagcaacaccagagugcugaacgagcugaacuacgacaacgccggcaccaaccuguacaacgagcuggagaugaacuacuacggcaagcaggagaacugguacagccugaagaagaacagcagaagccugggcgagaacgacgacggcaacaacaacaacggcgacaacggcagagagggcaaggacgaggacaagagagacggcaacaacgaggacaacgagaagcugagaaagcccaagcacaagaagcugaagcagcccguggacggcaaccccgaccccaacgccaaccccaacguggaccccaacgccaaccccaacguggaccccaacgccaaccccaacguggaccccaacgccaaccccaacgccaaccccaacgccaaccccaacgccaaccccaacgccaaccccaacgccaaccccaacgccaaccccaacgccaaccccaacgccaaccccaacgccaaccccaacgccaaccccaacgccaaccccaacgccaaccccaacgccaaccccaacgccaaccccaacgccaaccccaacgccaaccccaacgccaaccccaacgccaaccccaacgccaaccccaacgccaaccccaacgccaaccccaacgccaaccccaacgccaaccccaacgccaaccccaacgccaaccccaacgccaaccccaacgccaaccccaacgccaaccccaacgccaaccccaacgccaaccccaacgccaaccccaacgccaaccccaacgccaaccccaacgccaaccccaacgccaaccccaacgccaaccccaacgccaaccccaacgccaaccccaacgccaaccccaacaagaacaaccagggcaacggccagggccacaacaugcccaacgaccccaacagaaacguggacgagaacgccaacgccaacaacgccgugaagaacaacaacaacgaggagcccagcgacaagcacaucgagcaguaccugaagaagauccagaacagccugagcaccgaguggagccccugcagcgugaccugcggcaacggcauccaggugagaaucaagcccggcagcgccgacaagcccaaggaccagcuggacuacgagaacgacaucgagaagaagaucugcaagauggagaagugcagcagcguguucaacguggugaacagcagcaucggccugaucauggugcugagcuuccuguuccugaacuga

SEQ ID NO: 4539 - RNA, 1299 nt, Artificial Sequence
  derived and/or modified CDS sequence (opt4) from Pf(PVS20)__BAN59429.1__CSP
augaugagaaagcuggccauccugagcgugagcagcuuccuguucguggaggcccuguuccaggaguaccagugcuacggcagcagcagcaacaccagagugcugaacgagcugaacuacgacaacgccggcaccaaccuguacaacgagcuggagaugaacuacuacggcaagcaggagaacugguacagccugaagaagaacagcagaagccugggcgagaacgacgacggcaacaacaacaacggcgacaacggcagagagggcaaggacgaggacaagagagacggcaacaacgaggacaacgagaagcugagaaagcccaagcacaagaagcugaagcagcccggcgacggcaaccccgaccccaacgccaaccccaacguggaccccaacgccaaccccaacguggaccccaacgccaaccccaacguggaccccaacgccaaccccaacgccaaccccaacgccaaccccaacgccaaccccaacgccaaccccaacgccaaccccaacgccaaccccaacgccaaccccaacgccaaccccaacgccaaccccaacgccaaccccaacgccaaccccaacgccaaccccaacgccaaccccaacgccaaccccaacgccaaccccaacgccaaccccaacgccaaccccaacgccaaccccaacgccaaccccaacgccaaccccaacgccaaccccaacgccaaccccaacgccaaccccaacgccaaccccaacgccaaccccaacgccaaccccaacgccaaccccaacgccaaccccaacgccaaccccaacgccaaccccaacgccaaccccaacgccaaccccaacgccaaccccaacgccaaccccaacgccaaccccaacgccaaccccaacgccaaccccaacgccaaccccaacgccaaccccaacaagaacaaccagggcaacggccagggccacaacaugcccaacgaccccaacagaaacguggacgagaacgccaacgccaacaacgccgugaagaacaacaacaacgaggagcccagcgacaagcacaucgagcaguaccugaagaagauccagaacagccugagcaccgaguggagccccugcagcgugaccugcggcaacggcauccaggugagaaucaagcccggcagcgccaacaagcccaaggacgagcuggacuacgagaacgacaucgagaagaagaucugcaagauggagaagugcagcagcguguucaacguggugaacagcagcaucggccugaucauggugcugagcuuccuguuccugaacuga

SEQ ID NO: 4540 - RNA, 1299 nt, Artificial Sequence
  derived and/or modified CDS sequence (opt4) from Pf(Sol95-241)__BAM85085.1__CSP
augaugagaaagcuggccauccugagcgugagcagcuuccuguucguggaggcccuguuccaggaguaccagugcuacggcagcagcagcaacaccagagugcugaacgagcugaacuacgacaacgccggcaccaaccuguacaacgagcuggagaugaacuacuacggcaagcaggagaacugguacagccugaagaagaacagcagaagccugggcgagaacgacgacggcaacaacaacaacggcgacaacggcagagagggcaaggacgaggacaagagagacggcaacaacgaggacaacgagaagcugagaaagcccaagcacaagaagcugaagcagcccggcgacggcaaccccgaccccaacgccaaccccaacguggaccccaacgccaaccccaacguggaccccaacgccaaccccaacguggaccccaacgccaaccccaacguggaccccaacgccaaccccaacgccaaccccaacgccaaccccaacgccaaccccaacgccaaccccaacgccaaccccaacgccaaccccaacgccaaccccaacgccaaccccaacgccaaccccaacgccaaccccaacgccaaccccaacgccaaccccaacgccaaccccaacgccaaccccaacgccaaccccaacgccaaccccaacgccaaccccaacgccaaccccaacgccaaccccaacgccaaccccaacgccaaccccaacgccaaccccaacgccaaccccaacgccaaccccaacgccaaccccaacgccaaccccaacgccaaccccaacgccaaccccaacgccaaccccaacgccaaccccaacgccaaccccaacgccaaccccaacgccaaccccaacgccaaccccaacgccaaccccaacgccaaccccaacgccaaccccaacaagaacaaccagggcaacggccagggccacaacaugcccaacgaccccaacagaaacguggacgagaacgccaacgccaacaacgccgugaagaacaacaacaacgaggagcccagcgacaagcacaucgagcaguaccugaagaagauccagaacagccugagcaccgaguggagccccugcagcgugaccugcggcaacggcauccaggugagaaucaagcccggcagcgccaacaagcccaaggacgagcuggacuacgagaacgacaucgagaagaagaucugcaagauggagaagugcagcagcguguucaacguggugaacagcagcaucggccugaucauggugcugagcuuccuguuccugaacuga

SEQ ID NO: 4541 - RNA, 1299 nt, Artificial Sequence
  derived and/or modified CDS sequence (opt4) from Pf(TiMS95-198)__BAM84895.1__CSP
augaugagaaagcuggccauccugagcgugagcagcuuccuguucguggaggcccuguuccaggaguaccagugcuacggcagcagcagcaacaccagagugcugaacgagcugaacuacgacaacgccggcaccaaccuguacaacgagcuggagaugaacuacuacggcaagcaggagaacugguacagccugaagaagaacagcagaagccugggcgagaacgacgacggcaacaacaacaacggcgacaacggcagagagggcaaggacgaggacaagagagacggcaacaacgaggacaacgagaagcugagaaagcccaagcacaagaagcugaagcagcccggcgacggcaaccccgaccccaacgccaaccccaacguggaccccaacgccaaccccaacguggaccccaacgccaaccccaacguggaccccaacgccaaccccaacgccaaccccaacgccaaccccaacgccaaccccaacgccaaccccaacgccaaccccaacgccaaccccaacgccaaccccaacgccaaccccaacgccaaccccaacgccaaccccaacgccaaccccaacgccaaccccaacgccaaccccaacgccaaccccaacgccaaccccaacgccaaccccaacgccaaccccaacgccaaccccaacgccaaccccaacgccaaccccaacgccaaccccaacgccaaccccaacgccaaccccaacgccaaccccaacgccaaccccaacgccaaccccaacgccaaccccaacgccaaccccaacgccaaccccaacgccaaccccaacgccaaccccaacgccaaccccaacgccaaccccaacgccaaccccaacgccaaccccaacgccaaccccaacgccaaccccaacgccaaccccaacgccaaccccaacaagaacaaccagggcaacggccagggccacaacaugcccaacgaccccaacagaaacguggacgagaacgccaacgccaacaacgccgugaagaacaacaacaacgaggagcccagcgacaagcacaucgagcaguaccugaagaacauccagaacagccugagcaccgaguggagccccugcagcgugaccugcggcaacggcauccaggugagaaucaagcccggcagcgccaacaagcccaaggacgagcuggacuacgagaacgacaucgagaagaagaucugcaagauggagaagugcagcagcguguucaacguggugaacagcagcaucggccugaucauggugcugagcuuccuguuccugaacuga

SEQ ID NO: 4542 - RNA, 1296 nt, Artificial Sequence
  derived and/or modified CDS sequence (opt4) from Pf(D164)__ACO49368.1__CSP
augagaaagcuggccauccugagcgugagcagcuuccuguucguggaggcccuguuccaggaguaccagugcuacggcagcagcagcaacaccagagugcugaacgagcugaacuacgacaacgccggcaccaaccuguacaacgagcuggagaugaacuacuacggcaagcaggagaacugguacagccugaagaagaacagcagaagccugggcgagaacgacgacggcaacaacaacaacggcgacaacggcagagagggcaaggacgaggacaagagagacggcaacaacgaggacaacgagaagcugagaaagcccaagcacaagaagcugaagcagcccggcgacggcaaccccgaccccaacgccaaccccaacguggaccccaacgccaaccccaacguggaccccaacgccaaccccaacguggaccccaacgccaaccccaacguggaccccaacgccaaccccaacgccaaccccaacgccaaccccaacgccaaccccaacgccaaccccaacgccaaccccaacgccaaccccaacgccaaccccaacgccaaccccaacgccaaccccaacgccaaccccaacgccaaccccaacgccaaccccaacgccaaccccaacgccaaccccaacgccaaccccaacgccaaccccaacgccaaccccaacgccaaccccaacgccaaccccaacgccaaccccaacgccaaccccaacgccaaccccaacgccaaccccaacgccaaccccaacgccaaccccaacgccaaccccaacgccaaccccaacgccaaccccaacgccaaccccaacgccaaccccaacgccaaccccaacgccaaccccaacgccaaccccaacgccaaccccaacgccaaccccaacgccaaccccaacgccaaccccaacaagaacaaccagggcaacggccagggccacaacaugcccaacgaccccaacagaaacguggacgagaacgccaacgccaacaacgccgugaagaacaacaacaacgaggagcccagcgacaagcacaucgagcaguaccugaagaagauccagaacagccugagcaccgaguggagccccugcagcgugaccugcggcaacggcauccaggugagaaucaagcccggcagcgccaacaagcccaaggacgagcuggacuacgagaacgacaucgagaagaagaucugcaagauggagaagugcagcagcguguucaacguggugaacagcagcaucggccugaucauggugcugagcuuccuguuccugaacuga

SEQ ID NO: 4543 - RNA, 1296 nt, Artificial Sequence
  derived and/or modified CDS sequence (opt4) from Pf(E28)__ACO49378.1__CSP
augagaaagcuggccauccugagcgugagcagcuuccuguucguggaggcccuguuccaggaguaccagugcuacggcagcagcagcaacaccagagugcugaacgagcugaacuacgacaacgccggcaccaaccuguacaacgagcuggagaugaacuacuacggcaagcaggagaacugguacagccugaagaagaacagcagaagccugggcgagaacgacgacggcaacaacaacaacggcgacaacggcagagagggcaaggacgaggacaagagagacggcaacaacgaggacaacgagaagcugagaaagcccaagcacaagaagcugaagcagcccggcgacggcaaccccgaccccaacgccaaccccaacguggaccccaacgccaaccccaacguggaccccaacgccaaccccaacguggaccccaacgccaaccccaacgccaaccccaacgccaaccccaacgccaaccccaacgccaaccccaacgccaaccccaacgccaaccccaacgccaaccccaacgccaaccccaacgccaaccccaacgccaaccccaacgccaaccccaacgccaaccccaacgccaaccccaacgccaaccccaacgccaaccccaacgccaaccccaacgccaaccccaacgccaaccccaacgccaaccccaacgccaaccccaacgccaaccccaacgccaaccccaacgccaaccccaacgccaaccccaacgccaaccccaacgccaaccccaacgccaaccccaacgccaaccccaacgccaaccccaacgccaaccccaacgccaaccccaacgccaaccccaacgccaaccccaacgccaaccccaacgccaaccccaacgccaaccccaacgccaaccccaacgccaaccccaacgccaaccccaacaagaacaaccagggcaacggccagggccacaacaugcccaacgaccccaacagaaacguggacgagaacgccaacgccaacaacgccgugaagaacaacaacaacgaggagcccagcgacaagcacaucgagcaguaccugaagaacauccagaacagccugagcaccgaguggagccccugcagcgugaccugcggcaacggcauccaggugagaaucaagcccggcagcgccaacaagcccaaggacgagcuggacuacgagaacgacaucgagaagaagaucugcaagauggagaagugcagcagcguguucaacguggugaacagcagcaucggccugaucauggugcugagcuuccuguuccugaacuga

SEQ ID NO: 4544 - RNA, 1296 nt, Artificial Sequence
  derived and/or modified CDS sequence (opt4) from Pf(TM121)__ACO49457.1__CSP
augagaaagcuggccauccugagcgugagcagcuuccuguucguggaggcccuguuccaggaguaccagugcuacggcagcagcagcaacaccagagugcugaacgagcugaacuacgacaacgccggcaccaaccuguacaacgagcuggagaugaacuacuacggcaagcaggagaacugguacagccugaagaagaacagcagaagccugggcgagaacgacgacggcaacaacaacaacggcgacaacggcagagagggcaaggacgaggacaagagagacggcaacaacgaggacaacgagaagcugagaaagcccaagcacaagaagcugaagcagcccggcgacggcaaccccgaccccaacgccaaccccaacguggaccccaacgccaaccccaacguggaccccaacgccaaccccaacguggaccccaacgccaaccccaacgccaaccccaacgccaaccccaacgccaaccccaacgccaaccccaacgccaaccccaacgccaaccccaacgccaaccccaacgccaaccccaacgccaaccccaacgccaaccccaacgccaaccccaacgccaaccccaacgccaaccccaacgccaaccccaacgccaaccccaacgccaaccccaacgccaaccccaacgccaaccccaacgccaaccccaacgccaaccccaacgccaaccccaacgccaaccccaacgccaaccccaacgccaaccccaacgccaaccccaacgccaaccccaacgccaaccccaacgccaaccccaacgccaaccccaacgccaaccccaacgccaaccccaacgccaaccccaacgccaaccccaacgccaaccccaacgccaaccccaacgccaaccccaacgccaaccccaacgccaaccccaacgccaaccccaacaagaacaaccagggcaacggccagggccacaacaugcccaacgaccccaacagaaacguggacgagaacgccaacgccaacaacgacgugaagaacaacaacaacgaggagcccagcgacaagcacaucgagcaguaccugaagaagauccaguacagccugagcaccgaguggagccccugcagcgugaccugcggcaacggcauccaggugagaaucaagcccggcagcgccaacaagcccaaggacgagcuggacuacgagaacgacaucgagaagaagaucugcaagauggagaagugcagcagcguguucaacguggugaacagcagcaucggccugaucauggugcugagcuuccuguuccugaacuga

SEQ ID NO: 4545 - RNA, 1296 nt, Artificial Sequence
  derived and/or modified CDS sequence (opt4) from Pf(TM176)__ACO49467.1__CSP
augagaaagcuggccauccugagcgugagcagcuuccuguucguggaggcccuguuccaggaguaccagugcuacggcagcagcagcaacaccagagugcugaacgagcugaacuacgacaacgccggcaccaaccuguacaacgagcuggagaugaacuacuacggcaagcaggagaacugguacagccugaagaagaacagcagaagccugggcgagaacgacgacggcaacaacaacaacggcgacaacggcagagagggcaaggacgaggacaagagagacggcaacaacgaggacaacgagaagcugagaaagcccaagcacaagaagcugaagcagcccggcgacggcaaccccgaccccaacgccaaccccaacguggaccccaacgccaaccccaacguggaccccaacgccaaccccaacguggaccccaacgccaaccccaacgccaaccccaacgccaaccccaacgccaaccccaacgccaaccccaacgccaaccccaacgccaaccccaacgccaaccccaacgccaaccccaacgccaaccccaacgccaaccccaacgccaaccccaacgccaaccccaacgccaaccccaacgccaaccccaacgccaaccccaacgccaaccccaacgccaaccccaacgccaaccccaacgccaaccccaacgccaaccccaacgccaaccccaacgccaaccccaacgccaaccccaacgccaaccccaacgccaaccccaacgccaaccccaacgccaaccccaacgccaaccccaacgccaaccccaacgccaaccccaacgccaaccccaacgccaaccccaacgccaaccccaacgccaaccccaacgccaaccccaacgccaaccccaacgccaaccccaacgccaaccccaacgccaaccccaacaagaacaaccagggcaacggccagggccacaacaugcccaacgaccccaacagaaacguggacgagaacgccaacgccaacaacgacgugaagaacaacaacaacgaggagcccagcgacaagcacaucgagcaguaccugaagaagauccaguacagccugagcaccgaguggagccccugcagcgugaccugcggcaacggcauccaggugagaaucaagcccggcagcgccgacaagcccaaggaccagcuggacuacgagaacgacaucgagaagaagaucugcaagauggagaagugcagcagcguguucaacguggugaacagcagcaucggccugaucauggugcugagcuuccuguuccugaacuga

SEQ ID NO: 4546 - RNA, 1296 nt, Artificial Sequence
  derived and/or modified CDS sequence (opt4) from Pf(TSY650)__ACO49541.1__CSP
augagaaagcuggccauccugagcgugagcagcuuccuguucguggaggcccuguuccaggaguaccagugcuacggcagcagcagcaacaccagagugcugaacgagcugaacuacgacaacgccggcaccaaccuguacaacgagcuggagaugaacuacuacggcaagcaggagaacugguacagccugaagaagaacagcagaagccugggcgagaacgacgacggcaacaacaacaacggcgacaacggcagagagggcaaggacgaggacaagagagacggcaacaacgaggacaacgagaagcugagaaagcccaagcacaagaagcugaagcagcccggcgacggcaaccccgaccccaacgccaaccccaacguggaccccaacgccaaccccaacguggaccccaacgccaaccccaacguggaccccaacgccaaccccaacgccaaccccaacgccaaccccaacgccaaccccaacgccaaccccaacgccaaccccaacgccaaccccaacgccaaccccaacgccaaccccaacgccaaccccaacgccaaccccaacgccaaccccaacgccaaccccaacgccaaccccaacgccaaccccaacgccaaccccaacgccaaccccaacgccaaccccaacgccaaccccaacgccaaccccaacgccaaccccaacgccaaccccaacgccaaccccaacgccaaccccaacgccaaccccaacgccaaccccaacgccaaccccaacgccaaccccaacgccaaccccaacgccaaccccaacgccaaccccaacgccaaccccaacgccaaccccaacgccaaccccaacgccaaccccaacgccaaccccaacgccaaccccaacgccaaccccaacgccaaccccaacgccaaccccaacaagaacaaccagggcaacggccagggccacaacaugcccaacgaccccaacagaaacguggacgagaacgccaacgccaacaacgccgugaagaacaacaacaacgaggagcccagcgacaagcacaucgagcaguaccugaagaagauccagaacagccugagcaccgaguggagccccugcagcgugaccugcggcaacggcauccaggugagaaucaagcccggcagcgccaacaagcccaaggacgagcuggacuacgagaacgacaucgagaagaagaucugcaagauggagaagugcagcagcguguucaacguggugaacagcagcaucggccugaucauggugcugagcuuccuguuccugaacuga

SEQ ID NO: 4547 - RNA, 1296 nt, Artificial Sequence
  derived and/or modified CDS sequence (opt4) from Pf(TSY682)__ACO49544.1__CSP
augagaaagcuggccauccugagcgugagcagcuuccuguucguggaggcccuguuccaggaguaccagugcuacggcagcagcagcaacaccagagugcugaacgagcugaacuacgacaacgccggcaccaaccuguacaacgagcuggagaugaacuacuacggcaagcaggagaacugguacagccugaagaagaacagcagaagccugggcgagaacgacgacggcaacaacaacaacggcgacaacggcagagagggcaaggacgaggacaagagagacggcaacaacgaggacaacgagaagcugagaaagcccaagcacaagaagcugaagcagcccggcgacggcaaccccgaccccaacgccaaccccaacguggaccccaacgccaaccccaacguggaccccaacgccaaccccaacguggaccccaacgccaaccccaacgccaaccccaacgccaaccccaacgccaaccccaacgccaaccccaacgccaaccccaacgccaaccccaacgccaaccccaacgccaaccccaacgccaaccccaacgccaaccccaacgccaaccccaacgccaaccccaacgccaaccccaacgccaaccccaacgccaaccccaacgccaaccccaacgccaaccccaacgccaaccccaacgccaaccccaacgccaaccccaacgccaaccccaacgccaaccccaacgccaaccccaacgccaaccccaacgccaaccccaacgccaaccccaacgccaaccccaacgccaaccccaacgccaaccccaacgccaaccccaacgccaaccccaacgccaaccccaacgccaaccccaacgccaaccccaacgccaaccccaacgccaaccccaacgccaaccccaacgccaaccccaacgccaaccccaacaagaacaaccagggcaacggccagggccacaacaugcccaacgaccccaacagaaacguggacgagaacgccaacgccaacaacgacgugaagaacaacaacaacgaggagcccagcgacaagcacaucgaggaguaccugaagaagauccagaacagccugagcaccgaguggagccccugcagcgugaccugcggcaacggcauccaggugagaaucaagcccggcagcgccaacaagcccaaggacgagcugaacuacgagaacgacaucgagaagaagaucugcaagauggagaagugcagcagcguguucaacguggugaacagcagcaucggccugaucauggugcugagcuuccuguuccugaacuga

SEQ ID NO: 4548 - RNA, 1287 nt, Artificial Sequence
  derived and/or modified CDS sequence (opt4) from Pf(India)__AAN87575.1__CSP
augaugagaaagcuggccauccugagcgugagcagcuuccuguucguggaggcccuguuccaggaguaccagugcuacggcagcagcagcaacaccagagugcugaacgagcugaacuacgacaacgccggcaccaaccuguacaacgagcuggagaugaacuacuacggcaagcaggagaacugguacagccugaagaagaacagcagaagccugggcgagaacgacgacggcaacaacaacaacggcgacaacggcagagagggcaaggacgaggacaagagagacggcaacaacgaggacaacgagaagcugagaaagcccaagcacaagaagcugaagcagcccggcgacggcaaccccgaccccaacgccaaccccaacguggaccccaacgccaaccccaacguggaccccaacgccaaccccaacgccaaccccaacgccaaccccaacgccaaccccaacgccaaccccaacgccaaccccaacgccaaccccaacgccaaccccaacgccaaccccaacgccaaccccaacgccaaccccaacgccaaccccaacgccaaccccaacgccaaccccaacgccaaccccaacgccaaccccaacgccaaccccaacgccaaccccaacgccaaccccaacgccaaccccaacgccaaccccaacgccaaccccaacgccaaccccaacgccaaccccaacgccaaccccaacgccaaccccaacgccaaccccaacgccaaccccaacgccaaccccaacgccaaccccaacgccaaccccaacgccaaccccaacgccaaccccaacgccaaccccaacgccaaccccaacgccaaccccaacgccaaccccaacgccaaccccaacgccaaccccaacgccaaccccaacgccaaccccaacaagaacaaccagggcaacggcagaggccacaacaugcccaacgaccccaacagaaacguggacgagaacgccaacgccaacaacgacgugaagaacaacaacaacgaggagcccagcgacaagcacaucgaggaguaccugaagaagauccagaacagccugagcaccgaguggagccccugcagcgugaccugcggcaacggcauccaggugagaaucaagcccggcagcgccaacaagcccaaggacgagcugaacuacgagaacgacaucgagaagaagaucugcaagauggagaagugcagcagcguguucaacguggugaacagcagcaucggccugaucauggugcugagcuuccuguuccugaacuga

SEQ ID NO: 4549 - RNA, 1287 nt, Artificial Sequence
  derived and/or modified CDS sequence (opt4) from Pf(Pal97-082)__BAM84946.1__CSP
augaugagaaagcuggccauccugagcgugagcagcuuccuguucguggaggcccuguuccaggaguaccagugcuacggcagcagcagcaacaccagagugcugaacgagcugaacuacgacaacgccggcaccaaccuguacaacgagcuggagaugaacuacuacggcaagcaggagaacugguacagccugaagaagaacagcagaagccugggcgagaacgacgacggcaacaacaacaacggcgacaacggcagagagggcaaggacgaggacaagagagacggcaacaacgaggacaacgagaagcugagaaagcccaagcacaagaagcugaagcagcccggcgacggcaaccccgaccccaacgccaaccccaacguggaccccaacgccaaccccaacguggaccccaacgccaaccccaacguggaccccaacgccaaccccaacgccaaccccaacgccaaccccaacgccaaccccaacgccaaccccaacgccaaccccaacgccaaccccaacgccaaccccaacgccaaccccaacgccaaccccaacgccaaccccaacgccaaccccaacgccaaccccaacgccaaccccaacgccaaccccaacgccaaccccaacgccaaccccaacgccaaccccaacgccaaccccaacguggaccccaacgccaaccccaacgccaaccccaacgccaaccccaacgccaaccccaacgccaaccccaacgccaaccccaacgccaaccccaacgccaaccccaacgccaaccccaacgccaaccccaacgccaaccccaacgccaaccccaacgccaaccccaacgccaaccccaacgccaaccccaacgccaaccccaacgccaaccccaacgccaaccccaacgccaaccccaacaagaacaaccagggcaacggccagggccacaacaugcccaacgaccccaacagaaacguggacgagaacgccaacgccaacaacgccgugaagaacaacaacaacgaggagcccagcgacaagcacaucgagcaguaccugaagaagauccagaacagccugagcaccgaguggagccccugcagcgugaccugcggcaacggcauccaggugagaaucaagcccggcagcgccggcaagagcaaggacgagcuggacuacgagaacgacaucgagaagaagaucugcaagauggagaagugcagcagcguguucaacguggugaacagcagcaucggccugaucauggugcugagcuuccuguuccugaacuga

SEQ ID NO: 4550 - RNA, 1287 nt, Artificial Sequence
  derived and/or modified CDS sequence (opt4) from Pf(Pal97-084)__BAM84947.1__CSP
augaugagaaagcuggccauccugagcgugagcagcuuccuguucguggaggcccuguuccaggaguaccagugcuacggcagcagcagcaacaccagagugcugaacgagcugaacuacgacaacgccggcaccaaccuguacaacgagcuggagaugaacuacuacggcaagcaggagaacugguacagccugaagaagaacagcagaagccugggcgagaacgacgacggcaacaacaacaacggcgacaacggcagagagggcaaggacgaggacaagagagacggcaacaacgaggacaacgagaagcugagaaagcccaagcacaagaagcugaagcagcccggcgacggcaaccccgaccccaacgccaaccccaacguggaccccaacgccaaccccaacguggaccccaacgccaaccccaacguggaccccaacgccaaccccaacgccaaccccaacgccaaccccaacgccaaccccaacgccaaccccaacgccaaccccaacgccaaccccaacgccaaccccaacgccaaccccaacgccaaccccaacgccaaccccaacgccaaccccaacgccaaccccaacgccaaccccaacgccaaccccaacgccaaccccaacgccaaccccaacgccaaccccaacgccaaccccaacgccaaccccaacgccaaccccaacgccaaccccaacgccaaccccaacgccaaccccaacgccaaccccaacgccaaccccaacgccaaccccaacgccaaccccaacgccaaccccaacgccaaccccaacgccaaccccaacgccaaccccaacgccaaccccaacgccaaccccaacgccaaccccaacgccaaccccaacgccaaccccaacgccaaccccaacgccaaccccaacaagaacaaccagggcaacggccagggccacaacaugcccaacgaccccaacagaaacguggacgagaacgccaacgccaacaacgccgugaagaacaacaacaacgaggagcccagcgaccagcacaucgagaaguaccugaagaucauccagaacagccugagcaccgaguggagccccugcagcgugaccugcggcaacggcauccaggugagaaucaagcccggcagcgccgacaagcccaaggaccagcuggacuacgccaacgacaucgagaagaagaucugcaagauggagaagugcagcagcguguucaacguggugaacagcagcaucggccugaucauggugcugagcuuccuguuccugaacuga

SEQ ID NO: 4551 - RNA, 1287 nt, Artificial Sequence
  derived and/or modified CDS sequence (opt4) from Pf(PFS54)__BAN59412.1__CSP
augaugagaaagcuggccauccugagcgugagcagcuuccuguucguggaggcccuguuccaggaguaccagugcuacggcagcagcagcaacaccagagugcugaacgagcugaacuacgacaacgccggcaccaaccuguacaacgagcuggagaugaacuacuacggcaagcaggagaacugguacagccugaagaagaacagcagaagccugggcgagaacgacgacggcaacaacaacaacggcgacaacggcagagagggcaaggacgaggacaagagagacggcaacaacgaggacaacgagaagcugagaaagcccaagcacaagaagcugaagcagcccggcgacgacaaccccgaccccaacgccaaccccaacguggaccccaacgccaaccccaacguggaccccaacgccaaccccaacgccaaccccaacgccaaccccaacgccaaccccaacgccaaccccaacgccaaccccaacgccaaccccaacgccaaccccaacgccaaccccaacgccaaccccaacgccaaccccaacgccaaccccaacgccaaccccaacgccaaccccaacguggaccccaacgccaaccccaacgccaaccccaacgccaaccccaacgccaaccccaacgccaaccccaacgccaaccccaacgccaaccccaacgccaaccccaacgccaaccccaacgccaaccccaacgccaaccccaacgccaaccccaacgccaaccccaacgccaaccccaacgccaaccccaacgccaaccccaacgccaaccccaacgccaaccccaacgccaaccccaacgccaaccccaacgccaaccccaacgccaaccccaacgccaaccccaacgccaaccccaacgccaaccccaacgccaaccccaacaagaacaaccagggcaacggccagggccacaacaugcccaacgaccccaacagaaacguggacgagaacgccaacgccaacaacgccgugaagaacaacaacaacgaggagcccagcgacaagcacaucgagcaguaccugaagaagauccaguacagccugagcaccgaguggagccccugcagcgugaccugcggcaacggcauccaggugagaaucaagcccggcagcgccgacaagcccaaggaccagcuggacuacgagaacgacaucgagaagaagaucugcaagauggagaagugcagcagcguguucaacguggugaacagcagcaucggccugaucauggugcugagcuuccuguuccugaacuga

SEQ ID NO: 4552 - RNA, 1287 nt, Artificial Sequence
  derived and/or modified CDS sequence (opt4) from Pf(PFS79)__BAN59422.1__CSP
augaugagaaagcuggccauccugagcgugagcagcuuccuguucguggaggcccuguuccaggaguaccagugcuacggcagcagcagcaacaccagagugcugaacgagcugaacuacgacaacgccggcaccaaccuguacaacgagcuggagaugaacuacuacggcaagcaggagaacugguacagccugaagaagaacagcagaagccugggcgagaacgacgacggcaacaacaacaacggcgacaacggcagagagggcaaggacgaggacaagagagacggcaacaacgaggacaacgagaagcugagaaagcccaagcacaagaagcugaagcagcccggcgacggcaaccccgaccccaacgccaaccccaacguggaccccaacgccaaccccaacguggaccccaacgccaaccccaacguggaccccaacgccaaccccaacgccaaccccaacgccaaccccaacgccaaccccaacgccaaccccaacgccaaccccaacgccaaccccaacgccaaccccaacgccaaccccaacgccaaccccaacgccaaccccaacgccaaccccaacgccaaccccaacgccaaccccaacgccaaccccaacgccaaccccaacgccaaccccaacgccaaccccaacgccaaccccaacgccaaccccaacgccaaccccaacgccaaccccaacgccaaccccaacgccaaccccaacgccaaccccaacgccaaccccaacgccaaccccaacgccaaccccaacgccaaccccaacgccaaccccaacgccaaccccaacgccaaccccaacgccaaccccaacgccaaccccaacgccaaccccaacgccaaccccaacgccaaccccaacgccaaccccaacgccaaccccaacaagaacaaccagggcaacggccagggccacaacaugcccaacgaccccaacagaaacguggacgagaacgccaacgccaacaacgccgugaagaacaacaacaacgaggagcccagcgacaagcacaucgagcaguaccugaagaagauccagaacagccugagcaccgaguggagccccugcagcgugaccugcggcaacggcauccaggugagaaucaagcccggcagcgccaacaagcccaaggacgagcuggacuacgagaacgacaucgagaagaagaucugcaagauggagaagugcagcagcguguucaacguggugaacagcagcaucggccugaucauggugcugagcuuccuguuccugaacuga

SEQ ID NO: 4553 - RNA, 1287 nt, Artificial Sequence
  derived and/or modified CDS sequence (opt4) from Pf(PFS83)__BAN59424.1__CSP
augaugagaaagcuggccauccugagcgugagcagcuuccuguucguggaggcccuguuccaggaguaccagugcuacggcagcagcagcaacaccagagugcugaacgagcugaacuacgacaacgccggcaccaaccuguacaacgagcuggagaugaacuacuacggcaagcaggagaacugguacagccugaagaagaacagcagaagccugggcgagaacgacgacggcaacaacaacaacggcgacaacggcagagagggcaaggacgaggacaagagagacggcaacaacgaggacaacgagaagcugagaaagcccaagcacaagaagcugaagcagcccggcgacggcaaccccgaccccaacgccaaccccaacguggaccccaacgccaaccccaacguggaccccaacgccaaccccaacguggaccccaacgccaaccccaacguggaccccaacgccaaccccaacgccaaccccaacgccaaccccaacgccaaccccaacgccaaccccaacgccaaccccaacgccaaccccaacgccaaccccaacgccaaccccaacgccaaccccaacgccaaccccaacgccaaccccaacgccaaccccaacgccaaccccaacgccaaccccaacgccaaccccaacgccaaccccaacgccaaccccaacgccaaccccaacgccaaccccaacgccaaccccaacgccaaccccaacgccaaccccaacgccaaccccaacgccaaccccaacgccaaccccaacgccaaccccaacgccaaccccaacgccaaccccaacgccaaccccaacgccaaccccaacgccaaccccaacgccaaccccaacgccaaccccaacgccaaccccaacgccaaccccaacgccaaccccaacaagaacaaccagggcaacggccagggccacaacaugcccaacgaccccaacagaaacguggacgagaacgccaacgccaacaacgccgugaagaacaacaacaacgaggagcccagcgacaagcacaucgagcaguaccugaagaagauccagaacagccugagcaccgaguggagccccugcagcgugaccugcggcaacggcauccaggugagaaucaagcccggcagcgccaacaagcccaaggacgagcuggacuacgagaacgacaucgagaagaagaucugcaagauggagaagugcagcagcguguucaacguggugaacagcagcaucggccugaucauggugcugagcuuccuguuccugaacuga

SEQ ID NO: 4554 - RNA, 1287 nt, Artificial Sequence
  derived and/or modified CDS sequence (opt4) from Pf(TiMS95-112)__BAM84878.1__CSP
augaugagaaagcuggccauccugagcgugagcagcuuccuguucguggaggcccuguuccaggaguaccagugcuacggcagcagcagcaacaccagagugcugaacgagcugaacuacgacaacgccggcaccaaccuguacaacgagcuggagaugaacuacuacggcaagcaggagaacugguacagccugaagaagaacagcagaagccugggcgagaacgacgacggcaacaacaacaacggcgacaacggcagagagggcaaggacgaggacaagagagacggcaacaacgaggacaacgagaagcugagaaagcccaagcacaagaagcugaagcagcccggcgacggcaaccccgaccccaacgccaaccccaacguggaccccaacgccaaccccaacguggaccccaacgccaaccccaacguggaccccaacgccaaccccaacgccaaccccaacgccaaccccaacgccaaccccaacgccaaccccaacgccaaccccaacgccaaccccaacgccaaccccaacgccaaccccaacgccaaccccaacgccaaccccaacgccaaccccaacgccaaccccaacgccaaccccaacgccaaccccaacgccaaccccaacgccaaccccaacgccaaccccaacgccaaccccaacgccaaccccaacgccaaccccaacgccaaccccaacgccaaccccaacgccaaccccaacgccaaccccaacgccaaccccaacgccaaccccaacgccaaccccaacgccaaccccaacgccaaccccaacgccaaccccaacgccaaccccaacgccaaccccaacgccaaccccaacgccaaccccaacgccaaccccaacgccaaccccaacgccaaccccaacgccaaccccaacaagaacaaccagggcaacggccagggccacaacaugcccaacgaccccaacagaaacguggacgagaacgccaacgccaacaacgacgugaagaacaacaacaacgaggagcccagcgacaagcacaucgagcaguaccugaagaagauccaguacagccugagcaccgaguggagccccugcagcgugaccugcggcaacggcauccaggugagaaucaagcccggcagcgccgacaagcccaaggaccagcuggacuacgagaacgacaucgagaagaagaucugcaagauggagaagugcagcagcguguucaacguggugaacagcagcaucggccugaucauggugcugagcuuccuguuccugaacuga

SEQ ID NO: 4555 - RNA, 1284 nt, Artificial Sequence
  derived and/or modified CDS sequence (opt4) from Pf(E103)__ACO49384.1__CSP
augagaaagcuggccauccugagcgugagcagcuuccuguucguggaggcccuguuccaggaguaccagugcuacggcagcagcagcaacaccagagugcugaacgagcugaacuacgacaacgccggcaccaaccuguacaacgagcuggagaugaacuacuacggcaagcaggagaacugguacagccugaagaagaacagcagaagccugggcgagaacgacgacggcaacaacaacaacggcgacaacggcagagagggcaaggacgaggacaagagagacggcaacaacgaggacaacgagaagcugagaaagcccaagcacaagaagcugaagcagcccggcgacggcaaccccgaccccaacgccaaccccaacguggaccccaacgccaaccccaacguggaccccaacgccaaccccaacguggaccccaacgccaaccccaacgccaaccccaacgccaaccccaacgccaaccccaacgccaaccccaacgccaaccccaacgccaaccccaacgccaaccccaacgccaaccccaacgccaaccccaacgccaaccccaacgccaaccccaacgccaaccccaacgccaaccccaacgccaaccccaacgccaaccccaacgccaaccccaacgccaaccccaacgccaaccccaacgccaaccccaacgccaaccccaacgccaaccccaacgccaaccccaacgccaaccccaacgccaaccccaacgccaaccccaacgccaaccccaacgccaaccccaacgccaaccccaacgccaaccccaacgccaaccccaacgccaaccccaacgccaaccccaacgccaaccccaacgccaaccccaacgccaaccccaacgccaaccccaacgccaaccccaacgccaaccccaacaagaacaaccagggcaacggccagggccacaacaugcccaacgaccccaacagaaacguggacgagaacgccaacgccaacaacgccgugaagaacaacaacaacgaggagcccagcgacaagcacaucgagcaguaccugaagaacauccagaacagccugagcaccgaguggagccccugcagcgugaccugcggcaacggcauccaggugagaaucaagcccggcagcgccaacaagcccaaggacgagcuggacuacgagaacgacaucgagaagaagaucugcaagauggagaagugcagcagcguguucaacguggugaacagcagcaucggccugaucauggugcugagcuuccuguuccugaacuga

SEQ ID NO: 4556 - RNA, 1284 nt, Artificial Sequence
  derived and/or modified CDS sequence (opt4) from Pf(TMS75)__ACO49490.1__CSP
augagaaagcuggccauccugagcgugagcagcuuccuguucguggaggcccuguuccaggaguaccagugcuacggcagcagcagcaacaccagagugcugaacgagcugaacuacgacaacgccggcaccaaccuguacaacgagcuggagaugaacuacuacggcaagcaggagaacugguacagccugaagaagaacagcagaagccugggcgagaacgacgacggcaacaacaacaacggcgacaacggcagagagggcaaggacgaggacaagagagacggcaacaacgaggacaacgagaagcugagaaagcccaagcacaagaagcugaagcagcccggcgacggcaaccccgaccccaacgccaaccccaacguggaccccaacgccaaccccaacguggaccccaacgccaaccccaacguggaccccaacgccaaccccaacguggaccccaacgccaaccccaacgccaaccccaacgccaaccccaacgccaaccccaacgccaaccccaacgccaaccccaacgccaaccccaacgccaaccccaacgccaaccccaacgccaaccccaacgccaaccccaacgccaaccccaacgccaaccccaacgccaaccccaacgccaaccccaacgccaaccccaacgccaaccccaacgccaaccccaacgccaaccccaacgccaaccccaacgccaaccccaacgccaaccccaacgccaaccccaacgccaaccccaacgccaaccccaacgccaaccccaacgccaaccccaacgccaaccccaacgccaaccccaacgccaaccccaacgccaaccccaacgccaaccccaacgccaaccccaacgccaaccccaacgccaaccccaacgccaaccccaacgccaaccccaacaagaacaaccagggcaacggccagggccacaacaugcccaacgaccccaacagaaacguggacgagaacgccaacgccaacaacgccgugaagaacaacaacaacgaggagcccagcgacaagcacaucgagcaguaccugaagaagauccagaacagccugagcaccgaguggagccccugcagcgugaccugcggcaacggcauccaggugagaaucaagcccggcagcgccaacaagcccaaggacgagcuggacuacgagaacgacaucgagaagaagaucugcaagauggagaagugcagcagcguguucaacguggugaacagcagcaucggccugaucauggugcugagcuuccuguuccugaacuga

SEQ ID NO: 4557 - RNA, 1284 nt, Artificial Sequence
  derived and/or modified CDS sequence (opt4) from Pf(TSY621)__ACO49538.1__CSP
augagaaagcuggccauccugagcgugagcagcuuccuguucguggaggcccuguuccaggaguaccagugcuacggcagcagcagcaacaccagagugcugaacgagcugaacuacgacaacgccggcaccaaccuguacaacgagcuggagaugaacuacuacggcaagcaggagaacugguacagccugaagaagaacagcagaagccugggcgagaacgacgacggcaacaacaacaacggcgacaacggcagagagggcaaggacgaggacaagagagacggcaacaacgaggacaacgagaagcugagaaagcccaagcacaagaagcugaagcagcccggcgacggcaaccccgaccccaacgccaaccccaacguggaccccaacgccaaccccaacguggaccccaacgccaaccccaacguggaccccaacgccaaccccaacgccaaccccaacgccaaccccaacgccaaccccaacgccaaccccaacgccaaccccaacgccaaccccaacgccaaccccaacgccaaccccaacgccaaccccaacgccaaccccaacgccaaccccaacgccaaccccaacgccaaccccaacgccaaccccaacgccaaccccaacgccaaccccaacgccaaccccaacgccaaccccaacgccaaccccaacgccaaccccaacgccaaccccaacgccaaccccaacgccaaccccaacgccaaccccaacgccaaccccaacgccaaccccaacgccaaccccaacgccaaccccaacgccaaccccaacgccaaccccaacgccaaccccaacgccaaccccaacgccaaccccaacgccaaccccaacgccaaccccaacgccaaccccaacgccaaccccaacgccaaccccaacaagaacaaccagggcaacggccagggccacaacaugcccaacgaccccaacagaaacguggacgagaacgccaacgccaacaacgacgugaagaacaacaacaacgaggagcccagcgacaagcacaucgagcaguaccugaagaagauccaguacagccugagcaccgaguggagccccugcagcgugaccugcggcaacggcauccaggugagaaucaagcccggcagcgccgacaagcccaaggaccagcuggacuacgagaacgacaucgagaagaagaucugcaagauggagaagugcagcagcguguucaacguggugaacagcagcaucggccugaucauggugcugagcuuccuguuccugaacuga

SEQ ID NO: 4558 - RNA, 1284 nt, Artificial Sequence
  derived and/or modified CDS sequence (opt4) from Pf(TSY646)__ACO49540.1__CSP
augagaaagcuggccauccugagcgugagcagcuuccuguucguggaggcccuguuccaggaguaccagugcuacggcagcagcagcaacaccagagugcugaacgagcugaacuacgacaacgccggcaccaaccuguacaacgagcuggagaugaacuacuacggcaagcaggagaacugguacagccugaagaagaacagcagaagccugggcgagaacgacgacggcaacaacaacaacggcgacaacggcagagagggcaaggacgaggacaagagagacggcaacaacgaggacaacgagaagcugagaaagcccaagcacaagaagcugaagcagcccggcgacggcaaccccgaccccaacgccaaccccaacguggaccccaacgccaaccccaacguggaccccaacgccaaccccaacguggaccccaacgccaaccccaacgccaaccccaacgccaaccccaacgccaaccccaacgccaaccccaacgccaaccccaacgccaaccccaacgccaaccccaacgccaaccccaacgccaaccccaacgccaaccccaacgccaaccccaacgccaaccccaacgccaaccccaacgccaaccccaacgccaaccccaacgccaaccccaacgccaaccccaacgccaaccccaacgccaaccccaacgccaaccccaacgccaaccccaacgccaaccccaacgccaaccccaacgccaaccccaacgccaaccccaacgccaaccccaacgccaaccccaacgccaaccccaacgccaaccccaacgccaaccccaacgccaaccccaacgccaaccccaacgccaaccccaacgccaaccccaacgccaaccccaacgccaaccccaacgccaaccccaacgccaaccccaacaagaacaaccagggcaacggccagggccacaacaugcccaacgaccccaacagaaacguggacgagaacgccaacgccaacaacgccgugaagaacaacaacaacgaggagcccagcgacaagcacaucgagcaguaccugaagaagauccagaacagccugagcaccgaguggagccccugcagcgugaccugcggcaacggcauccaggugagaaucaagcccggcagcgccaacaagcccaaggacgagcuggacuacgagaacgacaucgagaagaagaucugcaagauggagaagugcagcagcguguucaacguggugaacagcagcaucggccugaucauggugcugagcuuccuguuccugaacuga

SEQ ID NO: 4559 - RNA, 1275 nt, Artificial Sequence
  derived and/or modified CDS sequence (opt4) from Pf(806)__AAA29562.1__CSP
augaugagaaagcuggccauccugagcgugagcagcuuccuguucguggaggcccuguuccaggaguaccagugcuacggcagcagcagcaacaccagagugcugaacgagcugaacuacgacaacgccggcaucaaccuguacaacgagcuggagaugaacuacuacggcaagcaggagaacugguacagccugaagaagaacagcagaagccugggcgagaacgacgacggcaacaacaacaacggcgacaacggcagagagggcaaggacgaggacaagagagacggcaacaacgaggacaacgagaagcugagaaagcccaagcacaagaagcugaagcagcccggcgacggcaaccccgaccccaacgccaaccccaacguggaccccaacgccaaccccaacguggaccccaacgccaaccccaacguggaccccaacgccaaccccaacgccaaccccaacgccaaccccaacgccaaccccaacgccaaccccaacgccaaccccaacgccaaccccaacgccaaccccaacgccaaccccaacgccaaccccaacgccaaccccaacgccaaccccaacgccaaccccaacgccaaccccaacgccaaccccaacgccaaccccaacgccaaccccaacgccaaccccaacgccaaccccaacgccaaccccaacgccaaccccaacgccaaccccaacgccaaccccaacgccaaccccaacgccaaccccaacgccaaccccaacgccaaccccaacgccaaccccaacgccaaccccaacgccaaccccaacgccaaccccaacgccaaccccaacgccaaccccaacgccaaccccaacgccaaccccaacgccaaccccaacgccaaccccaacgccaaccccaacaagaacaaccagggcaacggccagggccacaacaugcccaacgaccccaacagaaacguggacgagaacgccaacgccaacaacgccgugaagaacaacaacaacgaggagcccagcgacaagcacaucgagcaguaccugaagaagauccagaacagccugagcaccgaguggagccccugcagcgugaccugcggcaacggcauccaggugagaaucaagcccggcagcgccaacaagcccaaggacgagcuggacuacgagaacgacaucgagaagaagaucugcaagauggagaagugcagcagcguguucaacguggugaacagcagcaucggccugaucauggugcugagcuuccuguuccugaacuga

SEQ ID NO: 4560 - RNA, 1275 nt, Artificial Sequence
  derived and/or modified CDS sequence (opt4) from Pf(Pal97-100)__BAM84952.1__CSP
augaugagaaagcuggccauccugagcgugagcagcuuccuguucguggaggcccuguuccaggaguaccagugcuacggcagcagcagcaacaccagagugcugaacgagcugaacuacgacaacgccggcaccaaccuguacaacgagcuggagaugaacuacuacggcaagcaggagaacugguacagccugaagaagaacagcagaagccugggcgagaacgacgacggcaacaacaacaacggcgacaacggcagagagggcaaggacgaggacaagagagacggcaacaacgaggacaacgagaagcugagaaagcccaagcacaagaagcugaagcagcccggcgacggcaaccccgaccccaacgccaaccccaacguggaccccaacgccaaccccaacguggaccccaacgccaaccccaacguggaccccaacgccaaccccaacgccaaccccaacgccaaccccaacgccaaccccaacgccaaccccaacgccaaccccaacgccaaccccaacgccaaccccaacgccaaccccaacgccaaccccaacgccaaccccaacguggaccccaacgccaaccccaacgccaaccccaacgccaaccccaacgccaaccccaacgccaaccccaacgccaaccccaacgccaaccccaacgccaaccccaacgccaaccccaacgccaaccccaacgccaaccccaacgccaaccccaacgccaaccccaacgccaaccccaacgccaaccccaacgccaaccccaacgccaaccccaacgccaaccccaacgccaaccccaacgccaaccccaacgccaaccccaacgccaaccccaacgccaaccccaacgccaaccccaacgccaaccccaacgccaaccccaacaagaacaaccagggcaacggccagggccacaacaugcccaacgaccccaacagaaacguggacgagaacgccaacgccaacaacgccgugaagaacaacaacaacgaggagcccagcgacaagcacaucaccgaguaccugaagaagauccagaacagccugagcaccgaguggagccccugcagcgugaccugcggcaacggcauccaggugagaaucaagcccggcagcgccggcaagagcaaggacgagcuggacuacgagaacgacaucgagaagaagaucugcaagauggagaagugcagcagcguguucaacguggugaacagcagcaucggccugaucauggugcugagcuuccuguuccugaacuga

SEQ ID NO: 4561 - RNA, 1275 nt, Artificial Sequence
  derived and/or modified CDS sequence (opt4) from Pf(PFS89)__BAN59425.1__CSP
augaugagaaagcuggccauccugagcgugagcagcuuccuguucguggaggcccuguuccaggaguaccagugcuacggcagcagcagcaacaccagagugcugaacgagcugaacuacgacaacgccggcaccaaccuguacaacgagcuggagaugaacuacuacggcaagcaggagaacugguacagccugaagaagaacagcagaagccugggcgagaacgacgacggcaacaacaacaacggcgacaacggcagagagggcaaggacgaggacaagagagacggcaacaacgaggacaacgagaagcugagaaagcccaagcacaagaagcugaagcagcccggcgacggcaaccccgaccccaacgccaaccccaacguggaccccaacgccaaccccaacguggaccccaacgccaaccccaacguggaccccaacgccaaccccaacgccaaccccaacgccaaccccaacgccaaccccaacgccaaccccaacgccaaccccaacgccaaccccaacgccaaccccaacgccaaccccaacgccaaccccaacgccaaccccaacgccaaccccaacgccaaccccaacgccaaccccaacgccaaccccaacgccaaccccaacgccaaccccaacgccaaccccaacgccaaccccaacgccaaccccaacgccaaccccaacgccaaccccaacgccaaccccaacgccaaccccaacgccaaccccaacgccaaccccaacgccaaccccaacgccaaccccaacgccaaccccaacgccaaccccaacgccaaccccaacgccaaccccaacgccaaccccaacgccaaccccaacgccaaccccaacgccaaccccaacgccaaccccaacgccaaccccaacaagaacaaccagggcaacggccagggccacaacaugcccaacgaccccaacagaaacguggacgagaacgccaacgccaacaacgccgugaagaacaacaacaacgaggagcccagcgacaagcacaucgagcaguaccugaagaagauccagaacagccugagcaccgaguggagccccugcagcgugaccugcggcaacggcauccaggugagaaucaagcccggcagcgccaacaagcccaaggacgagcuggacuacgagaacgacaucgagaagaagaucugcaagauggagaagugcagcagcguguucaacguggugaacagcagcaucggccugaucauggugcugagcuuccuguuccugaacuga

SEQ ID NO: 4562 - RNA, 1275 nt, Artificial Sequence
  derived and/or modified CDS sequence (opt4) from Pf(PNG912-035)__BAM85007.1__CSP
augaugagaaagcuggccauccugagcgugagcagcuuccuguucguggaggcccuguuccaggaguaccagugcuacggcagcagcagcaacaccagagugcugaacgagcugaacuacgacaacgccggcaccaaccuguacaacgagcuggagaugaacuacuacggcaagcaggagaacugguacagccugaagaagaacagcagaagccugggcgagaacgacgacggcaacaacaacaacggcgacaacggcagagagggcaaggacgaggacaagagagacggcaacaacgaggacaacgagaagcugagaaagcccaagcacaagaagcugaagcagcccggcgacggcaaccccgaccccaacgccaaccccaacguggaccccaacgccaaccccaacguggaccccaacgccaaccccaacguggaccccaacgccaaccccaacgccaaccccaacgccaaccccaacgccaaccccaacgccaaccccaacgccaaccccaacgccaaccccaacgccaaccccaacgccaaccccaacgccaaccccaacgccaaccccaacgccaaccccaacgccaaccccaacgccaaccccaacgccaaccccaacgccaaccccaacgccaaccccaacgccaaccccaacguggaccccaacgccaaccccaacgccaaccccaacgccaaccccaacgccaaccccaacgccaaccccaacgccaaccccaacgccaaccccaacgccaaccccaacgccaaccccaacgccaaccccaacgccaaccccaacgccaaccccaacgccaaccccaacgccaaccccaacgccaaccccaacgccaaccccaacgccaaccccaacgccaaccccaacgccaaccccaacaagaacaaccagggcaacggccagggccacaacaugcccaacgaccccaacagaaacguggacgagaacgccaacgccaacaacgccgugaagaacaacaacaacgaggagcccagcgacaagcacaucgagcaguaccugaagaagauccagaacagccugagcaccgaguggagccccugcagcgugaccugcggcaacggcauccaggugagaaucaagcccggcagcgccgacaagcccaaggaccagcuggacuacgagaacgacaucgagaagaagaucugcaagauggagaagugcagcagcguguucaacguggugaacagcagcaucggccugaucauggugcugagcuuccuguuccugaacuga

SEQ ID NO: 4563 - RNA, 1275 nt, Artificial Sequence
  derived and/or modified CDS sequence (opt4) from Pf(Sol95-308)__BAM85089.1__CSP
augaugagaaagcuggccauccugagcgugagcagcuuccuguucguggaggcccuguuccaggaguaccagugcuacggcagcagcagcaacaccagagugcugaacgagcugaacuacgacaacgccggcaccaaccuguacaacgagcuggagaugaacuacuacggcaagcaggagaacugguacagccugaagaagaacagcagaagccugggcgagaacgacgacggcaacaacaacaacggcgacaacggcagagagggcaaggacgaggacaagagagacggcaacaacgaggacaacgagaagcugagaaagcccaagcacaagaagcugaagcagcccggcgacggcaaccccgaccccaacgccaaccccaacguggaccccaacgccaaccccaacguggaccccaacgccaaccccaacguggaccccaacgccaaccccaacguggaccccaacgccaaccccaacgccaaccccaacgccaaccccaacgccaaccccaacgccaaccccaacgccaaccccaacgccaaccccaacgccaaccccaacgccaaccccaacgccaaccccaacgccaaccccaacgccaaccccaacgccaaccccaacgccaaccccaacgccaaccccaacgccaaccccaacgccaaccccaacgccaaccccaacgccaaccccaacgccaaccccaacgccaaccccaacgccaaccccaacgccaaccccaacgccaaccccaacgccaaccccaacgccaaccccaacgccaaccccaacgccaaccccaacgccaaccccaacgccaaccccaacgccaaccccaacgccaaccccaacgccaaccccaacgccaaccccaacgccaaccccaacgccaaccccaacaagaacaaccagggcaacggccagggccacaacaugcccaacgaccccaacagaaacguggacgagaacgccaacgccaacaacgccgugaagaacaacaacaacgaggagcccagcgacaagcacaucgagcaguaccugaagaagauccagaacagccugagcaccgaguggagccccugcagcgugaccugcggcaacggcauccaggugagaaucaagcccggcagcgccaacaagcccaaggacgagcuggacuacgagaacgacaucgagaagaagaucugcaagauggagaagugcagcagcguguucaacguggugaacagcagcaucggccugaucauggugcugagcuuccuguuccugaacuga

SEQ ID NO: 4564 - RNA, 1275 nt, Artificial Sequence
  derived and/or modified CDS sequence (opt4) from Pf(Sol95-346)__BAM85102.1__CSP
augaugagaaagcuggccauccugagcgugagcagcuuccuguucguggaggcccuguuccaggaguaccagugcuacggcagcagcagcaacaccagagugcugaacgagcugaacuacgacaacgccggcaccaaccuguacaacgagcuggagaugaacuacuacggcaagcaggagaacugguacagccugaagaagaacagcagaagccugggcgagaacgacgacggcaacaacaacaacggcgacaacggcagagagggcaaggacgaggacaagagagacggcaacaacgaggacaacgagaagcugagaaagcccaagcacaagaagcugaagcagcccggcgacggcaaccccgaccccaacgccaaccccaacguggaccccaacgccaaccccaacguggaccccaacgccaaccccaacguggaccccaacgccaaccccaacgccaaccccaacgccaaccccaacgccaaccccaacgccaaccccaacgccaaccccaacgccaaccccaacgccaaccccaacgccaaccccaacgccaaccccaacgccaaccccaacgccaaccccaacgccaaccccaacgccaaccccaacgccaaccccaacgccaaccccaacgccaaccccaacgccaaccccaacguggaccccaacgccaaccccaacgccaaccccaacgccaaccccaacgccaaccccaacgccaaccccaacgccaaccccaacgccaaccccaacgccaaccccaacgccaaccccaacgccaaccccaacgccaaccccaacgccaaccccaacgccaaccccaacgccaaccccaacgccaaccccaacgccaaccccaacgccaaccccaacgccaaccccaacgccaaccccaacaagaacaaccagggcaacggccagggccacaacaugcccaacgaccccaacagaaacguggacgagaacgccaacgccaacaacgccgugaagaacaacaacaacgaggagcccagcgacaagcacaucgagcaguaccugaagaagauccagaacagccugagcaccgaguggagccccugcagcgugaccugcggcaacggcauccaggugagaaucaagcccggcagcgccggcaagagcaaggacgagcuggacuacgagaacgacaucgagaagaagaucugcaagauggagaagugcagcagcguguucaacguggugaacagcagcaucggccugaucauggugcugagcuuccuguuccugaacuga

SEQ ID NO: 4565 - RNA, 1275 nt, Artificial Sequence
  derived and/or modified CDS sequence (opt4) from Pf(T4 Thailand)__AAA29555.1__CSP
augaugagaaagcuggccauccugagcgugagcagcuuccuguucguggaggcccuguuccaggaguaccagugcuacggcagcagcagcaacaccagagugcugaacgagcugaacuacgacaacgccggcaccaaccuguacaacgagcuggagaugaacuacuacggcaagcaggagaacugguacagccugaagaagaacagcagaagccugggcgagaacgacgacggcaacaacaacaacggcgacaacaacagagagggcaaggacgaggacaagagagacggcaacaacgaggacaacgagacccugagaaagcccaagcacaagaagcugaagcagcccggcgacggcaaccccgaccccaacgccaaccccaacguggaccccaacgccaaccccaacguggaccccaacgccaaccccaacguggaccccaacgccaaccccaacgccaaccccaacgccaaccccaacgccaaccccaacgccaaccccaacgccaaccccaacgccaaccccaacgccaaccccaacgccaaccccaacgccaaccccaacgccaaccccaacgccaaccccaacgccaaccccaacgccaaccccaacgccaaccccaacgccaaccccaacgccaaccccaacgccaaccccaacgccaaccccaacgccaaccccaacgccaaccccaacgccaaccccaacgccaaccccaacgccaaccccaacgccaaccccaacgccaaccccaacgccaaccccaacgccaaccccaacgccaaccccaacgccaaccccaacgccaaccccaacgccaaccccaacgccaaccccaacgccaaccccaacgccaaccccaacgccaaccccaacgccaaccccaacgccaaccccaacaagaacaaccagggcaacggccagggccacaacaugcccaacgaccccaacagaaacguggacgagaacgccaacgccaacaacgccgugaagaacaacaacaacgaggagcccagcgacaagcacaucgagcaguaccugaagaagauccagaacagccugagcaccgaguggagccccugcagcgugaccugcggcaacggcauccaggugagaaucaagcccggcagcgccaacaagcccaaggacgagcuggacuacgagaacgacaucgagaagaagaucugcaagauggagaagugcagcagcguguucaacguggugaacagcagcaucggccugaucauggugcugagcuuccuguuccugaacuga

SEQ ID NO: 4566 - RNA, 1275 nt, Artificial Sequence
  derived and/or modified CDS sequence (opt4) from Pf(Tz03-025)__BAM84798.1__CSP
augaugagaaagcuggccauccugagcgugagcagcuuccuguucguggaggcccuguuccaggaguaccagugcuacggcagcagcagcaacaccagagugcugaacgagcugaacuacgacaacgccggcaccaaccuguacaacgagcuggagaugaacuacuacggcaagcaggagaacugguacagccugaagaagaacagcagaagccugggcgagaacgacgacggcaacaacaacaacggcgacaacggcagagagggcaaggacgaggacaagagagacggcaacaacgaggacaacgagaagcugagaaagcccaagcacaagaagcugaagcagcccgccgacggcaaccccgaccccaacgccaaccccaacguggaccccaacgccaaccccaacguggaccccaacgccaaccccaacguggaccccaacgccaaccccaacgccaaccccaacgccaaccccaacgccaaccccaacgccaaccccaacgccaaccccaacgccaaccccaacgccaaccccaacgccaaccccaacgccaaccccaacgccaaccccaacgccaaccccaacgccaaccccaacgccaaccccaacgccaaccccaacgccaaccccaacgccaaccccaacgccaaccccaacguggaccccaacgccaaccccaacgccaaccccaacgccaaccccaacgccaaccccaacgccaaccccaacgccaaccccaacgccaaccccaacgccaaccccaacgccaaccccaacgccaaccccaacgccaaccccaacgccaaccccaacgccaaccccaacgccaaccccaacgccaaccccaacgccaaccccaacgccaaccccaacgccaaccccaacgccaaccccaacaagaacaaccagggcaacggccagggccacaacaugcccaacgaccccaacagaaacguggacgagaacgccaacgccaacaacgccgugaagaacaacaacaacgaggagcccagcgaccagcacaucgagaaguaccugaagaccaucaagaacagccugagcaccgaguggagccccugcagcgugaccugcggcaacggcauccaggugagaaucaagcccggcagcgccaacaagcccaaggaccagcuggacuacgccaacgacaucgagaagaagaucugcaagauggagaagugcagcagcguguucaacguggugaacagcagcaucggccugaucauggugcugagcuuccuguuccugaacuga

SEQ ID NO: 4567 - RNA, 1272 nt, Artificial Sequence
  derived and/or modified CDS sequence (opt4) from Pf(NR62)__ADF48375.1__CSP
augagaaagcuggccauccugagcgugagcagcuuccuguucguggaggcccuguuccaggaguaccagugcuacggcagcagcagcaacaccagagugcugaacgagcugaacuacgacaacgccggcaccaaccuguacaacgagcuggagaugaacuacuacggcaagcaggagaacugguacagccugaagaagaacagcagaagccugggcgagaacgacgacggcaacaacaacaacggcgacaacggcagagagggcaaggacgaggacaagagagacggcaacaacgaggacaacgagaagcugagaaagcccaagcacaagaagcugaagcagcccggcgacggcaaccccgaccccaacgccaaccccaacguggaccccaacgccaaccccaacguggaccccaacgccaaccccaacguggaccccaacgccaaccccaacguggaccccaacgccaaccccaacgccaaccccaacgccaaccccaacgccaaccccaacgccaaccccaacgccaaccccaacgccaaccccaacgccaaccccaacgccaaccccaacgccaaccccaacgccaaccccaacgccaaccccaacgccaaccccaacgccaaccccaacgccaaccccaacgccaaccccaacgccaaccccaacgccaaccccaacgccaaccccaacgccaaccccaacgccaaccccaacgccaaccccaacgccaaccccaacgccaaccccaacgccaaccccaacgccaaccccaacgccaaccccaacgccaaccccaacgccaaccccaacgccaaccccaacgccaaccccaacgccaaccccaacgccaaccccaacgccaaccccaacgccaaccccaacgccaaccccaacaagaacaaccagggcaacggccagggccacaacaugcccaacgaccccaacagaaacguggacgagaacgccaacgccaacaacgccgugaagaacaacaacaacgaggagcccagcgacaagcacaucgagcaguaccugaagaagauccagaacagccugagcaccgaguggagccccugcagcgugaccugcggcaacggcauccaggugagaaucaagcccggcagcgccaacaagcccaaggacgagcuggacuacgagaacgacaucgagaagaagaucugcaagauggagaagugcagcagcguguucaacguggugaacagcagcaucggccugaucauggugcugagcuuccuguuccugaacuga

SEQ ID NO: 4568 - RNA, 1272 nt, Artificial Sequence
  derived and/or modified CDS sequence (opt4) from Pf(TSY673)__ACO49542.1__CSP
augagaaagcuggccauccugagcgugagcagcuuccuguucguggaggcccuguuccaggaguaccagugcuacggcagcagcagcaacaccagagugcugaacgagcugaacuacgacaacgccggcaccaaccuguacaacgagcuggagaugaacuacuacggcaagcaggagaacugguacagccugaagaagaacagcagaagccugggcgagaacgacgacggcaacaacaacaacggcgacaacggcagagagggcaaggacgaggacaagagagacggcaacaacgaggacaacgagaagcugagaaagcccaagcacaagaagcugaagcagcccggcgacggcaaccccgaccccaacgccaaccccaacguggaccccaacgccaaccccaacguggaccccaacgccaaccccaacguggaccccaacgccaaccccaacgccaaccccaacgccaaccccaacgccaaccccaacgccaaccccaacgccaaccccaacgccaaccccaacgccaaccccaacgccaaccccaacgccaaccccaacgccaaccccaacguggaccccaacgccaaccccaacgccaaccccaacgccaaccccaacgccaaccccaacgccaaccccaacgccaaccccaacgccaaccccaacgccaaccccaacgccaaccccaacgccaaccccaacgccaaccccaacgccaaccccaacgccaaccccaacgccaaccccaacgccaaccccaacgccaaccccaacgccaaccccaacgccaaccccaacgccaaccccaacgccaaccccaacgccaaccccaacgccaaccccaacgccaaccccaacgccaaccccaacgccaaccccaacgccaaccccaacaagaacaaccagggcaacggccagggccacaacaugcccaacgaccccaacagaaacguggacgagaacgccaacgccaacaacgccgugaagaacaacaacaacgaggagcccagcgacaagcacaucaccgaguaccugaagaagauccagaacagccugagcaccgaguggagccccugcagcgugaccugcggcaacggcauccaggugagaaucaagcccggcagcgccggcaagagcaaggacgagcuggacuacgagaacgacaucgagaagaagaucugcaagauggagaagugcagcagcguguucaacguggugaacagcagcaucggccugaucauggugcugagcuuccuguuccugaacuga

SEQ ID NO: 4569 - RNA, 1272 nt, Artificial Sequence
  derived and/or modified CDS sequence (opt4) from Pf(TSY688)__ACO49545.1__CSP
augagaaagcuggccauccugagcgugagcagcuuccuguucguggaggcccuguuccaggaguaccagugcuacggcagcagcagcaacaccagagugcugaacgagcugaacuacgacaacgccggcaccaaccuguacaacgagcuggagaugaacuacuacggcaagcaggagaacugguacagccugaagaagaacagcagaagccugggcgagaacgacgacggcaacaacaacaacggcgacaacggcagagagggcaaggacgaggacaagagagacggcaacaacgaggacaacgagaagcugagaaagcccaagcacaagaagcugaagcagcccggcgacggcaaccccgaccccaacgccaaccccaacguggaccccaacgccaaccccaacguggaccccaacgccaaccccaacguggaccccaacgccaaccccaacgccaaccccaacgccaaccccaacgccaaccccaacgccaaccccaacgccaaccccaacgccaaccccaacgccaaccccaacgccaaccccaacgccaaccccaacgccaaccccaacgccaaccccaacgccaaccccaacgccaaccccaacgccaaccccaacgccaaccccaacgccaaccccaacgccaaccccaacgccaaccccaacgccaaccccaacgccaaccccaacgccaaccccaacgccaaccccaacgccaaccccaacgccaaccccaacgccaaccccaacgccaaccccaacgccaaccccaacgccaaccccaacgccaaccccaacgccaaccccaacgccaaccccaacgccaaccccaacgccaaccccaacgccaaccccaacgccaaccccaacgccaaccccaacgccaaccccaacaagaacaaccagggcaacggccagggccacaacaugcccaacgaccccaacagaaacguggacgagaacgccaacgccaacaacgccgugaagaacaacaacaacgaggagcccagcgacaagcacaucgagcaguaccugaagaagauccagaacagccugagcaccgaguggagccccugcagcgugaccugcggcaacggcauccaggugagaaucaagcccggcagcgccaacaagcccaaggacgagcuggacuacgagaacgacaucgagaagaagaucugcaagauggagaagugcagcagcguguucaacguggugaacagcagcaucggccugaucauggugcugagcuuccuguuccugaacuga

SEQ ID NO: 4570 - RNA, 1263 nt, Artificial Sequence
  derived and/or modified CDS sequence (opt4) from Pf(835b)__AAA29574.1__CSP
augaugagaaagcuggccauccugagcgugagcagcuuccuguucguggaggcccuguuccaggaguaccagugcuacggcagcagcagcaacaccagagugcugaacgagcugaacuacgacaacgccggcaucaaccuguacaacgagcuggagaugaacuacuacggcaagcaggagaacugguacagccugaagaagaacagcagaagccugggcgagaacgacgacggcaacaacaacaacggcgacaacggcagagagggcaaggacgaggacaagagagacggcaacaacgaggacaacgagaagcugagaaagcccaagcacaagaagcugaagcagcccggcgacggcaaccccgaccccaacgccaaccccaacguggaccccaacgccaaccccaacguggaccccaacgccaaccccaacguggaccccaacgccaaccccaacgccaaccccaacgccaaccccaacgccaaccccaacgccaaccccaacgccaaccccaacgccaaccccaacgccaaccccaacgccaaccccaacgccaaccccaacgccaaccccaacgccaaccccaacgccaaccccaacgccaaccccaacgccaaccccaacgccaaccccaacgccaaccccaacgccaaccccaacgccaaccccaacguggaccccaacgccaaccccaacgccaaccccaacgccaaccccaacgccaaccccaacgccaaccccaacgccaaccccaacgccaaccccaacgccaaccccaacgccaaccccaacgccaaccccaacgccaaccccaacgccaaccccaacgccaaccccaacgccaaccccaacgccaaccccaacgccaaccccaacgccaaccccaacaagaacaaccagggcaacggccagggccacaacaugcccaacgaccccaacagaaacguggacgagaacgccaacgccaacaacgccgugaagaacaacaacaacgaggagcccagcgacaagcacaucaaggaguaccugaccaagauccagaacagcaucagcaccgaguggagccccugcagcgugaccugcggcaacggcauccaggugagaaucaagcccggcagcgccggcaagcccaaggacgagcuggaguacgagaacgacaucgagaagaagaucugcaagauggagaagugcagcagcguguucaacguggugaacagcagcaucggccugaucauggugcugagcuuccuguuccugaacuga

SEQ ID NO: 4571 - RNA, 1263 nt, Artificial Sequence
  derived and/or modified CDS sequence (opt4) from Pf(FCC1/HN)__AAW59565.1__CSP
augaugagaaagcuggccauccugagcgugagcagcuuccuguucguggaggcccuguuccaggaguaccagugcuacggcagcagcagcaacaccagagugcugaacgagcugaacuacgacaacgccggcaccaaccuguacaacgagcuggagaugaacuacuacggcaagcaggagaacugguacagccugaagaagaacagcagaagccugggcgagaacgacgacggcaacaacaacaacggcgacaacggcagagagggcaaggacgaggacaagagagacggcaacaacgaggacaacgagaagcugagaaagcccaagcacaagaagcugaagcagcccggcgacggcaaccccgaccccaacgccaaccccaacguggaccccaacgccaaccccaacguggaccccaacgccaaccccaacguggaccccaacgccaaccccaacgccaaccccaacgccaaccccaacgccaaccccaacgccaaccccaacgccaaccccaacgccaaccccaacgccaaccccaacgccaaccccaacgccaaccccaacgccaaccccaacgccaaccccaacgccaaccccaacgccaaccccaacgccaaccccaacgccaaccccaacgccaaccccaacgccaaccccaacgccaaccccaacgccaaccccaacgccaaccccaacgccaaccccaacgccaaccccaacgccaaccccaacgccaaccccaacgccaaccccaacgccaaccccaacgccaaccccaacgccaaccccaacgccaaccccaacgccaaccccaacgccaaccccaacgccaaccccaacgccaaccccaacgccaaccccaacgccaaccccaacgccaaccccaacaagaacaaccagggcaacggccagggccacaacaugcccaacgaccccaacagaaacguggacgagaacgccaacgccaacaacgccgugaagaacaacaacaacgaggagcccagcgacaagcacaucgagcaguaccugaagaagauccagaacagccugagcaccgaguggagccccugcagcgugaccugcggcaacggcauccaggccagaaucaagcccggcagcgccaacaagcccaaggacgagcuggacuacgagaacgacaucgagaagaagaucugcaagauggagaagugcagcagcguguucaacguggugaacagcagcaucggccugaucauggugcugagcuuccuguuccugaacuga

SEQ ID NO: 4572 - RNA, 1263 nt, Artificial Sequence
  derived and/or modified CDS sequence (opt4) from Pf(K1)__AAA29552.1__CSP
augaugagaaagcuggccauccugagcgugagcagcuuccuguucguggaggcccuguuccaggaguaccagugcuacggcagcagcagcaacaccagagugcugaacgagcugaacuacgacaacgccggcaucaaccuguacaacgagcuggagaugaacuacuacggcaagcaggagaacugguacagccugaagaagaacagcagaagccugggcgagaacgacgacggcaacaacaacaacggcgacaacggcagagagggcaaggacgaggacaagagagacggcaacaacgaggacaacgagaagcugagaaagcccaagcacaagaagcugaagcagcccggcgacggcaaccccgaccccaacgccaaccccaacguggaccccaacgccaaccccaacguggaccccaacgccaaccccaacguggaccccaacgccaaccccaacgccaaccccaacgccaaccccaacgccaaccccaacgccaaccccaacgccaaccccaacgccaaccccaacgccaaccccaacgccaaccccaacgccaaccccaacguggaccccaacgccaaccccaacgccaaccccaacgccaaccccaacgccaaccccaacgccaaccccaacgccaaccccaacgccaaccccaacgccaaccccaacgccaaccccaacgccaaccccaacgccaaccccaacgccaaccccaacgccaaccccaacgccaaccccaacgccaaccccaacgccaaccccaacgccaaccccaacgccaaccccaacgccaaccccaacgccaaccccaacgccaaccccaacgccaaccccaacgccaaccccaacgccaaccccaacgccaaccccaacgccaaccccaacaagaacaaccagggcaacggccagggccacaacaugcccaacgaccccaacagaaacguggacgagaacgccaacgccaacaacgacgugaagaacaacaacaacgaggagcccagcgacaagcacaucgagcaguaccugaagaagauccaguacagccugagcaccgaguggagccccugcagcgugaccugcggcaacggcauccaggugagaaucaagcccggcagcgccgacaagcccaaggaccagcuggacuacgagaacgacaucgagaagaagaucugcaagauggagaagugcagcagcguguucaacguggugaacagcagcaucggccugaucauggugcugagcuuccuguuccugaacuga

SEQ ID NO: 4573 - RNA, 1263 nt, Artificial Sequence
  derived and/or modified CDS sequence (opt4) from Pf(K1)__BAD73952.1__CSP
augaugagaaagcuggccauccugagcgugagcagcuuccuguucguggaggcccuguuccaggaguaccagugcuacggcagcagcagcaacaccagagugcugaacgagcugaacuacgacaacgccggcaccaaccuguacaacgagcuggagaugaacuacuacggcaagcaggagaacugguacagccugaagaagaacagcagaagccugggcgagaacgacgacggcaacaacaacaacggcgacaacggcagagagggcaaggacgaggacaagagagacggcaacaacgaggacaacgagaagcugagaaagcccaagcacaagaagcugaagcagcccggcgacggcaaccccgaccccaacgccaaccccaacguggaccccaacgccaaccccaacguggaccccaacgccaaccccaacguggaccccaacgccaaccccaacgccaaccccaacgccaaccccaacgccaaccccaacgccaaccccaacgccaaccccaacgccaaccccaacgccaaccccaacgccaaccccaacgccaaccccaacguggaccccaacgccaaccccaacgccaaccccaacgccaaccccaacgccaaccccaacgccaaccccaacgccaaccccaacgccaaccccaacgccaaccccaacgccaaccccaacgccaaccccaacgccaaccccaacgccaaccccaacgccaaccccaacgccaaccccaacgccaaccccaacgccaaccccaacgccaaccccaacgccaaccccaacgccaaccccaacgccaaccccaacgccaaccccaacgccaaccccaacgccaaccccaacgccaaccccaacgccaaccccaacgccaaccccaacaagaacaaccagggcaacggccagggccacaacaugcccaacgaccccaacagaaacguggacgagaacgccaacgccaacaacgacgugaagaacaacaacaacgaggagcccagcgacaagcacaucgagcaguaccugaagaagauccaguacagccugagcaccgaguggagccccugcagcgugaccugcggcaacggcauccaggugagaaucaagcccggcagcgccgacaagcccaaggaccagcuggacuacgagaacgacaucgagaagaagaucugcaagauggagaagugcagcagcguguucaacguggugaacagcagcaucggccugaucauggugcugagcuuccuguuccugaacuga

SEQ ID NO: 4574 - RNA, 1263 nt, Artificial Sequence
  derived and/or modified CDS sequence (opt4) from Pf(Pal97-074)__BAM84944.1__CSP
augaugagaaagcuggccauccugagcgugagcagcuuccuguucguggaggcccuguuccaggaguaccagugcuacggcagcagcagcaacaccagagugcugaacgagcugaacuacgacaacgccggcaccaaccuguacaacgagcuggagaugaacuacuacggcaagcaggagaacugguacagccugaagaagaacagcagaagccugggcgagaacgacgacggcaacaacaacaacggcgacaacggcagagagggcaaggacgaggacaagagagacggcaacaacgaggacaacgagaagcugagaaagcccaagcacaagaagcugaagcagcccguggacggcaaccccgaccccaacgccaaccccaacguggaccccaacgccaaccccaacguggaccccaacgccaaccccaacguggaccccaacgccaaccccaacgccaaccccaacgccaaccccaacgccaaccccaacgccaaccccaacgccaaccccaacgccaaccccaacgccaaccccaacgccaaccccaacgccaaccccaacgccaaccccaacgccaaccccaacgccaaccccaacgccaaccccaacgccaaccccaacgccaaccccaacgccaaccccaacgccaaccccaacgccaaccccaacgccaaccccaacgccaaccccaacgccaaccccaacgccaaccccaacgccaaccccaacgccaaccccaacgccaaccccaacgccaaccccaacgccaaccccaacgccaaccccaacgccaaccccaacgccaaccccaacgccaaccccaacgccaaccccaacgccaaccccaacgccaaccccaacgccaaccccaacgccaaccccaacaagaacaaccagggcaacggccagggccacaacaugcccaacgaccccaacagaaacguggacgagaacgccaacgccaacaacgccgugaagaacaacaacaacgaggagcccagcgaccagcacaucgagaaguaccugaagaucauccagaacagccugagcaccgaguggagccccugcagcgugaccugcggcaacggcauccaggugagaaucaagcccggcagcgccgacaagcccaaggaccagcuggacuacgccaacgacaucgagaagaagaucugcaagauggagaagugcagcagcguguucaacguggugaacagcagcaucggccugaucauggugcugagcuuccuguuccugaacuga

SEQ ID NO: 4575 - RNA, 1263 nt, Artificial Sequence
  derived and/or modified CDS sequence (opt4) from Pf(Pal97-108)__BAM84957.1__CSP
augaugagaaagcuggccauccugagcgugagcagcuuccuguucguggaggcccuguuccaggaguaccagugcuacggcagcagcagcaacaccagagugcugaacgagcugaacuacgacaacgccggcaccaaccuguacaacgagcuggagaugaacuacuacggcaagcaggagaacugguacagccugaagaagaacagcagaagccugggcgagaacgacgacggcaacaacaacaacggcgacaacggcagagagggcaaggacgaggacaagagagacggcaacaacgaggacaacgagaagcugagaaagcccaagcacaagaagcugaagcagcccggcgacggcaaccccgaccccaacgccaaccccaacguggaccccaacgccaaccccaacguggaccccaacgccaaccccaacguggaccccaacgccaaccccaacgccaaccccaacgccaaccccaacgccaaccccaacgccaaccccaacgccaaccccaacgccaaccccaacgccaaccccaacgccaaccccaacgccaaccccaacgccaaccccaacgccaaccccaacgccaaccccaacgccaaccccaacgccaaccccaacgccaaccccaacgccaaccccaacgccaaccccaacgccaaccccaacgccaaccccaacgccaaccccaacgccaaccccaacgccaaccccaacgccaaccccaacgccaaccccaacgccaaccccaacgccaaccccaacgccaaccccaacgccaaccccaacgccaaccccaacgccaaccccaacgccaaccccaacgccaaccccaacgccaaccccaacgccaaccccaacgccaaccccaacgccaaccccaacaagaacaaccagggcaacggccagggccacaacaugcccaacgaccccaacagaaacguggacgagaacgccaacgccaacaacgccgugaagaacaacaacaacgaggagcccagcgacaagcacaucaaggaguaccugaccaagauccagaacagcaucagcaccgaguggagccccugcagcgugaccugcggcaacggcauccaggugagaaucaagcccggcagcgccggcaagcccaaggacgagcugaacuacgagaacgacaucgagaagaagaucugcaagauggagaagugcagcagcguguucaacguggugaacagcagcaucggccugaucauggugcugagcuuccuguuccugaacuga

SEQ ID NO: 4576 - RNA, 1263 nt, Artificial Sequence
  derived and/or modified CDS sequence (opt4) from Pf(PNG225-053)__BAM85032.1__CSP
augaugagaaagcuggccauccugagcgugagcagcuuccuguucguggaggcccuguuccaggaguaccagugcuacggcagcagcagcaacaccagagugcugaacgagcugaacuacgacaacgccggcaccaaccuguacaacgagcuggagaugaacuacuacggcaagcaggagaacugguacagccugaagaagaacagcagaagccugggcgagaacgacgacggcaacaacaacaacggcgacaacggcagagagggcaaggacgaggacaagagagacggcaacaacgaggacaacgagaagcugagaaagcccaagcacaagaagcugaagcagcccggcgacggcaaccccgaccccaacgccaaccccaacguggaccccaacgccaaccccaacguggaccccaacgccaaccccaacguggaccccaacgccaaccccaacgccaaccccaacgccaaccccaacgccaaccccaacgccaaccccaacgccaaccccaacgccaaccccaacgccaaccccaacgccaaccccaacgccaaccccaacgccaaccccaacgccaaccccaacgccaaccccaacgccaaccccaacgccaaccccaacgccaaccccaacgccaaccccaacgccaaccccaacgccaaccccaacgccaaccccaacgccaaccccaacgccaaccccaacgccaaccccaacgccaaccccaacgccaaccccaacgccaaccccaacgccaaccccaacgccaaccccaacgccaaccccaacgccaaccccaacgccaaccccaacgccaaccccaacgccaaccccaacgccaaccccaacgccaaccccaacgccaaccccaacgccaaccccaacaagaacaaccagggcaacggccagggccacaacaugcccaacgaccccaacagaaacguggacgagaacgccaacgccaacaacgccgugaagaacaacaacaacgaggagcccagcgacaagcacaucgagcaguaccugaagaagauccagaacagccugagcaccgaguggagccccugcagcgugaccugcggcaacggcauccaggugagaaucaagcccggcagcgccaacaagcccaaggacgagcuggacuacgagaacgacaucgagaagaagaucugcaagauggagaagugcagcagcguguucaacguggugaacagcagcaucggccugaucauggugcugagcuuccuguuccugaacuga

SEQ ID NO: 4577 - RNA, 1263 nt, Artificial Sequence
  derived and/or modified CDS sequence (opt4) from Pf(Sol95-113)__BAM85062.1__CSP
augaugagaaagcuggccauccugagcgugagcagcuuccuguucguggaggcccuguuccaggaguaccagugcuacggcagcagcagcaacaccagagugcugaacgagcugaacuacgacaacgccggcaccaaccuguacaacgagcuggagaugaacuacuacggcaagcaggagaacugguacagccugaagaagaacagcagaagccugggcgagaacgacgacggcaacaacaacaacggcgacaacggcagagagggcaaggacgaggacaagagagacggcaacaacgaggacaacgagaagcugagaaagcccaagcacaagaagcugaagcagcccggcgacggcaaccccgaccccaacgccaaccccaacguggaccccaacgccaaccccaacguggaccccaacgccaaccccaacguggaccccaacgccaaccccaacguggaccccaacgccaaccccaacgccaaccccaacgccaaccccaacgccaaccccaacgccaaccccaacgccaaccccaacgccaaccccaacgccaaccccaacgccaaccccaacgccaaccccaacgccaaccccaacgccaaccccaacgccaaccccaacgccaaccccaacgccaaccccaacgccaaccccaacgccaaccccaacgccaaccccaacgccaaccccaacgccaaccccaacgccaaccccaacgccaaccccaacgccaaccccaacgccaaccccaacgccaaccccaacgccaaccccaacgccaaccccaacgccaaccccaacgccaaccccaacgccaaccccaacgccaaccccaacgccaaccccaacgccaaccccaacgccaaccccaacgccaaccccaacaagaacaaccagggcaacggccagggccacaacaugcccaacgaccccaacagaaacguggacgagaacgccaacgccaacaacgccgugaagaacaacaacaacgaggagcccagcgacaagcacaucgagcaguaccugaagaagauccagaacagccugagcaccgaguggagccccugcagcgugaccugcggcaacggcauccaggugagaaucaagcccggcagcgccaacaagcccaaggacgagcuggacuacgagaacgacaucgagaagaagaucugcaagauggagaagugcagcagcguguucaacguggugaacagcagcaucggccugaucauggugcugagcuuccuguuccugaacuga

SEQ ID NO: 4578 - RNA, 1263 nt, Artificial Sequence
  derived and/or modified CDS sequence (opt4) from Pf(Sol95-328)__BAM85093.1__CSP
augaugagaaagcuggccauccugagcgugagcagcuuccuguucguggaggcccuguuccaggaguaccagugcuacggcagcagcagcaacaccagagugcugaacgagcugaacuacgacaacgccggcaccaaccuguacaacgagcuggagaugaacuacuacggcaagcaggagaacugguacagccugaagaagaacagcagaagccugggcgagaacgacgacggcaacaacaacaacggcgacaacggcagagagggcaaggacgaggacaagagagacggcaacaacgaggacaacgagaagcugagaaagcccaagcacaagaagcugaagcagcccggcgacggcaaccccgaccccaacgccaaccccaacguggaccccaacgccaaccccaacguggaccccaacgccaaccccaacguggaccccaacgccaaccccaacgccaaccccaacgccaaccccaacgccaaccccaacgccaaccccaacgccaaccccaacgccaaccccaacgccaaccccaacgccaaccccaacgccaaccccaacgccaaccccaacgccaaccccaacgccaaccccaacgccaaccccaacgccaaccccaacgccaaccccaacgccaaccccaacguggaccccaacgccaaccccaacgccaaccccaacgccaaccccaacgccaaccccaacgccaaccccaacgccaaccccaacgccaaccccaacgccaaccccaacgccaaccccaacgccaaccccaacgccaaccccaacgccaaccccaacgccaaccccaacgccaaccccaacgccaaccccaacgccaaccccaacgccaaccccaacgccaaccccaacgccaaccccaacaagaacaaccagggcaacggccagggccacaacaugcccaacgaccccaacagaaacguggacgagaacgccaacgccaacaacgccgugaagaacaacaacaacgaggagcccagcgacaagcacaucgagcaguaccugaagaagauccagaacagccugagcaccgaguggagccccugcagcgugaccugcggcaacggcauccaggugagaaucaagcccggcagcgccgacaagcccaaggaccagcuggacuacgagaacgacaucgagaagaagaucugcaagauggagaagugcagcagcguguucaacguggugaacagcagcaucggccugaucauggugcugagcuuccuguuccugaacuga

SEQ ID NO: 4579 - RNA, 1263 nt, Artificial Sequence
  derived and/or modified CDS sequence (opt4) from Pf(TiMS95-208)__BAM84896.1__CSP
augaugagaaagcuggccauccugagcgugagcagcuuccuguucguggaggcccuguuccaggaguaccagugcuacggcagcagcagcaacaccagagugcugaacgagcugaacuacgacaacgccggcaccaaccuguacaacgagcuggagaugaacuacuacggcaagcaggagaacugguacagccugaagaagaacagcagaagccugggcgagaacgacgacggcaacaacaacaacggcgacaacggcagagagggcaaggacgaggacaagagagacggcaacaacgaggacaacgagaagcugagaaagcccaagcacaagaagcugaagcagcccggcgacggcaaccccgaccccaacgccaaccccaacguggaccccaacgccaaccccaacguggaccccaacgccaaccccaacguggaccccaacgccaaccccaacgccaaccccaacgccaaccccaacgccaaccccaacgccaaccccaacgccaaccccaacgccaaccccaacgccaaccccaacgccaaccccaacgccaaccccaacgccaaccccaacgccaaccccaacgccaaccccaacgccaaccccaacgccaaccccaacgccaaccccaacgccaaccccaacgccaaccccaacgccaaccccaacgccaaccccaacgccaaccccaacgccaaccccaacgccaaccccaacgccaaccccaacgccaaccccaacgccaaccccaacgccaaccccaacgccaaccccaacgccaaccccaacgccaaccccaacgccaaccccaacgccaaccccaacgccaaccccaacgccaaccccaacgccaaccccaacgccaaccccaacgccaaccccaacaagaacaaccagggcaacggccagggccacaacaugcccaacgaccccaacagaaacguggacgagaacgccaacgccaacaacgacgugaagaacaacaacaacgaggagcccagcgacaagcacaucgagcaguaccugaagaagauccaguacagccugagcaccgaguggagccccugcagcgugaccugcggcaacggcauccaggugagaaucaagcccggcagcgccgacaagcccaaggaccagcuggacuacgagaacgacaucgagaagaagaucugcaagauggagaagugcagcagcguguucaacguggugaacagcagcaucggccugaucauggugcugagcuuccuguuccugaacuga

SEQ ID NO: 4580 - RNA, 1263 nt, Artificial Sequence
  derived and/or modified CDS sequence (opt4) from Pf(TiMS95-260)__BAM84907.1__CSP
augaugagaaagcuggccauccugagcgugagcagcuuccuguucguggaggcccuguuccaggaguaccagugcuacggcagcagcagcaacaccagagugcugaacgagcugaacuacgacaacgccggcaccaaccuguacaacgagcuggagaugaacuacuacggcaagcaggagaacugguacagccugaagaagaacagcagaagccugggcgagaacgacgacggcaacaacaacaacggcgacaacggcagagagggcaaggacgaggacaagagagacggcaacaacgaggacaacgagaagcugagaaagcccaagcacaagaagcugaagcagcccggcgacggcaaccccgaccccaacgccaaccccaacguggaccccaacgccaaccccaacguggaccccaacgccaaccccaacguggaccccaacgccaaccccaacgccaaccccaacgccaaccccaacgccaaccccaacgccaaccccaacgccaaccccaacgccaaccccaacgccaaccccaacgccaaccccaacgccaaccccaacgccaaccccaacgccaaccccaacgccaaccccaacgccaaccccaacgccaaccccaacgccaaccccaacgccaaccccaacgccaaccccaacgccaaccccaacguggaccccaacgccaaccccaacgccaaccccaacgccaaccccaacgccaaccccaacgccaaccccaacgccaaccccaacgccaaccccaacgccaaccccaacgccaaccccaacgccaaccccaacgccaaccccaacgccaaccccaacgccaaccccaacgccaaccccaacgccaaccccaacgccaaccccaacgccaaccccaacaagaacaaccagggcaacggccagggccacaacaugcccaacgaccccaacagaaacguggacgagaacgccaacgccaacaacgccgugaagaacaacaacaacgaggagcccagcgacaagcacaucaaggaguaccugaccaagauccagaacagcaucagcaccgaguggagccccugcagcgugaccugcggcaacggcauccaggugagaaucaagcccggcagcgccggcaagcccaaggacgagcugaacuacgagaacgacaucgagaagaagaucugcaagauggagaagugcagcagcguguucaacguggugaacagcagcaucggccugaucauggugcugagcuuccuguuccugaacuga

SEQ ID NO: 4581 - RNA, 1263 nt, Artificial Sequence
  derived and/or modified CDS sequence (opt4) from Pf(Tz93-030)__BAM84756.1__CSP
augaugagaaagcuggccauccugagcgugagcagcuuccuguucguggaggcccuguuccaggaguaccagugcuacggcagcagcagcaacaccagagugcugaacgagcugaacuacgacaacgccggcaccaaccuguacaacgagcuggagaugaacuacuacggcaagcaggagaacugguacagccugaagaagaacagcagaagccugggcgagaacgacgacggcaacaacaacaacggcgacaacggcagagagggcaaggacgaggacaagagagacggcaacaacgaggacaacgagaagcugagaaagcccaagcacaagaagcugaagcagcccggcgacggcaaccccgaccccaacgccaaccccaacguggaccccaacgccaaccccaacguggaccccaacgccaaccccaacguggaccccaacgccaaccccaacgccaaccccaacgccaaccccaacgccaaccccaacgccaaccccaacgccaaccccaacgccaaccccaacgccaaccccaacgccaaccccaacgccaaccccaacgccaaccccaacgccaaccccaacgccaaccccaacgccaaccccaacgccaaccccaacgccaaccccaacguggaccccaacgccaaccccaacgccaaccccaacgccaaccccaacgccaaccccaacgccaaccccaacgccaaccccaacgccaaccccaacgccaaccccaacgccaaccccaacgccaaccccaacgccaaccccaacgccaaccccaacgccaaccccaacgccaaccccaacgccaaccccaacgccaaccccaacgccaaccccaacgccaaccccaacgccaaccccaacgccaaccccaacaagaacaaccagggcaacggccagggccacaacaugcccaacgaccccaacagaaacguggacgagaacgccaacgccaacaacgccgugaagaacaacaacaacgaggagcccagcgacaagcacaucaaggaguaccugaacaagauccagaacagcaucagcaccgaguggagccccugcagcgugaccugcggcaacggcauccaggugagaaucaagcccggcagcgccgacaagcccaaggaccagcuggacuacaucaacgacaucgagaagaagaucugcaagauggagaagugcagcagcguguucaacguggugaacagcagcaucggccugaucauggugcugagcuuccuguuccugaacuga

SEQ ID NO: 4582 - RNA, 1263 nt, Artificial Sequence
  derived and/or modified CDS sequence (opt4) from Pf(Tz93-038)__BAM84758.1__CSP
augaugagaaagcuggccauccugagcgugagcagcuuccuguucguggaggcccuguuccaggaguaccagugcuacggcagcagcagcaacaccagagugcugaacgagcugaacuacgacaacgccggcaccaaccuguacaacgagcuggagaugaacuacuacggcaagcaggagaacugguacagccugaagaagaacagcagaagccugggcgagaacgacgacggcaacaacaacaacggcgacaacggcagagagggcaaggacgaggacaagagagacggcaacaacgaggacaacgagaagcugagaaagcccaagcacaagaagcugaagcagcccggcgacggcaaccccgaccccaacgccaaccccaacguggaccccaacgccaaccccaacguggaccccaacgccaaccccaacguggaccccaacgccaaccccaacgccaaccccaacgccaaccccaacgccaaccccaacgccaaccccaacgccaaccccaacgccaaccccaacgccaaccccaacgccaaccccaacgccaaccccaacgccaaccccaacgccaaccccaacgccaaccccaacgccaaccccaacgccaaccccaacgccaaccccaacgccaaccccaacguggaccccaacgccaaccccaacgccaaccccaacgccaaccccaacgccaaccccaacgccaaccccaacgccaaccccaacgccaaccccaacgccaaccccaacgccaaccccaacgccaaccccaacgccaaccccaacgccaaccccaacgccaaccccaacgccaaccccaacgccaaccccaacgccaaccccaacgccaaccccaacgccaaccccaacgccaaccccaacaagaacaaccagggcaacggccagggccacaacaugcccaacgaccccaacagaaacguggacgagaacgccaacgccaacaacgccgugaagaacaacaacaacgaggagcccagcgacaagcacaucaaggaguaccugaacaagauccagaacagcaucagcaccgaguggagccccugcagcgugaccugcggcaacggcauccaggugagaaucaagcccggcagcgccgacaagcccaaggaccagcuggacuacaucaacgacaucgagaagaagaucugcaagauggagaagugcagcagcguguucaacguggugaacagcagcaucggccugaucauggugcugagcuuccuguuccugaacuga

SEQ ID NO: 4583 - RNA, 1260 nt, Artificial Sequence
  derived and/or modified CDS sequence (opt4) from Pf(TMS31)__ACO49480.1__CSP
augagaaagcuggccauccugagcgugagcagcuuccuguucguggaggcccuguuccaggaguaccagugcuacggcagcagcagcaacaccagagugcugaacgagcugaacuacgacaacgccggcaccaaccuguacaacgagcuggagaugaacuacuacggcaagcaggagaacugguacagccugaagaagaacagcagaagccugggcgagaacgacgacggcaacaacaacaacggcgacaacggcagagagggcaaggacgaggacaagagagacggcaacaacgaggacaacgagaagcugagaaagcccaagcacaagaagcugaagcagcccggcgacggcaaccccgaccccaacgccaaccccaacguggaccccaacgccaaccccaacguggaccccaacgccaaccccaacguggaccccaacgccaaccccaacgccaaccccaacgccaaccccaacgccaaccccaacgccaaccccaacgccaaccccaacgccaaccccaacgccaaccccaacgccaaccccaacgccaaccccaacgccaaccccaacgccaaccccaacgccaaccccaacgccaaccccaacgccaaccccaacgccaaccccaacgccaaccccaacgccaaccccaacgccaaccccaacgccaaccccaacgccaaccccaacgccaaccccaacgccaaccccaacgccaaccccaacgccaaccccaacgccaaccccaacgccaaccccaacgccaaccccaacgccaaccccaacgccaaccccaacgccaaccccaacgccaaccccaacgccaaccccaacgccaaccccaacgccaaccccaacgccaaccccaacgccaaccccaacaagaacaaccagggcaacggccagggccacaacaugcccaacgaccccaacagaaacguggacgagaacgccaacgccaacaacgccgugaagaacaacaacaacgaggagcccagcgacaagcacaucgagcaguaccugaagaagaugcagaacagccugagcaccgaguggagccccugcagcgugaccugcggcaacggcauccaggugagaaucaagcccggcagcgccaacaagcccaaggacgagcuggacuacgagaacgacaucgagaagaagaucugcaagauggagaagugcagcagcguguucaacguggugaacagcagcaucggccugaucauggugcugagcuuccuguuccugaacuga

SEQ ID NO: 4584 - RNA, 1260 nt, Artificial Sequence
  derived and/or modified CDS sequence (opt4) from Pf(TSY172)__ACO49517.1__CSP
augagaaagcuggccauccugagcgugagcagcuuccuguucguggaggcccuguuccaggaguaccagugcuacggcagcagcagcaacaccagagugcugaacgagcugaacuacgacaacgccggcaccaaccuguacaacgagcuggagaugaacuacuacggcaagcaggagaacugguacagccugaagaagaacagcagaagccugggcgagaacgacgacggcaacaacaacaacggcgacaacggcagagagggcaaggacgaggacaagagagacggcaacaacgaggacaacgagaagcugagaaagcccaagcacaagaagcugaagcagcccggcgacggcaaccccgaccccaacgccaaccccaacguggaccccaacgccaaccccaacguggaccccaacgccaaccccaacguggaccccaacgccaaccccaacgccaaccccaacgccaaccccaacgccaaccccaacgccaaccccaacgccaaccccaacgccaaccccaacgccaaccccaacgccaaccccaacgccaaccccaacgccaaccccaacgccaaccccaacgccaaccccaacgccaaccccaacgccaaccccaacgccaaccccaacgccaaccccaacgccaaccccaacgccaaccccaacgccaaccccaacgccaaccccaacgccaaccccaacgccaaccccaacgccaaccccaacgccaaccccaacgccaaccccaacgccaaccccaacgccaaccccaacgccaaccccaacgccaaccccaacgccaaccccaacgccaaccccaacgccaaccccaacgccaaccccaacgccaaccccaacgccaaccccaacgccaaccccaacaagaacaaccagggcaacggccagggccacaacaugcccaacgaccccaacagaaacguggacgagaacgccaacgccaacaacgccgugaagaacaacaacaacgaggagcccagcgacaagcacaucgagcaguaccugaagaagauccagaacagccugagcaccgaguggagccccugcagcgugaccugcggcaacggcauccaggugagaaucaagcccggcagcgccaacaagcccaaggacgagcuggacuacgagaacgacaucgagaagaagaucugcaagauggagaagugcagcagcguguucaacguggugaacagcagcaucggccugaucauggugcugagcuuccuguuccugaacuga

SEQ ID NO: 4585 - RNA, 1251 nt, Artificial Sequence
  derived and/or modified CDS sequence (opt4) from Pf(Asembo Bay)__AAN87591.1__CSP
augaugagaaagcuggccauccugagcgugagcagcuuccuguucguggaggcccuguuccaggaguaccagugcuacggcagcagcagcaacaccagagugcugaacgagcugaacuacgacaacgccggcaccaaccuguacaacgagcuggagaugaacuacuacggcaagcaggagaacugguacagccugaagaagaacagcagaagccugggcgagaacgacgacggcaacaacaacaacggcgacaacggcagagagggcaaggacgaggacaagagagacggcaacaacgaggacaacgagaagcugagaaagcccaagcacaagaagcugaagcagcccggcgacggcaaccccgaccccaacgccaaccccaacguggaccccaacgccaaccccaacguggaccccaacgccaaccccaacguggaccccaacgccaaccccaacgccaaccccaacgccaaccccaacgccaaccccaacgccaaccccaacgccaaccccaacgccaaccccaacgccaaccccaacgccaaccccaacgccaaccccaacgccaaccccaacgccaaccccaacgccaaccccaacgccaaccccaacgccaaccccaacgccaaccccaacgccaaccccaacguggaccccaacgccaaccccaacgccaaccccaacgccaaccccaacgccaaccccaacgccaaccccaacgccaaccccaacgccaaccccaacgccaaccccaacgccaaccccaacgccaaccccaacgccaaccccaacgccaaccccaacgccaaccccaacgccaaccccaacgccaaccccaacgccaaccccaacgccaaccccaacgccaaccccaacaagaacaaccagggcaacggccagggccacaacaugcccaacgaccccaacagaaacguggacgagaacgccaacgccaacaacgccgugaagaacaacaacaacgaggagcccagcgaccagcacaucgagaaguaccugaagaccauccagaacagccugagcaccgaguggagccccugcagcgugaccugcggcaacggcauccaggugagaaucaagcccggcagcgccaacaagcccaaggaccagcuggacuacgccaacgacaucgagaagaagaucugcaagauggagaagugcagcagcguguucaacguggugaacagcagcaucggccugaucauggugcugagcuuccuguuccugaacuga

SEQ ID NO: 4586 - RNA, 1251 nt, Artificial Sequence
  derived and/or modified CDS sequence (opt4) from Pf(Asembo Bay)__AAN87590.1__CSP
augaugagaaagcuggccauccugagcgugagcagcuuccuguucguggaggcccuguuccaggaguaccagugcuacggcagcagcagcaacaccagagugcugaacgagcugaacuacgacaacgccggcaccaaccuguacaacgagcuggagaugaacuacuacggcaagcaggagaacugguacagccugaagaagaacagcagaagccugggcgagaacgacgacggcaacaacaacaacggcgacaacggcagagagggcaaggacgaggacaagagagacggcaacaacgaggacaacgagaagcugagaaagcccaagcacaagaagcugaagcagcccggcgacggcaaccccgaccccaacgccaaccccaacguggaccccaacgccaaccccaacguggaccccaacgccaaccccaacguggaccccaacgccaaccccaacgccaaccccaacgccaaccccaacgccaaccccaacgccaaccccaacgccaaccccaacgccaaccccaacgccaaccccaacgccaaccccaacgccaaccccaacgccaaccccaacgccaaccccaacguggaccccaacgccaaccccaacgccaaccccaacgccaaccccaacgccaaccccaacgccaaccccaacgccaaccccaacgccaaccccaacgccaaccccaacgccaaccccaacgccaaccccaacgccaaccccaacgccaaccccaacgccaaccccaacgccaaccccaacgccaaccccaacgccaaccccaacgccaaccccaacgccaaccccaacgccaaccccaacgccaaccccaacgccaaccccaacgccaaccccaacgccaaccccaacaagaacaaccagggcaacggccagggccacaacaugcccaacgaccccaacagaaacguggacgagaacgccaacgccaacaacgccgugaagaacaacaacaacgaggagcccagcgaccagcacaucgagaaguaccugaagaccauccagaacagccugagcaccgaguggagccccugcagcgugaccugcggcaacggcauccaggugagaaucaagcccggcagcgccaacaagcccaaggaccagcuggacuacgccaacgacaucgagaagaagaucugcaagauggagaagugcagcagcguguucaacguggugaacagcagcaucggccugaucauggugcugagcuuccuguuccugaacuga

SEQ ID NO: 4587 - RNA, 1251 nt, Artificial Sequence
  derived and/or modified CDS sequence (opt4) from Pf(Gha1108-097)__BAM84820.1__CSP
augaugagaaagcuggccauccugagcgugagcagcuuccuguucguggaggcccuguuccaggaguaccagugcuacggcagcagcagcaacaccagagugcugaacgagcugaacuacgacaacgccggcaccaaccuguacaacgagcuggagaugaacuacuacggcaagcaggagaacugguacagccugaagaagaacggcagaagccugggcgagaacgacgacggcaacaacaacaacggcgacaacggcagagagggcaaggacgaggacaagagagacggcaacaacgaggacaacgagaagcugagaaagcccaagcacaagaagcugaagcagcccgccgacggcaaccccgaccccaacgccaaccccaacguggaccccaacgccaaccccaacguggaccccaacgccaaccccaacguggaccccaacgccaaccccaacgccaaccccaacgccaaccccaacgccaaccccaacgccaaccccaacgccaaccccaacgccaaccccaacgccaaccccaacgccaaccccaacgccaaccccaacgccaaccccaacgccaaccccaacgccaaccccaacgccaaccccaacgccaaccccaacgccaaccccaacguggaccccaacgccaaccccaacgccaaccccaacgccaaccccaacgccaaccccaacgccaaccccaacgccaaccccaacgccaaccccaacgccaaccccaacgccaaccccaacgccaaccccaacgccaaccccaacgccaaccccaacgccaaccccaacgccaaccccaacgccaaccccaacgccaaccccaacgccaaccccaacgccaaccccaacgccaaccccaacaagaacaaccagggcaacggccagggccacaacaugcccaacgaccccaacagaaacguggacgagaacgccaacgccaacaacggcgugaagaacaacaacaacgaggagcccagcgacaagcacaucgagcaguaccugaagagaauccagaacagccugagcaccgaguggagccccugcagcgugaccugcggcaacggcauccaggugagaaucaagcccggcagcgccaacaagcccaaggacgagcugaacuacgagaacgacaucgagaagaagaucugcaagauggagaagugcagcagcguguucaacguggugaacagcagcaucggccugaucauggugcugagcuuccuguuccugaacuga

SEQ ID NO: 4588 - RNA, 1251 nt, Artificial Sequence
  derived and/or modified CDS sequence (opt4) from Pf(MAD20)__AAA29550.1__CSP
augaugagaaagcuggccauccugagcgugagcagcuuccuguucguggaggcccuguuccaggaguaccagugcuacggcagcagcagcaacaccagagugcugaacgagcugaacuacgacaacgccggcaucaaccuguacaacgagcuggagaugaacuacuacggcaagcaggagaacugguacagccugaagaagaacagcagaagccugggcgagaacgacgacggcaacaacaacaacggcgacaacggcagagagggcaaggacgaggacaagagagacggcaacaacgaggacaacgagaagcugagaaagcccaagcacaagaagcugaagcagcccggcgacggcaaccccgaccccaacgccaaccccaacguggaccccaacgccaaccccaacguggaccccaacgccaaccccaacguggaccccaacgccaaccccaacgccaaccccaacgccaaccccaacgccaaccccaacgccaaccccaacgccaaccccaacgccaaccccaacgccaaccccaacgccaaccccaacgccaaccccaacgccaaccccaacgccaaccccaacgccaaccccaacgccaaccccaacgccaaccccaacgccaaccccaacguggaccccaacgccaaccccaacgccaaccccaacgccaaccccaacgccaaccccaacgccaaccccaacgccaaccccaacgccaaccccaacgccaaccccaacgccaaccccaacgccaaccccaacgccaaccccaacgccaaccccaacgccaaccccaacgccaaccccaacgccaaccccaacgccaaccccaacgccaaccccaacgccaaccccaacgccaaccccaacaagaacaaccagggcaacggccagggccacaacaugcccaacgaccccaacagaaacguggacgagaacgccaacgccaacaacgccgugaagaacaacaacaacgaggagcccagcgacaagcacaucgagcaguaccugaagaagauccagaacagccugagcaccgaguggagccccugcagcgugaccugcggcaacggcauccaggugagaaucaagcccggcagcgccgacaagcccaaggaccagcuggacuacgagaacgacaucgagaagaagaucugcaagauggagaagugcagcagcguguucaacguggugaacagcagcaucggccugaucauggugcugagcuuccuguuccugaacuga

SEQ ID NO: 4589 - RNA, 1251 nt, Artificial Sequence
  derived and/or modified CDS sequence (opt4) from Pf(Pal97-002)__BAM84917.1__CSP
augaugagaaagcuggccauccugagcgugagcagcuuccuguucguggaggcccuguuccaggaguaccagugcuacggcagcagcagcaacaccagagugcugaacgagcugaacuacgacaacgccggcaccaaccuguacaacgagcuggagaugaacuacuacggcaagcaggagaacugguacagccugaagaagaacagcagaagccugggcgagaacgacgacggcaacaacaacaacggcgacaacggcagagagggcaaggacgaggacaagagagacggcaacaacgaggacaacgagaagcugagaaagcccaagcacaagaagcugaagcagcccggcgacggcaaccccgaccccaacgccaaccccaacguggaccccaacgccaaccccaacguggaccccaacgccaaccccaacguggaccccaacgccaaccccaacgccaaccccaacgccaaccccaacgccaaccccaacgccaaccccaacgccaaccccaacgccaaccccaacgccaaccccaacgccaaccccaacgccaaccccaacgccaaccccaacgccaaccccaacgccaaccccaacgccaaccccaacgccaaccccaacgccaaccccaacguggaccccaacgccaaccccaacgccaaccccaacgccaaccccaacgccaaccccaacgccaaccccaacgccaaccccaacgccaaccccaacgccaaccccaacgccaaccccaacgccaaccccaacgccaaccccaacgccaaccccaacgccaaccccaacgccaaccccaacgccaaccccaacgccaaccccaacgccaaccccaacgccaaccccaacgccaaccccaacaagaacaaccagggcaacggccagggccacaacaugcccaacgaccccaacagaaacguggacgagaacgccaacgccaacaacgccgugaagaacaacaacaacgaggagcccagcgaccagcacaucgagaaguacaucaagaagauccagaacagccugagcaccgaguggagccccugcagcgugaccugcggcaacggcauccaggugagaaucaagcccggcagcgccgacaagcccaagaacgagcuggacuacgagaacgacaucgagaagaagaucugcaagauggagaagugcagcagcguguucaacguggugaacagcagcaucggccugaucauggugcugagcuuccuguuccugaacuga

SEQ ID NO: 4590 - RNA, 1251 nt, Artificial Sequence
  derived and/or modified CDS sequence (opt4) from Pf(Pal97-102)__BAM84954.1__CSP
augaugagaaagcuggccauccugagcgugagcagcuuccuguucguggaggcccuguuccaggaguaccagugcuacggcagcagcagcaacaccagagugcugaacgagcugaacuacgacaacgccggcaccaaccuguacaacgagcuggagaugaacuacuacggcaagcaggagaacugguacagccugaagaagaacagcagaagccugggcgagaacgacgacggcaacaacaacaacggcgacaacggcagagagggcaaggacgaggacaagagagacggcaacaacgaggacaacgagaagcugagaaagcccaagcacaagaagcugaagcagcccggcgacggcaaccccgaccccaacgccaaccccaacguggaccccaacgccaaccccaacguggaccccaacgccaaccccaacguggaccccaacgccaaccccaacgccaaccccaacgccaaccccaacgccaaccccaacgccaaccccaacgccaaccccaacgccaaccccaacgccaaccccaacgccaaccccaacgccaaccccaacgccaaccccaacgccaaccccaacgccaaccccaacgccaaccccaacgccaaccccaacgccaaccccaacgccaaccccaacgccaaccccaacgccaaccccaacgccaaccccaacgccaaccccaacgccaaccccaacgccaaccccaacgccaaccccaacgccaaccccaacgccaaccccaacgccaaccccaacgccaaccccaacgccaaccccaacgccaaccccaacgccaaccccaacgccaaccccaacgccaaccccaacgccaaccccaacgccaaccccaacgccaaccccaacaagaacaaccagggcaacggccagggccacaacaugcccaacgaccccaacagaaacguggacgagaacgccaacgccaacaacgccgugaagaacaacaacaacgaggagcccagcgacaagcacaucaaggaguaccugaccaagauccagaacagcaucagcaccgaguggagccccugcagcgugaccugcggcaacggcauccaggugagaaucaagcccggcagcgccggcaagcccaaggacgagcugaacuacgagaacgacaucgagaagaagaucugcaagauggagaagugcagcagcguguucaacguggugaacagcagcaucggccugaucauggugcugagcuuccuguuccugaacuga

SEQ ID NO: 4591 - RNA, 1251 nt, Artificial Sequence
  derived and/or modified CDS sequence (opt4) from Pf(PNG227-255)__BAM85044.1__CSP
augaugagaaagcuggccauccugagcgugagcagcuuccuguucguggaggcccuguuccaggaguaccagugcuacggcagcagcagcaacaccagagugcugaacgagcugaacuacgacaacgccggcaccaaccuguacaacgagcuggagaugaacuacuacggcaagcaggagaacugguacagccugaagaagaacagcagaagccugggcgagaacgacgacggcaacaacaacaacggcgacaacggcagagagggcaaggacgaggacaagagagacggcaacaacgaggacaacgagaagcugagaaagcccaagcacaagaagcugaagcagcccggcgacggcaaccccgaccccaacgccaaccccaacguggaccccaacgccaaccccaacguggaccccaacgccaaccccaacguggaccccaacgccaaccccaacguggaccccaacgccaaccccaacgccaaccccaacgccaaccccaacgccaaccccaacgccaaccccaacgccaaccccaacgccaaccccaacgccaaccccaacgccaaccccaacgccaaccccaacgccaaccccaacgccaaccccaacgccaaccccaacgccaaccccaacguggaccccaacgccaaccccaacgccaaccccaacgccaaccccaacgccaaccccaacgccaaccccaacgccaaccccaacgccaaccccaacgccaaccccaacgccaaccccaacgccaaccccaacgccaaccccaacgccaaccccaacgccaaccccaacgccaaccccaacgccaaccccaacgccaaccccaacgccaaccccaacgccaaccccaacgccaaccccaacaagaacaaccagggcaacggccagggccacaacaugcccaacgaccccaacagaaacguggacgagaacgccaacgccaacaacgccgugaagaacaacaacaacgaggagcccagcgacaagcacaucgagcaguaccugaagaagauccagaacagccugagcaccgaguggagccccugcagcgugaccugcggcaacggcauccaggugagaaucaagcccggcagcgccgacaagcccaaggaccagcuggacuacgagaacgacaucgagaagaagaucugcaagauggagaagugcagcagcguguucaacguggugaacagcagcaucggccugaucauggugcugagcuuccuguuccugaacuga

SEQ ID NO: 4592 - RNA, 1251 nt, Artificial Sequence
  derived and/or modified CDS sequence (opt4) from Pf(PNG228-063)__BAM85045.1__CSP
augaugagaaagcuggccauccugagcgugagcagcuuccuguucguggaggcccuguuccaggaguaccagugcuacggcagcagcagcaacaccagagugcugaacgagcugaacuacgacaacgccggcaccaaccuguacaacgagcuggagaugaacuacuacggcaagcaggagaacugguacagccugaagaagaacagcagaagccugggcgagaacgacgacggcaacaacaacaacggcgacaacggcagagagggcaaggacgaggacaagagagacggcaacaacgaggacaacgagaagcugagaaagcccaagcacaagaagcugaagcagcccggcgacggcaaccccgaccccaacgccaaccccaacguggaccccaacgccaaccccaacguggaccccaacgccaaccccaacguggaccccaacgccaaccccaacgccaaccccaacgccaaccccaacgccaaccccaacgccaaccccaacgccaaccccaacgccaaccccaacgccaaccccaacgccaaccccaacgccaaccccaacgccaaccccaacgccaaccccaacgccaaccccaacgccaaccccaacgccaaccccaacgccaaccccaacguggaccccaacgccaaccccaacgccaaccccaacgccaaccccaacgccaaccccaacgccaaccccaacgccaaccccaacgccaaccccaacgccaaccccaacgccaaccccaacgccaaccccaacgccaaccccaacgccaaccccaacgccaaccccaacgccaaccccaacgccaaccccaacgccaaccccaacgccaaccccaacgccaaccccaacgccaaccccaacaagaacaaccagggcaacggccagggccacaacaugcccaacgaccccaacagaaacguggacgagaacgccaacgccaacaacgccgugaagaacaacaacaacgaggagcccagcgacaagcacaucgagcaguaccugaagaagauccagaacagccugagcaccgaguggagccccugcagcgugaccugcggcaacggcauccaggugagaaucaagcccggcagcgccggcaagagcaaggacgagcuggacuacgagaacgacaucgagaagaagaucugcaagauggagaagugcagcagcguguucaacguggugaacagcagcaucggccugaucauggugcugagcuuccuguuccugaacuga

SEQ ID NO: 4593 - RNA, 1251 nt, Artificial Sequence
  derived and/or modified CDS sequence (opt4) from Pf(PNG830-058)__BAM84987.1__CSP
augaugagaaagcuggccauccugagcgugagcagcuuccuguucguggaggcccuguuccaggaguaccagugcuacggcagcagcagcaacaccagagugcugaacgagcugaacuacgacaacgccggcaccaaccuguacaacgagcuggagaugaacuacuacggcaagcaggagaacugguacagccugaagaagaacagcagaagccugggcgagaacgacgacggcaacaacaacaacggcgacaacggcagagagggcaaggacgaggacaagagagacggcaacaacgaggacaacgagaagcugagaaagcccaagcacaagaagcugaagcagcccggcgacggcaaccccgaccccaacgccaaccccaacguggaccccaacgccaaccccaacguggaccccaacgccaaccccaacguggaccccaacgccaaccccaacguggaccccaacgccaaccccaacgccaaccccaacgccaaccccaacgccaaccccaacgccaaccccaacgccaaccccaacgccaaccccaacgccaaccccaacgccaaccccaacgccaaccccaacgccaaccccaacgccaaccccaacgccaaccccaacgccaaccccaacgccaaccccaacgccaaccccaacgccaaccccaacgccaaccccaacgccaaccccaacgccaaccccaacgccaaccccaacgccaaccccaacgccaaccccaacgccaaccccaacgccaaccccaacgccaaccccaacgccaaccccaacgccaaccccaacgccaaccccaacgccaaccccaacgccaaccccaacgccaaccccaacgccaaccccaacgccaaccccaacaagaacaaccagggcaacggccagggccacaacaugcccaacgaccccaacagaaacguggacgagaacgccaacgccaacaacgccgugaagaacaacaacaacgaggagcccagcgacaagcacaucgagcaguaccugaagaagauccagaacagccugagcaccgaguggagccccugcagcgugaccugcggcaacggcauccaggugagaaucaagcccggcagcgccaacaagcccaaggacgagcuggacuacgagaacgacaucgagaagaagaucugcaagauggagaagugcagcagcguguucaacguggugaacagcagcaucggccugaucauggugcugagcuuccuguuccugaacuga

SEQ ID NO: 4594 - RNA, 1251 nt, Artificial Sequence
  derived and/or modified CDS sequence (opt4) from Pf(PNG903-136)__BAM84993.1__CSP
augaugagaaagcuggccauccugagcgugagcagcuuccuguucguggaggcccuguuccaggaguaccagugcuacggcagcagcagcaacaccagagugcugaacgagcugaacuacgacaacgccggcaccaaccuguacaacgagcuggagaugaacuacuacggcaagcaggagaacugguacagccugaagaagaacagcagaagccugggcgagaacgacgacggcaacaacaacaacggcgacaacggcagagagggcaaggacgaggacaagagagacggcaacaacgaggacaacgagaagcugagaaagcccaagcacaagaagcugaagcagcccggcgacggcaaccccgaccccaacgccaaccccaacguggaccccaacgccaaccccaacguggaccccaacgccaaccccaacguggaccccaacgccaaccccaacgccaaccccaacgccaaccccaacgccaaccccaacgccaaccccaacgccaaccccaacgccaaccccaacgccaaccccaacgccaaccccaacgccaaccccaacgccaaccccaacgccaaccccaacgccaaccccaacgccaaccccaacgccaaccccaacgccaaccccaacguggaccccaacgccaaccccaacgccaaccccaacgccaaccccaacgccaaccccaacgccaaccccaacgccaaccccaacgccaaccccaacgccaaccccaacgccaaccccaacgccaaccccaacgccaaccccaacgccaaccccaacgccaaccccaacgccaaccccaacgccaaccccaacgccaaccccaacgccaaccccaacgccaaccccaacgccaaccccaacaagaacaaccagggcaacggccagggccacaacaugcccaacgaccccaacagaaacguggacgagaacgccaacgccaacaacgccgugaagaacaacaacaacgaggagcccagcgacaagcacaucgagcaguaccugaagaagauccagaacagccugagcaccgaguggagccccugcagcgugaccugcggcaacggcauccaggugagaaucaagcccggcagcgccaacaagcccaaggacgagcuggacuacgagaacgacaucgagaagaagaucugcaagauggagaagugcagcagcguguucaacguggugaacagcagcaucggccugaucauggugcugagcuuccuguuccugaacuga

SEQ ID NO: 4595 - RNA, 1251 nt, Artificial Sequence
  derived and/or modified CDS sequence (opt4) from Pf(Tz03-086)__BAM84805.1__CSP
augaugagaaagcuggccauccugagcgugagcagcuuccuguucguggaggcccuguuccaggaguaccagugcuacggcagcagcagcaacaccagagugcugaacgagcugaacuacgacaacgccggcaccaaccuguacaacgagcuggagaugaacuacuacggcaagcaggagaacugguacagccugaagaagaacagcagaagccugggcgagaacgacgacggcaacaacaacaacggcgacaacggcagagagggcaaggacgaggacaagagagacggcaacaacgaggacaacgagaagcugagaaagcccaagcacaagaagcugaagcagcccgccgacggcaaccccgaccccaacgccaaccccaacguggaccccaacgccaaccccaacguggaccccaacgccaaccccaacguggaccccaacgccaaccccaacgccaaccccaacgccaaccccaacgccaaccccaacgccaaccccaacgccaaccccaacgccaaccccaacgccaaccccaacgccaaccccaacgccaaccccaacgccaaccccaacgccaaccccaacgccaaccccaacgccaaccccaacgccaaccccaacgccaaccccaacgccaaccccaacgccaaccccaacguggaccccaacgccaaccccaacgccaaccccaacgccaaccccaacgccaaccccaacgccaaccccaacgccaaccccaacgccaaccccaacgccaaccccaacgccaaccccaacgccaaccccaacgccaaccccaacgccaaccccaacgccaaccccaacgccaaccccaacgccaaccccaacgccaaccccaacgccaaccccaacaagaacaaccagggcaacggccagggccacaacaugcccaacgaccccaacagaaacguggacgagaacgccaacgccaacaacgccgugaagaacaacaacaacgaggagcccagcgacaagcacaucaccgaguaccugaagaagauccagaacagccugagcaccgaguggagccccugcagcgugaccugcggcaacggcauccaggugagaaucaagcccggcagcgccggcaagagcaagaacgagcuggacuacgagaacgacaucgagaagaagaucugcaagauggagaagugcagcagcguguucaacguggugaacagcagcaucggccugaucauggugcugagcuuccuguuccugaacuga

SEQ ID NO: 4596 - RNA, 1251 nt, Artificial Sequence
  derived and/or modified CDS sequence (opt4) from Pf(Tz93-009)__BAM84750.1__CSP
augaugagaaagcuggccauccugagcgugagcagcuuccuguucguggaggcccuguuccaggaguaccagugcuacggcagcagcagcaacaccagagugcugaacgagcugaacuacgacaacgccggcaccaaccuguacaacgagcuggagaugaacuacuacggcaagcaggagaacugguacagccugaagaagaacagcagaagccugggcgagaacgacgacggcaacaacaacaacggcgacaacggcagagagggcaaggacgaggacaagagagacggcaacaacgaggacaacgagaagcugagaaagcccaagcacaagaagcugaagcagcccggcgacggcaaccccgaccccaacgccaaccccaacguggaccccaacgccaaccccaacguggaccccaacgccaaccccaacguggaccccaacgccaaccccaacgccaaccccaacgccaaccccaacgccaaccccaacgccaaccccaacgccaaccccaacgccaaccccaacgccaaccccaacgccaaccccaacgccaaccccaacgccaaccccaacgccaaccccaacgccaaccccaacgccaaccccaacgccaaccccaacgccaaccccaacguggaccccaacgccaaccccaacgccaaccccaacgccaaccccaacgccaaccccaacgccaaccccaacgccaaccccaacgccaaccccaacgccaaccccaacgccaaccccaacgccaaccccaacgccaaccccaacgccaaccccaacgccaaccccaacgccaaccccaacgccaaccccaacgccaaccccaacgccaaccccaacgccaaccccaacgccaaccccaacaagaacaaccagggcaacggccagggccacaacaugcccaacgaccccaacagaaacguggacgagaacgccaacgccaacaacgccgugaagaacaacaacaacgaggagcccagcgacaagcacaucaaggaguaccugaccaagaucaagaacagcaucagcaccgaguggagccccugcagcgugaccugcggcaacggcauccaggugagaaucaagcccggcagcgccaacaagcccaaggacgagcuggacuacgagaacgacaucgagaagaagaucugcaagauggagaagugcagcagcguguucaacguggugaacagcagcaucggccugaucauggugcugagcuuccuguuccugaacuga

SEQ ID NO: 4597 - RNA, 1251 nt, Artificial Sequence
  derived and/or modified CDS sequence (opt4) from Pf(Van98M305-147)__BAM85260.1__CSP
augaugagaaagcuggccauccugagcgugagcagcuuccuguucguggaggcccuguuccaggaguaccagugcuacggcagcagcagcaacaccagagugcugaacgagcugaacuacgacaacgccggcaccaaccuguacaacgagcuggagaugaacuacuacggcaagcaggagaacugguacagccugaagaagaacagcagaagccugggcgagaacgacgacggcaacaacaacaacggcgacaacggcagagagggcaaggacgaggacaagagagacggcaacaacgaggacaacgagaagcugagaaagcccaagcacaagaagcugaagcagcccggcgacggcaaccccgaccccaacgccaaccccaacguggaccccaacgccaaccccaacguggaccccaacgccaaccccaacguggaccccaacgccaaccccaacgccaaccccaacgccaaccccaacgccaaccccaacgccaaccccaacgccaaccccaacgccaaccccaacgccaaccccaacgccaaccccaacgccaaccccaacgccaaccccaacgccaaccccaacgccaaccccaacgccaaccccaacgccaaccccaacgccaaccccaacguggaccccaacgccaaccccaacgccaaccccaacgccaaccccaacgccaaccccaacgccaaccccaacgccaaccccaacgccaaccccaacgccaaccccaacgccaaccccaacgccaaccccaacgccaaccccaacgccaaccccaacgccaaccccaacgccaaccccaacgccaaccccaacgccaaccccaacgccaaccccaacgccaaccccaacgccaaccccaacaagaacaaccagggcaacggccagggccacaacaugcccaacgaccccaacagaaacguggacgagaacgccaacgccaacaacgccgugaagaacaacaacaacgaggagcccagcgacaagcacaucgagcaguaccugaagaagauccagaacagccugagcaccgaguggagccccugcagcgugaccugcggcaacggcauccaggugagaaucaagcccggcagcgccgacaagcccaaggaccagcuggacuacgagaacgacaucgagaagaagaucugcaagauggagaagugcagcagcguguucaacguggugaacagcagcaucggccugaucauggugcugagcuuccuguuccugaacuga

SEQ ID NO: 4598 - RNA, 1251 nt, Artificial Sequence
  derived and/or modified CDS sequence (opt4) from Pf(Van98P226-97)__BAM85298.1__CSP
augaugagaaagcuggccauccugagcgugagcagcuuccuguucguggaggcccuguuccaggaguaccagugcuacggcagcagcagcaacaccagagugcugaacgagcugaacuacgacaacgccggcaccaaccuguacaacgagcuggagaugaacuacuacggcaagcaggagaacugguacagccugaagaagaacagcagaagccugggcgagaacgacgacggcaacaacaacaacggcgacaacggcagagagggcaaggacgaggacaagagagacggcaacaacgaggacaacgagaagcugagaaagcccaagcacaagaagcugaagcagcccggcgacggcaaccccgaccccaacgccaaccccaacguggaccccaacgccaaccccaacguggaccccaacgccaaccccaacguggaccccaacgccaaccccaacgccaaccccaacgccaaccccaacgccaaccccaacgccaaccccaacgccaaccccaacgccaaccccaacgccaaccccaacgccaaccccaacgccaaccccaacgccaaccccaacgccaaccccaacgccaaccccaacgccaaccccaacgccaaccccaacgccaaccccaacgccaaccccaacgccaaccccaacgccaaccccaacgccaaccccaacgccaaccccaacgccaaccccaacgccaaccccaacgccaaccccaacgccaaccccaacgccaaccccaacgccaaccccaacgccaaccccaacgccaaccccaacgccaaccccaacgccaaccccaacgccaaccccaacgccaaccccaacgccaaccccaacgccaaccccaacgccaaccccaacaagaacaaccagggcaacggccagggccacaacaugcccaacgaccccaacagaaacguggacgagaacgccaacgccaacaacgccgugaagaacaacaacaacgaggagcccagcgacaagcacaucgagcaguaccugaagaagauccagaacagccugagcaccgaguggagccccugcagcgugaccugcggcaacggcauccaggugagaaucaagcccggcagcgccaacaagcccaaggacgagcuggacuacgagaacgacaucgagaagaagaucugcaagauggagaagugcagcagcguguucaacguggugaacagcagcaucggccugaucauggugcugagcuuccuguuccugaacuga

SEQ ID NO: 4599 - RNA, 1251 nt, Artificial Sequence
  derived and/or modified CDS sequence (opt4) from Pf(Yaounde)__AAN87614.1__CSP
augaugagaaagcuggccauccugagcgugagcagcuuccuguucguggaggcccuguuccaggaguaccagugcuacggcagcagcagcaacaccagagugcugaacgagcugaacuacgacaacgccggcaccaaccuguacaacgagcuggagaugaacuacuacggcaagcaggagaacugguacagccugaagaagaacagcagaagccugggcgagaacgacgacggcaacaacaacaacggcgacaacggcagagagggcaaggacgaggacaagagagacggcaacaacgaggacaacgagaagcugagaaagcccaagcacaagaagcugaagcagcccgccgacggcaaccccgaccccaacgccaaccccaacguggaccccaacgccaaccccaacguggaccccaacgccaaccccaacguggaccccaacgccaaccccaacgccaaccccaacgccaaccccaacgccaaccccaacgccaaccccaacgccaaccccaacgccaaccccaacgccaaccccaacgccaaccccaacgccaaccccaacgccaaccccaacgccaaccccaacgccaaccccaacguggaccccaacgccaaccccaacgccaaccccaacgccaaccccaacgccaaccccaacgccaaccccaacgccaaccccaacgccaaccccaacgccaaccccaacgccaaccccaacgccaaccccaacgccaaccccaacgccaaccccaacgccaaccccaacgccaaccccaacgccaaccccaacgccaaccccaacgccaaccccaacgccaaccccaacgccaaccccaacgccaaccccaacgccaaccccaacgccaaccccaacaagaacaaccagggcaacggccagggccacaacaugcccaacgaccccaacagaaacguggacgagaacgccaacgccaacaacgccgugaagaacaacaacaacgaggagcccagcgaccagcacaucgagaaguaccugaagaucaucaagaacagccugagcaccgaguggagccccugcagcgugaccugcggcaacggcauccaggugagaaucaagcccggcagcgccaacaagcccaaggaccagcuggacuacgccaacgacaucgagaagaagaucugcaagauggagaagugcagcagcguguucaacguggugaacagcagcaucggccugaucauggugcugagcuuccuguuccugaacuga

SEQ ID NO: 4600 - RNA, 1248 nt, Artificial Sequence
  derived and/or modified CDS sequence (opt4) from Pf(A98)__ACO49328.1__CSP
augagaaagcuggccauccugagcgugagcagcuuccuguucguggaggcccuguuccaggaguaccagugcuacggcagcagcagcaacaccagagugcugaacgagcugaacuacgacaacgccggcaccaaccuguacaacgagcuggagaugaacuacuacggcaagcaggagaacugguacagccugaagaagaacagcagaagccugggcgagaacgacgacggcaacaacaacaacggcgacaacggcagagagggcaaggacgaggacaagagagacggcaacaacgaggacaacgagaagcugagaaagcccaagcacaagaagcugaagcagcccggcgacggcaaccccgaccccaacgccaaccccaacguggaccccaacgccaaccccaacguggaccccaacgccaaccccaacguggaccccaacgccaaccccaacgccaaccccaacgccaaccccaacgccaaccccaacgccaaccccaacgccaaccccaacgccaaccccaacgccaaccccaacgccaaccccaacgccaaccccaacgccaaccccaacgccaaccccaacgccaaccccaacgccaaccccaacgccaaccccaacgccaaccccaacgccaaccccaacgccaaccccaacgccaaccccaacgccaaccccaacgccaaccccaacgccaaccccaacgccaaccccaacgccaaccccaacgccaaccccaacgccaaccccaacgccaaccccaacgccaaccccaacgccaaccccaacgccaaccccaacgccaaccccaacgccaaccccaacgccaaccccaacgccaaccccaacgccaaccccaacgccaaccccaacaagaacaaccagggcaacggccagggccacaacaugcccaacgaccccaacagaaacguggacgagaacgccaacgccaacaacgccgugaagaacaacaacaacgaggagcccagcgacaagcacaucgagcaguaccugaagaacauccagaacagccugagcaccgaguggagccccugcagcgugaccugcggcaacggcauccaggugagaaucaagcccggcagcgccaacaagcccaaggacgagcuggacuacgagaacgacaucgagaagaagaucugcaagauggagaagugcagcagcguguucaacguggugaacagcagcaucggccugaucauggugcugagcuuccuguuccugaacuga

SEQ ID NO: 4601 - RNA, 1248 nt, Artificial Sequence
  derived and/or modified CDS sequence (opt4) from Pf(B60)__ACO49339.1__CSP
augagaaagcuggccauccugagcgugagcagcuuccuguucguggaggcccuguuccaggaguaccagugcuacggcagcagcagcaacaccagagugcugaacgagcugaacuacgacaacgccggcaccaaccuguacaacgagcuggagaugaacuacuacggcaagcaggagaacugguacagccugaagaagaacagcagaagccugggcgagaacgacgacggcaacaacaacaacggcgacaacggcagagagggcaaggacgaggacaagagagacggcaacaacgaggacaacgagaagcugagaaagcccaagcacaagaagcugaagcagcccggcgacggcaaccccgaccccaacgccaaccccaacguggaccccaacgccaaccccaacguggaccccaacgccaaccccaacguggaccccaacgccaaccccaacguggaccccaacgccaaccccaacgccaaccccaacgccaaccccaacgccaaccccaacgccaaccccaacgccaaccccaacgccaaccccaacgccaaccccaacgccaaccccaacgccaaccccaacgccaaccccaacgccaaccccaacgccaaccccaacgccaaccccaacgccaaccccaacgccaaccccaacgccaaccccaacgccaaccccaacgccaaccccaacgccaaccccaacgccaaccccaacgccaaccccaacgccaaccccaacgccaaccccaacgccaaccccaacgccaaccccaacgccaaccccaacgccaaccccaacgccaaccccaacgccaaccccaacgccaaccccaacgccaaccccaacgccaaccccaacgccaaccccaacaagaacaaccagggcaacggccagggccacaacaugcccaacgaccccaacagaaacguggacgagaacgccaacgccaacaacgccgugaagaacaacaacaacgaggagcccagcgacaagcacaucgagcaguaccugaagaagauccagaacagccugagcaccgaguggagccccugcagcgugaccugcggcaacggcauccaggugagaaucaagcccggcagcgccaacaagcccaaggacgagcuggacuacgagaacgacaucgagaagaagaucugcaagauggagaagugcagcagcguguucaacguggugaacagcagcaucggccugaucauggugcugagcuuccuguuccugaacuga

SEQ ID NO: 4602 - RNA, 1248 nt, Artificial Sequence
  derived and/or modified CDS sequence (opt4) from Pf(TM323)__ACO49493.1__CSP
augagaaagcuggccauccugagcgugagcagcuuccuguucguggaggcccuguuccaggaguaccagugcuacggcagcagcagcaacaccagagugcugaacgagcugaacuacgacaacgccggcaccaaccuguacaacgagcuggagaugaacuacuacggcaagcaggagaacugguacagccugaagaagaacagcagaagccugggcgagaacgacgacggcaacaacaacaacggcgacaacggcagagagggcaaggacgaggacaagagagacggcaacaacgaggacaacgagaagcugagaaagcccaagcacaagaagcugaagcagcccggcgacggcaaccccgaccccaacgccaaccccaacguggaccccaacgccaaccccaacguggaccccaacgccaaccccaacguggaccccaacgccaaccccaacgccaaccccaacgccaaccccaacgccaaccccaacgccaaccccaacgccaaccccaacgccaaccccaacgccaaccccaacgccaaccccaacgccaaccccaacgccaaccccaacgccaaccccaacgccaaccccaacgccaaccccaacgccaaccccaacgccaaccccaacgccaaccccaacgccaaccccaacgccaaccccaacgccaaccccaacgccaaccccaacgccaaccccaacgccaaccccaacgccaaccccaacgccaaccccaacgccaaccccaacgccaaccccaacgccaaccccaacgccaaccccaacgccaaccccaacgccaaccccaacgccaaccccaacgccaaccccaacgccaaccccaacgccaaccccaacgccaaccccaacaagaacaaccagggcaacggccagggccacaacaugcccaacgaccccaacagaaacguggacgagaacgccaacgccaacaacgccgugaagaacaacaacaacgaggagcccagcgacaagcacaucgagaaguaccugaaggagauccagaacagccugagcaccgaguggagccccugcagcgugaccugcggcaacggcauccaggugagaaucaagcccggcagcgccaacaagcccaaggaccagcuggacuacgagaacgacaucgagaagaagaucugcaagauggagaagugcagcagcguguucaacguggugaacagcagcaucggccugaucauggugcugagcuuccuguuccugaacuga

SEQ ID NO: 4603 - RNA, 1239 nt, Artificial Sequence
  derived and/or modified CDS sequence (opt4) from Pf(22)__AGR53780.1__CSP
augaugagaaagcuggccauccugagcgugagcagcuuccuguucguggaggcccuguuccaggaguaccagugcuacggcagccccagcaacaccagagugcugaacgagcugaacuacgacaacgccggcaccaaccuguacaacgagcuggagaugaacuacuacggcaagcaggagaacugguacagccugaagaagaacagcagaagccugggcgagaacgacgacggcaacaacaacaacggcgacaacggcagagagggcaaggacgaggacaagagagacggcaacaacgaggacaacgagaagcugagaaagcccaagcacaagaagcugaagcagcccgccgacggcaaccccgaccccaacgccaaccccaacguggaccccaacgccaaccccaacguggaccccaacgccaaccccaacguggaccccaacgccaaccccaacgccaaccccaacgccaaccccaacgccaaccccaacgccaaccccaacgccaaccccaacgccaaccccaacgccaaccccaacgccaaccccaacgccaaccccaacgccaaccccaacgccaaccccaacgccaaccccaacgccaaccccaacgccaaccccaacguggaccccaacgccaaccccaacgccaaccccaacgccaaccccaacgccaaccccaacgccaaccccaacgccaaccccaacgccaaccccaacgccaaccccaacgccaaccccaacgccaaccccaacgccaaccccaacgccaaccccaacgccaaccccaacgccaaccccaacgccaaccccaacgccaaccccaacgccaaccccaacgccaaccccaacgccaaccccaacaagaacaaccagggcaacggccagggccacaacaugcccaacgaccccaacagaaacguggacgagaacgccaacgccaacaacgccgugaagaacaacaacaacgaggagcccagcgacaagcacaucgagcaguaccugaagaccaucaagaacagccugagcaccgaguggagccccugcagcgugaccugcggcaacggcauccaggugagaaucaagcccggcagcgccaacaagcccaaggacgagcugaacuacgagaacgacaucgagaagaagaucugcaagauggagaagugcagcagcguguucaacguggugaacagcagcaucggccugaucauggugcugagcuuccuguuccugaacuga

SEQ ID NO: 4604 - RNA, 1239 nt, Artificial Sequence
  derived and/or modified CDS sequence (opt4) from Pf(Amazonas)__AAN87605.1__CSP
augaugagaaagcuggccauccugagcgugagcagcuuccuguucguggaggcccuguuccaggaguaccagugcuacggcagcagcagcaacaccagagugcugaacgagcugaacuacgacaacgccggcaccaaccuguacaacgagcuggagaugaacuacuacggcaagcaggagaacugguacagccugaagaagaacagcagaagccugggcgagaacgacgacggcaacaacaacaacggcgacaacggcagagagggcaaggacgaggacaagagagacggcaacaacgaggacaacgagaagcugagaaagcccaagcacaagaagcugaagcagcccgccgacggcaaccccgaccccaacgccaaccccaacguggaccccaacgccaaccccaacguggaccccaacgccaaccccaacguggaccccaacgccaaccccaacgccaaccccaacgccaaccccaacgccaaccccaacgccaaccccaacgccaaccccaacgccaaccccaacgccaaccccaacgccaaccccaacgccaaccccaacgccaaccccaacgccaaccccaacgccaaccccaacgccaaccccaacgccaaccccaacguggaccccaacgccaaccccaacgccaaccccaacgccaaccccaacgccaaccccaacgccaaccccaacgccaaccccaacgccaaccccaacgccaaccccaacgccaaccccaacgccaaccccaacgccaaccccaacgccaaccccaacgccaaccccaacgccaaccccaacgccaaccccaacgccaaccccaacgccaaccccaacgccaaccccaacgccaaccccaacaagaacaaccagggcaacggccagggccacaacaugcccaacgaccccaacagaaacguggacgagaacgccaacgccaacaacgccgugaagaacaacaacaacgaggagcccagcgaccagcacaucgagaaguaccugaagagaauccagaacagccugagcaccgaguggagccccugcagcgugaccugcggcaacggcauccaggugagaaucaagcccggcagcgccaacaagcccaaggacgagcuggacuacgagaacgacaucgagaagaagaucugcaagauggagaagugcagcagcguguucaacguggugaacagcagcaucggccugaucauggugcugagcuuccuguuccugaacuga

SEQ ID NO: 4605 - RNA, 1239 nt, Artificial Sequence
  derived and/or modified CDS sequence (opt4) from Pf(Amazonas)__AAN87598.1__CSP
augaugagaaagcuggccauccugagcgugagcagcuuccuguucguggaggcccuguuccaggaguaccagugcuacggcagcagcagcaacaccagagugcugaacgagcugaacuacgacaacgccggcaccaaccuguacaacgagcuggagaugaacuacuacggcaagcaggagaacugguacagccugaagaagaacagcagaagccugggcgagaacgacgacggcaacaacaacaacggcgacaacggcagagagggcaaggacgaggacaagagagacggcaacaacgaggacaacgagaagcugagaaagcccaagcacaagaagcugaagcagcccgccgacggcaaccccgaccccaacgccaaccccaacguggaccccaacgccaaccccaacguggaccccaacgccaaccccaacguggaccccaacgccaaccccaacgccaaccccaacgccaaccccaacgccaaccccaacgccaaccccaacgccaaccccaacgccaaccccaacgccaaccccaacgccaaccccaacgccaaccccaacgccaaccccaacgccaaccccaacgccaaccccaacgccaaccccaacgccaaccccaacguggaccccaacgccaaccccaacgccaaccccaacgccaaccccaacgccaaccccaacgccaaccccaacgccaaccccaacgccaaccccaacgccaaccccaacgccaaccccaacgccaaccccaacgccaaccccaacgccaaccccaacgccaaccccaacgccaaccccaacgccaaccccaacgccaaccccaacgccaaccccaacgccaaccccaacgccaaccccaacaagaacaaccagggcaacggccagggccacaacaugcccaacgaccccaacagaaacguggacgagaacgccaacgccaacaacgccgugaagaacaacaacaacgaggagcccagcgacaagcacaucaaggaguaccugaagaucauccagaacagccugagcaccgaguggagccccugcagcgugaccugcggcaacggcauccaggugagaaucaagcccggcagcgccggcaagcccaaggacgagcuggacuacgccaacgacaucgagaagaagaucugcaagauggagaagugcagcagcguguucaacguggugaacagcagcaucggccugaucauggugcugagcuuccuguuccugaacuga

SEQ ID NO: 4606 - RNA, 1239 nt, Artificial Sequence
  derived and/or modified CDS sequence (opt4) from Pf(Asembo Bay)__AAN87611.1__CSP
augaugagaaagcuggccauccugagcgugagcagcuuccuguucguggaggcccuguuccaggaguaccagugcuacggcagcagcagcaacaccagagugcugaacgagcugaacuacgacaacgccggcaccaaccuguacaacgagcuggagaugaacuacuacggcaagcaggagaacugguacagccugaagaagaacagcagaagccugggcgagaacgacgacggcaacaacaacaacggcgacaacggcagagagggcaaggacgaggacaagagagacggcaacaacgaggacaacgagaagcugagaaagcccaagcacaagaagcugaagcagcccgccgacggcaaccccgaccccaacgccaaccccaacguggaccccaacgccaaccccaacguggaccccaacgccaaccccaacguggaccccaacgccaaccccaacgccaaccccaacgccaaccccaacgccaaccccaacgccaaccccaacgccaaccccaacgccaaccccaacgccaaccccaacgccaaccccaacgccaaccccaacgccaaccccaacgccaaccccaacgccaaccccaacgccaaccccaacgccaaccccaacgccaaccccaacgccaaccccaacguggaccccaacgccaaccccaacgccaaccccaacgccaaccccaacgccaaccccaacgccaaccccaacgccaaccccaacgccaaccccaacgccaaccccaacgccaaccccaacgccaaccccaacgccaaccccaacgccaaccccaacgccaaccccaacgccaaccccaacgccaaccccaacgccaaccccaacgccaaccccaacaagaacaaccagggcaacggccagggccacaacaugcccaacgaccccaacagaaacguggacgagaacgccaacgccaacaacgccgugaagaacaacaacaacgaggagcccagcgacaagcacaucgagcaguaccugaagaucaucaagaacagccugagcaccgaguggagccccugcagcgugaccugcggcaacggcauccaggugagaaucaagcccggcagcgccaacaagcccaaggacgagcuggacuacgccaacgacaucgagaagaagaucugcaagauggagaagugcagcagcguguucaacguggugaacagcagcaucggccugaucauggugcugagcuuccuguuccugaacuga

SEQ ID NO: 4607 - RNA, 1239 nt, Artificial Sequence
  derived and/or modified CDS sequence (opt4) from Pf(Asembo Bay)__AAN87589.1__CSP
augaugagaaagcuggccauccugagcgugagcagcuuccuguucguggaggcccuguuccaggaguaccagugcuacggcagcagcagcaacaccagagugcugaacgagcugaacuacgacaacgccggcaccaaccuguacaacgagcuggagaugaacuacuacggcaagcaggagaacugguacagccugaagaagaacagcagaagccugggcgagaacgacgacggcaacaacaacaacggcgacaacggcagagagggcaaggacgaggacaagagagacggcaacaacgaggacaacgagaagcugagaaagcccaagcacaagaagcugaagcagcccgccgacggcaaccccgaccccaacgccaaccccaacguggaccccaacgccaaccccaacguggaccccaacgccaaccccaacguggaccccaacgccaaccccaacgccaaccccaacgccaaccccaacgccaaccccaacgccaaccccaacgccaaccccaacgccaaccccaacgccaaccccaacgccaaccccaacgccaaccccaacgccaaccccaacguggaccccaacgccaaccccaacgccaaccccaacgccaaccccaacgccaaccccaacgccaaccccaacgccaaccccaacgccaaccccaacgccaaccccaacgccaaccccaacgccaaccccaacgccaaccccaacgccaaccccaacgccaaccccaacgccaaccccaacgccaaccccaacgccaaccccaacgccaaccccaacgccaaccccaacgccaaccccaacgccaaccccaacgccaaccccaacgccaaccccaacgccaaccccaacaagaacaaccagggcaacggccagggccacaacaugcccaacgaccccaacagaaacguggacgagaacgccaacgccaacaacgccgugaagaacaacaacaacgaggagcccagcgaccagcacaucgagaaguaccugaagaagauccagaacagccugagcaccgaguggagccccugcagcgugaccugcggcaacggcauccaggugagaaucaagcccggcagcgccaacaagcccaaggaccagcuggacuacgccaacgacaucgagaagaagaucugcaagauggagaagugcagcagcguguucaacguggugaacagcagcaucggccugaucauggugcugagcuuccuguuccugaacuga

SEQ ID NO: 4608 - RNA, 1239 nt, Artificial Sequence
  derived and/or modified CDS sequence (opt4) from Pf(BrB1)__BAM85131.1__CSP
augaugagaaagcuggccauccugagcgugagcagcuuccuguucguggaggcccuguuccaggaguaccagugcuacggcagcagcagcaacaccagagugcugaacgagcugaacuacgacaacgccggcaccaaccuguacaacgagcuggagaugaacuacuacggcaagcaggagaacugguacagccugaagaagaacagcagaagccugggcgagaacgacgacggcaacaacaacaacggcgacaacggcagagagggcaaggacgaggacaagagagacggcaacaacgaggacaacgagaagcugagaaagcccaagcacaagaagcugaagcagcccgccgacggcaaccccgaccccaacgccaaccccaacguggaccccaacgccaaccccaacguggaccccaacgccaaccccaacguggaccccaacgccaaccccaacgccaaccccaacgccaaccccaacgccaaccccaacgccaaccccaacgccaaccccaacgccaaccccaacgccaaccccaacgccaaccccaacgccaaccccaacgccaaccccaacgccaaccccaacgccaaccccaacgccaaccccaacgccaaccccaacguggaccccaacgccaaccccaacgccaaccccaacgccaaccccaacgccaaccccaacgccaaccccaacgccaaccccaacgccaaccccaacgccaaccccaacgccaaccccaacgccaaccccaacgccaaccccaacgccaaccccaacgccaaccccaacgccaaccccaacgccaaccccaacgccaaccccaacgccaaccccaacgccaaccccaacgccaaccccaacaagaacaaccagggcaacggccagggccacaacaugcccaacgaccccaacagaaacguggacgagaacgccaacgccaacaacgccgugaagaacaacaacaacgaggagcccagcgacaagcacaucgagcaguaccugaagaagaucaagaacagcaucagcaccgaguggagccccugcagcgugaccugcggcaacggcauccaggugagaaucaagcccggcagcgccaacaagcccaaggacgagcuggacuacgagaacgacaucgagaagaagaucugcaagauggagaagugcagcagcguguucaacguggugaacagcagcaucggccugaucauggugcugagcuuccuguuccugaacuga

SEQ ID NO: 4609 - RNA, 1239 nt, Artificial Sequence
  derived and/or modified CDS sequence (opt4) from Pf(BrP9)__BAM85145.1__CSP
augaugagaaagcuggccauccugagcgugagcagcuuccuguucguggaggcccuguuccaggaguaccagugcuacggcagcagcagcaacaccagagugcugaacgagcugaacuacgacaacgccggcaccaaccuguacaacgagcuggagaugaacuacuacggcaagcaggagaacugguacagccugaagaagaacagcagaagccugggcgagaacgacgacggcaacaacaacaacggcgacaacggcagagagggcaaggacgaggacaagagagacggcaacaacgaggacaacgagaagcugagaaagcccaagcacaagaagcugaagcagcccggcgacggcaaccccgaccccaacgccaaccccaacguggaccccaacgccaaccccaacguggaccccaacgccaaccccaacguggaccccaacgccaaccccaacgccaaccccaacgccaaccccaacgccaaccccaacgccaaccccaacgccaaccccaacgccaaccccaacgccaaccccaacgccaaccccaacgccaaccccaacgccaaccccaacgccaaccccaacgccaaccccaacgccaaccccaacgccaaccccaacguggaccccaacgccaaccccaacgccaaccccaacgccaaccccaacgccaaccccaacgccaaccccaacgccaaccccaacgccaaccccaacgccaaccccaacgccaaccccaacgccaaccccaacgccaaccccaacgccaaccccaacgccaaccccaacgccaaccccaacgccaaccccaacgccaaccccaacgccaaccccaacgccaaccccaacgccaaccccaacaagaacaaccagggcaacggccagggccacaacaugcccaacgaccccaacagaaacguggacgagaacgccaacgccaacaacgccgugaagaacaacaacaacgaggagcccagcgacaagcacaucgagcaguaccugaagaagaucaagaacagcaucagcaccgaguggagccccugcagcgugaccugcggcaacggcauccaggugagaaucaagcccggcagcgccaacaagcccaaggacgagcuggacuacgagaacgacaucgagaagaagaucugcaagauggagaagugcagcagcguguucaacguggugaacagcagcaucggccugaucauggugcugagcuuccuguuccugaacuga

SEQ ID NO: 4610 - RNA, 1239 nt, Artificial Sequence
  derived and/or modified CDS sequence (opt4) from Pf(India)__AAN87606.1__CSP
augaugagaaagcuggccauccugagcgugagcagcuuccuguucguggaggcccuguuccaggaguaccagugcuacggcagcagcagcaacaccagagugcugaacgagcugaacuacgacaacgccggcaccaaccuguacaacgagcuggagaugaacuacuacggcaagcaggagaacugguacagccugaagaagaacagcagaagccugggcgagaacgacgacggcaacaacaacaacggcgacaacggcagagagggcaaggacgaggacaagagagacggcaacaacgaggacaacgagaagcugagaaagcccaagcacaagaagcugaagcagcccggcgacggcaaccccgaccccaacgccaaccccaacguggaccccaacgccaaccccaacguggaccccaacgccaaccccaacguggaccccaacgccaaccccaacgccaaccccaacgccaaccccaacgccaaccccaacgccaaccccaacgccaaccccaacgccaaccccaacgccaaccccaacgccaaccccaacgccaaccccaacgccaaccccaacgccaaccccaacgccaaccccaacgccaaccccaacgccaaccccaacguggaccccaacgccaaccccaacgccaaccccaacgccaaccccaacgccaaccccaacgccaaccccaacgccaaccccaacgccaaccccaacgccaaccccaacgccaaccccaacgccaaccccaacgccaaccccaacgccaaccccaacgccaaccccaacgccaaccccaacgccaaccccaacgccaaccccaacgccaaccccaacgccaaccccaacgccaaccccaacaagaacaaccagggcaacggccagggccacaacaugcccaacgaccccaacagaaacguggacgagaacgccaacgccaacaacgccgugaagaacaacaacaacgaggagcccagcgacaagcacaucgagaaguaccugaagaagauccagaacagccugagcaccgaguggagccccugcagcgugaccugcggcaacggcauccaggugagaaucaagcccggcagcgccaacaagcccaaggacgagcuggacuacgagaacgacaucgagaagaagaucugcaagauggagaagugcagcagcguguucaacguggugaacagcagcaucggccugaucauggugcugagcuuccuguuccugaacuga

SEQ ID NO: 4611 - RNA, 1239 nt, Artificial Sequence
  derived and/or modified CDS sequence (opt4) from Pf(Pal97-007)__BAM84921.1__CSP
augaugagaaagcuggccauccugagcgugagcagcuuccuguucguggaggcccuguuccaggaguaccagugcuacggcagcagcagcaacaccagagugcugaacgagcugaacuacgacaacgccggcaccaaccuguacaacgagcuggagaugaacuacuacggcaagcaggagaacugguacagccugaagaagaacagcagaagccugggcgagaacgacgacggcaacaacaacaacggcgacaacggcagagagggcaaggacgaggacaagagagacggcaacaacgaggacaacgagaagcugagaaagcccaagcacaagaagcugaagcagcccggcgacggcaaccccgaccccaacgccaaccccaacguggaccccaacgccaaccccaacguggaccccaacgccaaccccaacguggaccccaacgccaaccccaacgccaaccccaacgccaaccccaacgccaaccccaacgccaaccccaacgccaaccccaacgccaaccccaacgccaaccccaacgccaaccccaacgccaaccccaacgccaaccccaacgccaaccccaacgccaaccccaacgccaaccccaacgccaaccccaacguggaccccaacgccaaccccaacgccaaccccaacgccaaccccaacgccaaccccaacgccaaccccaacgccaaccccaacgccaaccccaacgccaaccccaacgccaaccccaacgccaaccccaacgccaaccccaacgccaaccccaacgccaaccccaacgccaaccccaacgccaaccccaacgccaaccccaacgccaaccccaacgccaaccccaacgccaaccccaacaagaacaaccagggcaacggccagggccacaacaugcccaacgaccccaacagaaacguggacgagaacgccaacgccaacaacgccgugaagaacaacaacaacgaggagcccagcgacaagcacaucaaggaguaccugaccaagaucaagaacagcaucagcaccgaguggagccccugcagcgugaccugcggcaacggcauccaggugagaaucaagcccggcagcgccaacaagcccaaggacgagcuggacuacgagaacgacaucgagaagaagaucugcaagauggagaagugcagcagcguguucaacguggugaacagcagcaucggccugaucauggugcugagcuuccuguuccugaacuga

SEQ ID NO: 4612 - RNA, 1239 nt, Artificial Sequence
  derived and/or modified CDS sequence (opt4) from Pf(Pal97-037)__BAM84929.1__CSP
augaugagaaagcuggccauccugagcgugagcagcuuccuguucguggaggcccuguuccaggaguaccagugcuacggcagcagcagcaacaccagagugcugaacgagcugaacuacgacaacgccggcaccaaccuguacaacgagcuggagaugaacuacuacggcaagcaggagaacugguacagccugaagaagaacagcagaagccugggcgagaacgacgacggcaacaacaacaacggcgacaacggcagagagggcaaggacgaggacaagagagacggcaacaacgaggacaacgagaagcugagaaagcccaagcacaagaagcugaagcagcccggcgacggcaaccccgaccccaacgccaaccccaacguggaccccaacgccaaccccaacguggaccccaacgccaaccccaacguggaccccaacgccaaccccaacgccaaccccaacgccaaccccaacgccaaccccaacgccaaccccaacgccaaccccaacgccaaccccaacgccaaccccaacgccaaccccaacgccaaccccaacgccaaccccaacgccaaccccaacgccaaccccaacgccaaccccaacgccaaccccaacguggaccccaacgccaaccccaacgccaaccccaacgccaaccccaacgccaaccccaacgccaaccccaacgccaaccccaacgccaaccccaacgccaaccccaacgccaaccccaacgccaaccccaacgccaaccccaacgccaaccccaacgccaaccccaacgccaaccccaacgccaaccccaacgccaaccccaacgccaaccccaacgccaaccccaacgccaaccccaacaagaacaaccagggcaacggccagggccacaacaugcccaacgaccccaacagaaacguggacgagaacgccaacgccaacaacgccgugaagaacaacaacaacgaggagcccagcgaccagcacaucgagaaguacaucaagaagauccagaacagccugagcaccgaguggagccccugcagcgugaccugcggcaacggcauccaggugagaaucaagcccggcagcgccgacaagcccaagaacgagcuggacuacgagaacgacaucgagaagaagaucugcaagauggagaagugcagcagcguguucaacguggugaacagcagcaucggccugaucauggugcugagcuuccuguuccugaacuga

SEQ ID NO: 4613 - RNA, 1239 nt, Artificial Sequence
  derived and/or modified CDS sequence (opt4) from Pf(Pal97-052)__BAM84935.1__CSP
augaugagaaagcuggccauccugagcgugagcagcuuccuguucguggaggcccuguuccaggaguaccagugcuacggcagcagcagcaacaccagagugcugaacgagcugaacuacgacaacgccggcaccaaccuguacaacgagcuggagaugaacuacuacggcaagcaggagaacugguacagccugaagaagaacagcagaagccugggcgagaacgacgacggcaacaacaacaacggcgacaacggcagagagggcaaggacgaggacaagagagacggcaacaacgaggacaacgagaagcugagaaagcccaagcacaagaagcugaagcagcccggcgacggcaaccccgaccccaacgccaaccccaacguggaccccaacgccaaccccaacguggaccccaacgccaaccccaacguggaccccaacgccaaccccaacgccaaccccaacgccaaccccaacgccaaccccaacgccaaccccaacgccaaccccaacgccaaccccaacgccaaccccaacgccaaccccaacgccaaccccaacgccaaccccaacgccaaccccaacgccaaccccaacgccaaccccaacgccaaccccaacguggaccccaacgccaaccccaacgccaaccccaacgccaaccccaacgccaaccccaacgccaaccccaacgccaaccccaacgccaaccccaacgccaaccccaacgccaaccccaacgccaaccccaacgccaaccccaacgccaaccccaacgccaaccccaacgccaaccccaacgccaaccccaacgccaaccccaacgccaaccccaacgccaaccccaacgccaaccccaacaagaacaaccagggcaacggccagggccacaacaugcccaacgaccccaacagaaacguggacgagaacgccaacgccaacaacgccgugaagaacaacaacaacgaggagcccagcgaccagcacaucgagaaguaccugaagaucauccagaacagccugagcaccgaguggagccccugcagcgugaccugcggcaacggcauccaggugagaaucaagcccggcagcgccgacaagcccaaggaccagcuggacuacgccaacgacaucgagaagaagaucugcaagauggagaagugcagcagcguguucaacguggugaacagcagcaucggccugaucauggugcugagcuuccuguuccugaacuga

SEQ ID NO: 4614 - RNA, 1239 nt, Artificial Sequence
  derived and/or modified CDS sequence (opt4) from Pf(Sol95-351)__BAM85103.1__CSP
augaugagaaagcuggccauccugagcgugagcagcuuccuguucguggaggcccuguuccaggaguaccagugcuacggcagcagcagcaacaccagagugcugaacgagcugaacuacgacaacgccggcaccaaccuguacaacgagcuggagaugaacuacuacggcaagcaggagaacugguacagccugaagaagaacagcagaagccugggcgagaacgacgacggcaacaacaacaacggcgacaacggcagagagggcaaggacgaggacaagagagacggcaacaacgaggacaacgagaagcugagaaagcccaagcacaagaagcugaagcagcccggcgacggcaaccccgaccccaacgccaaccccaacguggaccccaacgccaaccccaacguggaccccaacgccaaccccaacguggaccccaacgccaaccccaacgccaaccccaacgccaaccccaacgccaaccccaacgccaaccccaacgccaaccccaacgccaaccccaacgccaaccccaacgccaaccccaacgccaaccccaacgccaaccccaacgccaaccccaacgccaaccccaacgccaaccccaacgccaaccccaacguggaccccaacgccaaccccaacgccaaccccaacgccaaccccaacgccaaccccaacgccaaccccaacgccaaccccaacgccaaccccaacgccaaccccaacgccaaccccaacgccaaccccaacgccaaccccaacgccaaccccaacgccaaccccaacgccaaccccaacgccaaccccaacgccaaccccaacgccaaccccaacgccaaccccaacgccaaccccaacaagaacaaccagggcaacggccagggccacaacaugcccaacgaccccaacagaaacguggacgagaacgccaacgccaacaacgccgugaagaacaacaacaacgaggagcccagcgacaagcacaucgagcaguaccugaagaagauccagaacagccugagcaccgaguggagccccugcagcgugaccugcggcaacggcauccaggugagaaucaagcccggcagcgccgacaagcccaaggaccagcuggacuacgagaacgacaucgagaagaagaucugcaagauggagaagugcagcagcguguucaacguggugaacagcagcaucggccugaucauggugcugagcuuccuguuccugaacuga

SEQ ID NO: 4615 - RNA, 1239 nt, Artificial Sequence
  derived and/or modified CDS sequence (opt4) from Pf(Tz03-038)__BAM84801.1__CSP
augaugagaaagcuggccauccugagcgugagcagcuuccuguucguggaggcccuguuccaggaguaccagugcuacggcagcagcagcaacaccagagugcugaacgagcugaacuacgacaacgccggcaccaaccuguacaacgagcuggagaugaacuacuacggcaagcaggagaacugguacagccugaagaagaacagcagaagccugggcgagaacgacgacggcaacaacaacaacggcgacaacggcagagagggcaaggacgaggacaagagagacggcaacaacgaggacaacgagaagcugagaaagcccaagcacaagaagcugaagcagcccggcgacggcaaccccgaccccaacgccaaccccaacguggaccccaacgccaaccccaacguggaccccaacgccaaccccaacguggaccccaacgccaaccccaacgccaaccccaacgccaaccccaacgccaaccccaacgccaaccccaacgccaaccccaacgccaaccccaacgccaaccccaacgccaaccccaacgccaaccccaacgccaaccccaacguggaccccaacgccaaccccaacgccaaccccaacgccaaccccaacgccaaccccaacgccaaccccaacgccaaccccaacgccaaccccaacgccaaccccaacgccaaccccaacgccaaccccaacgccaaccccaacgccaaccccaacgccaaccccaacgccaaccccaacgccaaccccaacgccaaccccaacgccaaccccaacgccaaccccaacgccaaccccaacgccaaccccaacgccaaccccaacgccaaccccaacgccaaccccaacaagaacaaccagggcaacggccagggccacaacaugcccaacgaccccaacagaaacguggacgagaacgccaacgccaacaacgccgugaagaacaacaacaacgaggagcccagcgacaagcacaucgagcaguaccugaacaagaucaagaacagcaucagcaccgaguggagccccugcagcgugaccugcggcaacggcauccaggugagaaucaagcccggcagcgccaacaagcccaaggacgagcugaacuacgagaacgacaucgagaagaagaucugcaagauggagaagugcagcagcguguucaacguggugaacagcagcaucggccugaucauggugcugagcuuccuguuccugaacuga

SEQ ID NO: 4616 - RNA, 1239 nt, Artificial Sequence
  derived and/or modified CDS sequence (opt4) from Pf(Tz03-076)__BAM84804.1__CSP
augaugagaaagcuggccauccugagcgugagcagcuuccuguucguggaggcccuguuccaggaguaccagugcuacggcagcagcagcaacaccagagugcugaacgagcugaacuacgacaacgccggcaccaaccuguacaacgagcuggagaugaacuacuacggcaagcaggagaacugguacagccugaagaagaacagcagaagccugggcgagaacgacgacggcaacaacaacaacggcgacaacggcagagagggcaaggacgaggacaagagagacggcaacaacgaggacaacgagaagcugagaaagcccaagcacaagaagcugaagcagcccggcgacggcaaccccgaccccaacgccaaccccaacguggaccccaacgccaaccccaacguggaccccaacgccaaccccaacguggaccccaacgccaaccccaacgccaaccccaacgccaaccccaacgccaaccccaacgccaaccccaacgccaaccccaacgccaaccccaacgccaaccccaacgccaaccccaacgccaaccccaacgccaaccccaacgccaaccccaacgccaaccccaacgccaaccccaacgccaaccccaacguggaccccaacgccaaccccaacgccaaccccaacgccaaccccaacgccaaccccaacgccaaccccaacgccaaccccaacgccaaccccaacgccaaccccaacgccaaccccaacgccaaccccaacgccaaccccaacgccaaccccaacgccaaccccaacgccaaccccaacgccaaccccaacgccaaccccaacgccaaccccaacgccaaccccaacgccaaccccaacaagaacaaccagggcaacggccagggccacaacaugcccaacgaccccaacagaaacguggacgagaacgccaacgccaacaacgccgugaagaacaacaacaacgaggagcccagcgacaagcacaucgagcaguaccugaagaccaucaagaacagccugagcaccgaguggagccccugcagcgugaccugcggcaacggcauccaggugagaaucaagcccggcagcgccaacaagcccaaggacgagcugaacuacgagaacgacaucgagaagaagaucugcaagauggagaagugcagcagcguguucaacguggugaacagcagcaucggccugaucauggugcugagcuuccuguuccugaacuga

SEQ ID NO: 4617 - RNA, 1239 nt, Artificial Sequence
  derived and/or modified CDS sequence (opt4) from Pf(Tz03-101)__BAM84806.1__CSP
augaugagaaagcuggccauccugagcgugagcagcuuccuguucguggaggcccuguuccaggaguaccagugcuacggcagcagcagcaacaccagagugcugaacgagcugaacuacgacaacgccggcaccaaccuguacaacgagcuggagaugaacuacuacggcaagcaggagaacugguacagccugaagaagaacagcagaagccugggcgagaacgacgacggcaacaacaacaacggcgacaacggcagagagggcaaggacgaggacaagagagacggcaacaacgaggacaacgagaagcugagaaagcccaagcacaagaagcugaagcagcccggcgacggcaaccccgaccccaacgccaaccccaacguggaccccaacgccaaccccaacguggaccccaacgccaaccccaacguggaccccaacgccaaccccaacgccaaccccaacgccaaccccaacgccaaccccaacgccaaccccaacgccaaccccaacgccaaccccaacgccaaccccaacgccaaccccaacgccaaccccaacgccaaccccaacgccaaccccaacgccaaccccaacgccaaccccaacgccaaccccaacguggaccccaacgccaaccccaacgccaaccccaacgccaaccccaacgccaaccccaacgccaaccccaacgccaaccccaacgccaaccccaacgccaaccccaacgccaaccccaacgccaaccccaacgccaaccccaacgccaaccccaacgccaaccccaacgccaaccccaacgccaaccccaacgccaaccccaacgccaaccccaacgccaaccccaacgccaaccccaacaagaacaaccagggcaacggccagggccacaacaugcccaacgaccccaacagaaacguggacgagaacgccaacgccaacaacgccgugaagaacaacaacaacgaggagcccagcgacaagcacaucaaggaguaccugaacaagauccagaacagcaucagcaccgaguggagccccugcagcgugaccugcggcaacggcauccaggugagaaucaagcccggcagcgccgacaagcccaaggaccagcuggacuacaucaacgacaucgagaagaagaucugcaagauggagaagugcagcagcguguucaacguggugaacagcagcaucggccugaucauggugcugagcuuccuguuccugaacuga

SEQ ID NO: 4618 - RNA, 1239 nt, Artificial Sequence
  derived and/or modified CDS sequence (opt4) from Pf(Tz93-022)__BAM84753.1__CSP
augaugagaaagcuggccauccugagcgugagcagcuuccuguucguggaggcccuguuccaggaguaccagugcuacggcagcagcagcaacaccagagugcugaacgagcugaacuacgacaacgccggcaccaaccuguacaacgagcuggagaugaacuacuacggcaagcaggagaacugguacagccugaagaagaacagcagaagccugggcgagaacgacgacggcaacaacaacaacggcgacaacggcagagagggcaaggacgaggacaagagagacggcaacaacgaggacaacgagaagcugagaaagcccaagcacaagaagcugaagcagcccggcgacggcaaccccgaccccaacgccaaccccaacguggaccccaacgccaaccccaacguggaccccaacgccaaccccaacguggaccccaacgccaaccccaacgccaaccccaacgccaaccccaacgccaaccccaacgccaaccccaacgccaaccccaacgccaaccccaacgccaaccccaacgccaaccccaacgccaaccccaacgccaaccccaacgccaaccccaacgccaaccccaacgccaaccccaacgccaaccccaacgccaaccccaacgccaaccccaacgccaaccccaacgccaaccccaacgccaaccccaacgccaaccccaacgccaaccccaacgccaaccccaacgccaaccccaacgccaaccccaacgccaaccccaacgccaaccccaacgccaaccccaacgccaaccccaacgccaaccccaacgccaaccccaacgccaaccccaacgccaaccccaacgccaaccccaacgccaaccccaacaagaacaaccagggcaacggccagggccacaacaugcccaacgaccccaacagaaacguggacgagaacgccaacgccaacaacgccgugaagaacaacaacaacgaggagcccagcgacaagcacaucgagaaguaccugaaggagauccagaacagccugagcaccgaguggagccccugcagcgugaccugcggcaacggcauccaggugagaaucaagcccggcagcgccaacaagcccaaggaccagcuggacuacgagaacgacaucgagaagaagaucugcaagauggagaagugcagcagcguguucaacguggugaacagcagcaucggccugaucauggugcugagcuuccuguuccugaacuga

SEQ ID NO: 4619 - RNA, 1239 nt, Artificial Sequence
  derived and/or modified CDS sequence (opt4) from Pf(Tz93-035)__BAM84757.1__CSP
augaugagaaagcuggccauccugagcgugagcagcuuccuguucguggaggcccuguuccaggaguaccagugcuacggcagcagcagcaacaccagagugcugaacgagcugaacuacgacaacgccggcaccaaccuguacaacgagcuggagaugaacuacuacggcaagcaggagaacugguacagccugaagaagaacagcagaagccugggcgagaacgacgacggcaacaacaacaacggcgacaacggcagagagggcaaggacgaggacaagagagacggcaacaacgaggacaacgagaagcugagaaagcccaagcacaagaagcugaagcagcccggcgacggcaaccccgaccccaacgccaaccccaacguggaccccaacgccaaccccaacguggaccccaacgccaaccccaacguggaccccaacgccaaccccaacgccaaccccaacgccaaccccaacgccaaccccaacgccaaccccaacgccaaccccaacgccaaccccaacgccaaccccaacgccaaccccaacgccaaccccaacgccaaccccaacgccaaccccaacgccaaccccaacgccaaccccaacgccaaccccaacguggaccccaacgccaaccccaacgccaaccccaacgccaaccccaacgccaaccccaacgccaaccccaacgccaaccccaacgccaaccccaacgccaaccccaacgccaaccccaacgccaaccccaacgccaaccccaacgccaaccccaacgccaaccccaacgccaaccccaacgccaaccccaacgccaaccccaacgccaaccccaacgccaaccccaacgccaaccccaacaagaacaaccagggcaacggccagggccacaacaugcccaacgaccccaacagaaacguggacgagaacgccaacgccaacaacgccgugaagaacaacaacaacgaggagcccagcgacaagcacaucaccgaguaccugaagaagaucaagaacagcaucagcaccgaguggagccccugcagcgugaccugcggcaacggcauccaggugagaaucaagcccggcagcgccaacaagcccaaggacgagcuggacuacgagaacgacaucgagaagaagaucugcaagauggagaagugcagcagcguguucaacguggugaacagcagcaucggccugaucauggugcugagcuuccuguuccugaacuga

SEQ ID NO: 4620 - RNA, 1239 nt, Artificial Sequence
  derived and/or modified CDS sequence (opt4) from Pf(Tz93-041)__BAM84759.1__CSP
augaugagaaagcuggccauccugagcgugagcagcuuccuguucguggaggcccuguuccaggaguaccagugcuacggcagcagcagcaacaccagagugcugaacgagcugaacuacgacaacgccggcaccaaccuguacaacgagcuggagaugaacuacuacggcaagcaggagaacugguacagccugaagaagaacagcagaagccugggcgagaacgacgacggcaacaacaacaacggcgacaacggcagagagggcaaggacgaggacaagagagacggcaacaacgaggacaacgagaagcugagaaagcccaagcacaagaagcugaagcagcccggcgacggcaaccccgaccccaacgccaaccccaacguggaccccaacgccaaccccaacguggaccccaacgccaaccccaacguggaccccaacgccaaccccaacgccaaccccaacgccaaccccaacgccaaccccaacgccaaccccaacgccaaccccaacgccaaccccaacgccaaccccaacgccaaccccaacgccaaccccaacgccaaccccaacgccaaccccaacgccaaccccaacgccaaccccaacgccaaccccaacguggaccccaacgccaaccccaacgccaaccccaacgccaaccccaacgccaaccccaacgccaaccccaacgccaaccccaacgccaaccccaacgccaaccccaacgccaaccccaacgccaaccccaacgccaaccccaacgccaaccccaacgccaaccccaacgccaaccccaacgccaaccccaacgccaaccccaacgccaaccccaacgccaaccccaacgccaaccccaacaagaacaaccagggcaacggccagggccacaacaugcccaacgaccccaacagaaacguggacgagaacgccaacgccaacaacgccgugaagaacaacaacaacgaggagcccagcgacaagcacaucgagcaguaccugaagagaauccagaacagccugagcaccgaguggagccccugcagcgugaccugcggcaacggcauccaggugagaaucaagcccggcagcgccggcaagcccaaggacgagcuggacuacgccaacgacaucgagaagaagaucugcaagauggagaagugcagcagcguguucaacguggugaacagcagcaucggccugaucauggugcugagcuuccuguuccugaacuga

SEQ ID NO: 4621 - RNA, 1239 nt, Artificial Sequence
  derived and/or modified CDS sequence (opt4) from Pf(Tz93-051)__BAM84763.1__CSP
augaugagaaagcuggccauccugagcgugagcagcuuccuguucguggaggcccuguuccaggaguaccagugcuacggcagcagcagcaacaccagagugcugaacgagcugaacuacgacaacgccggcaccaaccuguacaacgagcuggagaugaacuacuacggcaagcaggagaacugguacagccugaagaagaacagcagaagccugggcgagaacgacgacggcaacaacaacaacggcgacaacggcagagagggcaaggacgaggacaagagagacggcaacaacgaggacaacgagaagcugagaaagcccaagcacaagaagcugaagcagcccggcgacggcaaccccgaccccaacgccaaccccaacguggaccccaacgccaaccccaacguggaccccaacgccaaccccaacguggaccccaacgccaaccccaacgccaaccccaacgccaaccccaacgccaaccccaacgccaaccccaacgccaaccccaacgccaaccccaacgccaaccccaacgccaaccccaacgccaaccccaacgccaaccccaacgccaaccccaacgccaaccccaacgccaaccccaacgccaaccccaacguggaccccaacgccaaccccaacgccaaccccaacgccaaccccaacgccaaccccaacgccaaccccaacgccaaccccaacgccaaccccaacgccaaccccaacgccaaccccaacgccaaccccaacgccaaccccaacgccaaccccaacgccaaccccaacgccaaccccaacgccaaccccaacgccaaccccaacgccaaccccaacgccaaccccaacgccaaccccaacaagaacaaccagggcaacggccagggccacaacaugcccaacgaccccaacagaaacguggacgagaacgccaacgccaacaacgccgugaagaacaacaacaacgaggagcccagcgacaagcacaucgagcaguaccugaacaagaucaagaacagcaucagcaccgaguggagccccugcagcgugaccugcggcaacggcauccaggugagaaucaagcccggcagcgccaacaagcccaaggacgagcugaacuacgagaacgacaucgagaagaagaucugcaagauggagaagugcagcagcguguucaacguggugaacagcagcaucggccugaucauggugcugagcuuccuguuccugaacuga

SEQ ID NO: 4622 - RNA, 1239 nt, Artificial Sequence
  derived and/or modified CDS sequence (opt4) from Pf(Tz93-052)__BAM84764.1__CSP
augaugagaaagcuggccauccugagcgugagcagcuuccuguucguggaggcccuguuccaggaguaccagugcuacggcagcagcagcaacaccagagugcugaacgagcugaacuacgacaacgccggcaccaaccuguacaacgagcuggagaugaacuacuacggcaagcaggagaacugguacagccugaagaagaacagcagaagccugggcgagaacgacgacggcaacaacaacaacggcgacaacggcagagagggcaaggacgaggacaagagagacggcaacaacgaggacaacgagaagcugagaaagcccaagcacaagaagcugaagcagcccggcgacggcaaccccgaccccaacgccaaccccaacguggaccccaacgccaaccccaacguggaccccaacgccaaccccaacguggaccccaacgccaaccccaacgccaaccccaacgccaaccccaacgccaaccccaacgccaaccccaacgccaaccccaacgccaaccccaacgccaaccccaacgccaaccccaacgccaaccccaacgccaaccccaacguggaccccaacgccaaccccaacgccaaccccaacgccaaccccaacgccaaccccaacgccaaccccaacgccaaccccaacgccaaccccaacgccaaccccaacgccaaccccaacgccaaccccaacgccaaccccaacgccaaccccaacgccaaccccaacgccaaccccaacgccaaccccaacgccaaccccaacgccaaccccaacgccaaccccaacgccaaccccaacgccaaccccaacgccaaccccaacgccaaccccaacgccaaccccaacaagaacaaccagggcaacggccagggccacaacaugcccaacgaccccaacagaaacguggacgagaacgccaacgccaacaacgccgugaagaacaacaacaacgaggagcccagcgaccagcacaucgagaaguaccugaagaucauccagaacagccugagcaccgaguggagccccugcagcgugaccugcggcaacggcauccaggugagaaucaagcccggcagcgccaacaagcccaaggaccagcuggacuacgccaacgacaucgagaagaagaucugcaagauggagaagugcagcagcguguucaacguggugaacagcagcaucggccugaucauggugcugagcuuccuguuccugaacuga

SEQ ID NO: 4623 - RNA, 1239 nt, Artificial Sequence
  derived and/or modified CDS sequence (opt4) from Pf(Tz93-061)__BAM84768.1__CSP
augaugagaaagcuggccauccugagcgugagcagcuuccuguucguggaggcccuguuccaggaguaccagugcuacggcagcagcagcaacaccagagugcugaacgagcugaacuacgacaacgccggcaccaaccuguacaacgagcuggagaugaacuacuacggcaagcaggagaacugguacagccugaagaagaacagcagaagccugggcgagaacgacgacggcaacaacaacaacggcgacaacggcagagagggcaaggacgaggacaagagagacggcaacaacgaggacaacgagaagcugagaaagcccaagcacaagaagcugaagcagcccgccgacggcaaccccgaccccaacgccaaccccaacguggaccccaacgccaaccccaacguggaccccaacgccaaccccaacguggaccccaacgccaaccccaacgccaaccccaacgccaaccccaacgccaaccccaacgccaaccccaacgccaaccccaacgccaaccccaacgccaaccccaacgccaaccccaacgccaaccccaacgccaaccccaacgccaaccccaacgccaaccccaacgccaaccccaacgccaaccccaacguggaccccaacgccaaccccaacgccaaccccaacgccaaccccaacgccaaccccaacgccaaccccaacgccaaccccaacgccaaccccaacgccaaccccaacgccaaccccaacgccaaccccaacgccaaccccaacgccaaccccaacgccaaccccaacgccaaccccaacgccaaccccaacgccaaccccaacgccaaccccaacgccaaccccaacgccaaccccaacaagaacaaccagggcaacggccagggccacaacaugcccaacgaccccaacagaaacguggacgagaacgccaacgccaacaacgccgugaagaacaacaacaacgaggagcccagcgaccagcacaucgagaaguaccugaagagaauccagaacagccugagcaccgaguggagccccugcagcgugaccugcggcaacggcauccaggugagaaucaagcccggcagcgccaacaagcccaaggaccagcuggacuacgccaacgacaucgagaagaagaucugcaagauggagaagugcagcagcguguucaacguggugaacagcagcaucggccugaucauggugcugagcuuccuguuccugaacuga

SEQ ID NO: 4624 - RNA, 1239 nt, Artificial Sequence
  derived and/or modified CDS sequence (opt4) from Pf(Tz93-075)__BAM84770.1__CSP
augaugagaaagcuggccauccugagcgugagcagcuuccuguucguggaggcccuguuccaggaguaccagugcuacggcagcagcagcaacaccagagugcugaacgagcugaacuacgacaacgccggcaccaaccuguacaacgagcuggagaugaacuacuacggcaagcaggagaacugguacagccugaagaagaacagcagaagccugggcgagaacgacgacggcaacaacaacaacggcgacaacggcagagagggcaaggacgaggacaagagagacggcaacaacgaggacaacgagaagcugagaaagcccaagcacaagaagcugaagcagcccggcgacggcaaccccgaccccaacgccaaccccaacguggaccccaacgccaaccccaacguggaccccaacgccaaccccaacguggaccccaacgccaaccccaacgccaaccccaacgccaaccccaacgccaaccccaacgccaaccccaacgccaaccccaacgccaaccccaacgccaaccccaacgccaaccccaacgccaaccccaacgccaaccccaacgccaaccccaacgccaaccccaacgccaaccccaacgccaaccccaacguggaccccaacgccaaccccaacgccaaccccaacgccaaccccaacgccaaccccaacgccaaccccaacgccaaccccaacgccaaccccaacgccaaccccaacgccaaccccaacgccaaccccaacgccaaccccaacgccaaccccaacgccaaccccaacgccaaccccaacgccaaccccaacgccaaccccaacgccaaccccaacgccaaccccaacgccaaccccaacaagaacaaccagggcaacggccagggccacaacaugcccaacgaccccaacagaaacguggacgagaacgccaacgccaacaacgccgugaagaacaacaacaacgaggagcccagcgacaagcacaucgagcaguaccugaagaccaucaagaacagccugagcaccgaguggagccccugcagcgugaccugcggcaacggcauccaggugagaaucaagcccggcagcgccaacaagcccaaggaccagcuggacuacgagaacgacaucgagaagaagaucugcaagauggagaagugcagcagcguguucaacguggugaacagcagcaucggccugaucauggugcugagcuuccuguuccugaacuga

SEQ ID NO: 4625 - RNA, 1239 nt, Artificial Sequence
  derived and/or modified CDS sequence (opt4) from Pf(Tz93-113)__BAM84775.1__CSP
augaugagaaagcuggccauccugagcgugagcagcuuccuguucguggaggcccuguuccaggaguaccagugcuacggcagcagcagcaacaccagagugcugaacgagcugaacuacgacaacgccggcaccaaccuguacaacgagcuggagaugaacuacuacggcaagcaggagaacugguacagccugaagaagaacagcagaagccugggcgagaacgacgacggcaacaacaacaacggcgacaacggcagagagggcaaggacgaggacaagagagacggcaacaacgaggacaacgagaagcugagaaagcccaagcacaagaagcugaagcagcccggcgacggcaaccccgaccccaacgccaaccccaacguggaccccaacgccaaccccaacguggaccccaacgccaaccccaacguggaccccaacgccaaccccaacgccaaccccaacgccaaccccaacgccaaccccaacgccaaccccaacgccaaccccaacgccaaccccaacgccaaccccaacgccaaccccaacgccaaccccaacgccaaccccaacgccaaccccaacgccaaccccaacgccaaccccaacgccaaccccaacgccaaccccaacguggaccccaacgccaaccccaacgccaaccccaacgccaaccccaacgccaaccccaacgccaaccccaacgccaaccccaacgccaaccccaacgccaaccccaacgccaaccccaacgccaaccccaacgccaaccccaacgccaaccccaacgccaaccccaacgccaaccccaacgccaaccccaacgccaaccccaacgccaaccccaacgccaaccccaacaagaacaaccagggcaacggccagggccacaacaugcccaacgaccccaacagaaacguggacgagaacgccaacgccaacaacgccgugaagaacaacaacaacgaggagcccagcgacaagcacaucgagcaguaccugaacaagaucaagaacagcaucagcaccgaguggagccccugcagcgugaccugcggcaacggcauccaggugagaaucaagcccggcagcgccaacaagcccaaggacgagcugaacuacgagaacgacaucgagaagaagaucugcaagauggagaagugcagcagcguguucaacguggugaacagcagcaucggccugaucauggugcugagcuuccuguuccugaacuga

SEQ ID NO: 4626 - RNA, 1239 nt, Artificial Sequence
  derived and/or modified CDS sequence (opt4) from Pf(Tz93-123)__BAM84778.1__CSP
augaugagaaagcuggccauccugagcgugagcagcuuccuguucguggaggcccuguuccaggaguaccagugcuacggcagcagcagcaacaccagagugcugaacgagcugaacuacgacaacgccggcaccaaccuguacaacgagcuggagaugaacuacuacggcaagcaggagaacugguacagccugaagaagaacagcagaagccugggcgagaacgacgacggcaacaacaacaacggcgacaacggcagagagggcaaggacgaggacaagagagacggcaacaacgaggacaacgagaagcugagaaagcccaagcacaagaagcugaagcagcccgccgacggcaaccccgaccccaacgccaaccccaacguggaccccaacgccaaccccaacguggaccccaacgccaaccccaacguggaccccaacgccaaccccaacgccaaccccaacgccaaccccaacgccaaccccaacgccaaccccaacgccaaccccaacgccaaccccaacgccaaccccaacgccaaccccaacgccaaccccaacgccaaccccaacgccaaccccaacgccaaccccaacgccaaccccaacgccaaccccaacguggaccccaacgccaaccccaacgccaaccccaacgccaaccccaacgccaaccccaacgccaaccccaacgccaaccccaacgccaaccccaacgccaaccccaacgccaaccccaacgccaaccccaacgccaaccccaacgccaaccccaacgccaaccccaacgccaaccccaacgccaaccccaacgccaaccccaacgccaaccccaacgccaaccccaacgccaaccccaacaagaacaaccagggcaacggccagggccacaacaugcccaacgaccccaacagaaacguggacgagaacgccaacgccaacaacgccgccaagaacaacaacaacgaggagcccagcgaccagcacaucgagaaguaccugaagaccauccagaacagccugagcaccgaguggagccccugcagcgugaccugcggcaacggcauccaggugagaaucaagcccggcagcgccaacaagcccaaggaccagcuggacuacgccaacgacaucgagaagaagaucugcaagauggagaagugcagcagcguguucaacguggugaacagcagcaucggccugaucauggugcugagcuuccuguuccugaacuga

SEQ ID NO: 4627 - RNA, 1239 nt, Artificial Sequence
  derived and/or modified CDS sequence (opt4) from Pf(Tz93-124)__BAM84779.1__CSP
augaugagaaagcuggccauccugagcgugagcagcuuccuguucguggaggcccuguuccaggaguaccagugcuacggcagcagcagcaacaccagagugcugaacgagcugaacuacgacaacgccggcaccaaccuguacaacgagcuggagaugaacuacuacggcaagcaggagaacugguacagccugaagaagaacagcagaagccugggcgagaacgacgacggcaacaacaacaacggcgacaacggcagagagggcaaggacgaggacaagagagacggcaacaacgaggacaacgagaagcugagaaagcccaagcacaagaagcugaagcagcccgccgacggcaaccccgaccccaacgccaaccccaacguggaccccaacgccaaccccaacguggaccccaacgccaaccccaacguggaccccaacgccaaccccaacgccaaccccaacgccaaccccaacgccaaccccaacgccaaccccaacgccaaccccaacgccaaccccaacgccaaccccaacgccaaccccaacgccaaccccaacgccaaccccaacgccaaccccaacgccaaccccaacgccaaccccaacgccaaccccaacguggaccccaacgccaaccccaacgccaaccccaacgccaaccccaacgccaaccccaacgccaaccccaacgccaaccccaacgccaaccccaacgccaaccccaacgccaaccccaacgccaaccccaacgccaaccccaacgccaaccccaacgccaaccccaacgccaaccccaacgccaaccccaacgccaaccccaacgccaaccccaacgccaaccccaacgccaaccccaacaagaacaaccagggcaacggccagggccacaacaugcccaacgaccccaacagaaacguggacgagaacgccaacgccaacaacgccgugaagaacaacaacaacgaggagcccagcgacaagcacaucgagcaguaccugaagaccaucaagaacagccugagcaccgaguggagccccugcagcgugaccugcggcaacggcauccaggugagaaucaagcccggcagcgccgacaagcccaaggaccagcuggacuacaucaacgacaucgagaagaagaucugcaagauggagaagugcagcagcguguucaacguggugaacagcagcaucggccugaucauggugcugagcuuccuguuccugaacuga

SEQ ID NO: 4628 - RNA, 1239 nt, Artificial Sequence
  derived and/or modified CDS sequence (opt4) from Pf(Tz98-009)__BAM84781.1__CSP
augaugagaaagcuggccauccugagcgugagcagcuuccuguucguggaggcccuguuccaggaguaccagugcuacggcagcagcagcaacaccagagugcugaacgagcugaacuacgacaacgccggcaccaaccuguacaacgagcuggagaugaacuacuacggcaagcaggagaacugguacagccugaagaagaacagcagaagccugggcgagaacgacgacggcaacaacaacaacggcgacaacggcagagagggcaaggacgaggacaagagagacggcaacaacgaggacaacgagaagcugagaaagcccaagcacaagaagcugaagcagcccgccgacggcaaccccgaccccaacgccaaccccaacguggaccccaacgccaaccccaacguggaccccaacgccaaccccaacguggaccccaacgccaaccccaacgccaaccccaacgccaaccccaacgccaaccccaacgccaaccccaacgccaaccccaacgccaaccccaacgccaaccccaacgccaaccccaacgccaaccccaacgccaaccccaacgccaaccccaacgccaaccccaacgccaaccccaacgccaaccccaacguggaccccaacgccaaccccaacgccaaccccaacgccaaccccaacgccaaccccaacgccaaccccaacgccaaccccaacgccaaccccaacgccaaccccaacgccaaccccaacgccaaccccaacgccaaccccaacgccaaccccaacgccaaccccaacgccaaccccaacgccaaccccaacgccaaccccaacgccaaccccaacgccaaccccaacgccaaccccaacaagaacaaccagggcaacggccagggccacaacaugcccaacgaccccaacagaaacguggacgagaacgccaacgccaacaacgccgugaagaacaacaacaacgaggagcccagcgacaagcacaucaaggaguaccugaacaagauccagaacagcaucagcaccgaguggagccccugcagcgugaccugcggcaacggcauccaggugagaaucaagcccggcagcgccgacaagcccaaggaccagcuggacuacaucaacgacaucgagaagaagaucugcaagauggagaagugcagcagcguguucaacguggugaacagcagcaucggccugaucauggugcugagcuuccuguuccugaacuga

SEQ ID NO: 4629 - RNA, 1239 nt, Artificial Sequence
  derived and/or modified CDS sequence (opt4) from Pf(Tz98-049)__BAM84789.1__CSP
augaugagaaagcuggccauccugagcgugagcagcuuccuguucguggaggcccuguuccaggaguaccagugcuacggcagcagcagcaacaccagagugcugaacgagcugaacuacgacaacgccggcaccaaccuguacaacgagcuggagaugaacuacuacggcaagcaggagaacugguacagccugaagaagaacagcagaagccugggcgagaacgacgacggcaacaacaacaacggcgacaacggcagagagggcaaggacgaggacaagagagacggcaacaacgaggacaacgagaagcugagaaagcccaagcacaagaagcugaagcagcccgccgacggcaaccccgaccccaacgccaaccccaacguggaccccaacgccaaccccaacguggaccccaacgccaaccccaacguggaccccaacgccaaccccaacgccaaccccaacgccaaccccaacgccaaccccaacgccaaccccaacgccaaccccaacgccaaccccaacgccaaccccaacgccaaccccaacgccaaccccaacgccaaccccaacgccaaccccaacgccaaccccaacgccaaccccaacgccaaccccaacguggaccccaacgccaaccccaacgccaaccccaacgccaaccccaacgccaaccccaacgccaaccccaacgccaaccccaacgccaaccccaacgccaaccccaacgccaaccccaacgccaaccccaacgccaaccccaacgccaaccccaacgccaaccccaacgccaaccccaacgccaaccccaacgccaaccccaacgccaaccccaacgccaaccccaacgccaaccccaacaagaacaaccagggcaacggccagggccacaacaugcccaacgaccccaacagaaacguggacgagaacgccaacgccaacaacgccgugaagaacaacaacaacgaggagcccagcgacaagcacaucgagcaguaccugaagaccaucaagaacagccugagcaccgaguggagccccugcagcgugaccugcggcaacggcauccaggugagaaucaagcccggcagcgccaacaagcccaaggaccagcuggacuacgagaacgacaucgagaagaagaucugcaagauggagaagugcagcagcguguucaacguggugaacagcagcaucggccugaucauggugcugagcuuccuguuccugaacuga

SEQ ID NO: 4630 - RNA, 1239 nt, Artificial Sequence
  derived and/or modified CDS sequence (opt4) from Pf(Tz98-084)__BAM84792.1__CSP
augaugagaaagcuggccauccugagcgugagcagcuuccuguucguggaggcccuguuccaggaguaccagugcuacggcagcagcagcaacaccagagugcugaacgagcugaacuacgacaacgccggcaccaaccuguacaacgagcuggagaugaacuacuacggcaagcaggagaacugguacagccugaagaagaacagcagaagccugggcgagaacgacgacggcaacaacaacaacggcgacaacggcagagagggcaaggacgaggacaagagagacggcaacaacgaggacaacgagaagcugagaaagcccaagcacaagaagcugaagcagcccgccgacggcaaccccgaccccaacgccaaccccaacguggaccccaacgccaaccccaacguggaccccaacgccaaccccaacguggaccccaacgccaaccccaacgccaaccccaacgccaaccccaacgccaaccccaacgccaaccccaacgccaaccccaacgccaaccccaacgccaaccccaacgccaaccccaacgccaaccccaacgccaaccccaacgccaaccccaacgccaaccccaacgccaaccccaacgccaaccccaacguggaccccaacgccaaccccaacgccaaccccaacgccaaccccaacgccaaccccaacgccaaccccaacgccaaccccaacgccaaccccaacgccaaccccaacgccaaccccaacgccaaccccaacgccaaccccaacgccaaccccaacgccaaccccaacgccaaccccaacgccaaccccaacgccaaccccaacgccaaccccaacgccaaccccaacgccaaccccaacaagaacaaccagggcaacggccagggccacaacaugcccaacgaccccaacagaaacguggacgagaacgccaacgccaacaacgccgugaagaacaacaacaacgaggagcccagcgaccagcacaucgagaaguaccugaacaagauccagaacagccugagcaccgaguggagccccugcagcgugaccugcggcaacggcauccaggugagaaucaagcccggcagcgccaacaagcccaaggaccagcuggacuacgccaacgacaucgagaagaagaucugcaagauggagaagugcagcagcguguucaacguggugaacagcagcaucggccugaucauggugcugagcuuccuguuccugaacuga

SEQ ID NO: 4631 - RNA, 1239 nt, Artificial Sequence
  derived and/or modified CDS sequence (opt4) from Pf(Tz98-119)__BAM84797.1__CSP
augaugagaaagcuggccauccugagcgugagcagcuuccuguucguggaggcccuguuccaggaguaccagugcuacggcagcagcagcaacaccagagugcugaacgagcugaacuacgacaacgccggcaccaaccuguacaacgagcuggagaugaacuacuacggcaagcaggagaacugguacagccugaagaagaacagcagaagccugggcgagaacgacgacggcaacaacaacaacggcgacaacggcagagagggcaaggacgaggacaagagagacggcaacaacgaggacaacgagaagcugagaaagcccaagcacaagaagcugaagcagcccgccgacggcaaccccgaccccaacgccaaccccaacguggaccccaacgccaaccccaacguggaccccaacgccaaccccaacguggaccccaacgccaaccccaacgccaaccccaacgccaaccccaacgccaaccccaacgccaaccccaacgccaaccccaacgccaaccccaacgccaaccccaacgccaaccccaacgccaaccccaacgccaaccccaacgccaaccccaacgccaaccccaacgccaaccccaacgccaaccccaacguggaccccaacgccaaccccaacgccaaccccaacgccaaccccaacgccaaccccaacgccaaccccaacgccaaccccaacgccaaccccaacgccaaccccaacgccaaccccaacgccaaccccaacgccaaccccaacgccaaccccaacgccaaccccaacgccaaccccaacgccaaccccaacgccaaccccaacgccaaccccaacgccaaccccaacgccaaccccaacaagaacaaccagggcaacggccagggccacaacaugcccaacgaccccaacagaaacguggacgagaacgccaacgccaacaacgccgugaagaacaacaacaacgaggagcccagcgaccagcacaucgagaaguaccugaagaccauccagaacagccugagcaccgaguggagccccugcagcgugaccugcggcaacggcauccaggugagaaucaagcccggcagcgccaacaagcccaaggaccagcuggacuacgccaacgacaucgagaagaagaucugcaagauggagaagugcagcagcguguucaacguggugaacagcagcaucggccugaucauggugcugagcuuccuguuccugaacuga

SEQ ID NO: 4632 - RNA, 1239 nt, Artificial Sequence
  derived and/or modified CDS sequence (opt4) from Pf(Yaounde)__AAN87602.1__CSP
augaugagaaagcuggccauccugagcgugagcagcuuccuguucguggaggcccuguuccaggaguaccagugcuacggcagcagcagcaacaccagagugcugaacgagcugaacuacgacaacgccggcaccaaccuguacaacgagcuggagaugaacuacuacggcaagcaggagaacugguacagccugaagaagaacagcagaagccugggcgagaacgacgacggcaacaacaacaacggcgacaacggcagagagggcaaggacgaggacaagagagacggcaacaacgaggacaacgagaagcugagaaagcccaagcacaagaagcugaagcagcccgccgacggcaaccccgaccccaacgccaaccccaacguggaccccaacgccaaccccaacguggaccccaacgccaaccccaacguggaccccaacgccaaccccaacgccaaccccaacgccaaccccaacgccaaccccaacgccaaccccaacgccaaccccaacgccaaccccaacgccaaccccaacgccaaccccaacgccaaccccaacgccaaccccaacgccaaccccaacgccaaccccaacgccaaccccaacgccaaccccaacguggaccccaacgccaaccccaacgccaaccccaacgccaaccccaacgccaaccccaacgccaaccccaacgccaaccccaacgccaaccccaacgccaaccccaacgccaaccccaacgccaaccccaacgccaaccccaacgccaaccccaacgccaaccccaacgccaaccccaacgccaaccccaacgccaaccccaacgccaaccccaacgccaaccccaacgccaaccccaacaagaacaaccagggcaacggccagggccacaacaugcccaacgaccccaacagaaacguggacgagaacgccaacgccaacaacgccgugaagaacaacaacaacgaggagcccagcgaccagcacaucgagaaguaccugaacaagaucaagaacagccugagcaccgaguggagccccugcagcgugaccugcggcaacggcauccaggugagaaucaagcccggcagcgccaacaagcccaaggaccagcuggacuacgccaacgacaucgagaagaagaucugcaagauggagaagugcagcagcguguucaacguggugaacagcagcaucggccugaucauggugcugagcuuccuguuccugaacuga

SEQ ID NO: 4633 - RNA, 1239 nt, Artificial Sequence
  derived and/or modified CDS sequence (opt4) from Pf(Yaounde)__AAN87587.1__CSP
augaugagaaagcuggccauccugagcgugagcagcuuccuguucguggaggcccuguuccaggaguaccagugcuacggcagcagcagcaacaccagagugcugaacgagcugaacuacgacaacgccggcaccaaccuguacaacgagcuggagaugaacuacuacggcaagcaggagaacugguacagccugaagaagaacagcagaagccugggcgagaacgacgacggcaacaacaacaacggcgacaacggcagagagggcaaggacgaggacaagagagacggcaacaacgaggacaacgagaagcugagaaagcccaagcacaagaagcugaagcagcccgccgacggcaaccccgaccccaacgccaaccccaacguggaccccaacgccaaccccaacguggaccccaacgccaaccccaacguggaccccaacgccaaccccaacgccaaccccaacgccaaccccaacgccaaccccaacgccaaccccaacgccaaccccaacgccaaccccaacgccaaccccaacgccaaccccaacgccaaccccaacgccaaccccaacgccaaccccaacgccaaccccaacgccaaccccaacgccaaccccaacguggaccccaacgccaaccccaacgccaaccccaacgccaaccccaacgccaaccccaacgccaaccccaacgccaaccccaacgccaaccccaacgccaaccccaacgccaaccccaacgccaaccccaacgccaaccccaacgccaaccccaacgccaaccccaacgccaaccccaacgccaaccccaacgccaaccccaacgccaaccccaacgccaaccccaacgccaaccccaacaagaacaaccagggcaacggccagggccacaacaugcccaacgaccccaacagaaacguggacgagaacgccaacgccaacaacgccgugaagaacaacaacaacgaggagcccagcgaccagcacaucgagaaguaccugaagaccaucaagaacagccugagcaccgaguggagccccugcagcgugaccugcggcaacggcauccaggugagaaucaagcccggcagcgccaacaagcccaaggaccagcuggacuacgccaacgacaucgagaagaagaucugcaagauggagaagugcagcagcguguucaacguggugaacagcagcaucggccugaucauggugcugagcuuccuguuccugaacuga

SEQ ID NO: 4634 - RNA, 1236 nt, Artificial Sequence
  derived and/or modified CDS sequence (opt4) from Pf(A107)__ACO49330.1__CSP
augagaaagcuggccauccugagcgugagcagcuuccuguucguggaggcccuguuccaggaguaccagugcuacggcagcagcagcaacaccagagugcugaacgagcugaacuacgacaacgccggcaccaaccuguacaacgagcuggagaugaacuacuacggcaagcaggagaacugguacagccugaagaagaacagcagaagccugggcgagaacgacgacggcaacaacaacaacggcgacaacggcagagagggcaaggacgaggacaagagagacggcaacaacgaggacaacgagaagcugagaaagcccaagcacaagaagcugaagcagcccggcgacggcaaccccgaccccaacgccaaccccaacguggaccccaacgccaaccccaacguggaccccaacgccaaccccaacguggaccccaacgccaaccccaacgccaaccccaacgccaaccccaacgccaaccccaacgccaaccccaacgccaaccccaacgccaaccccaacgccaaccccaacgccaaccccaacgccaaccccaacgccaaccccaacgccaaccccaacgccaaccccaacgccaaccccaacgccaaccccaacgccaaccccaacgccaaccccaacgccaaccccaacgccaaccccaacgccaaccccaacgccaaccccaacgccaaccccaacgccaaccccaacgccaaccccaacgccaaccccaacgccaaccccaacgccaaccccaacgccaaccccaacgccaaccccaacgccaaccccaacgccaaccccaacgccaaccccaacgccaaccccaacgccaaccccaacgccaaccccaacaagaacaaccagggcaacggccagggccacaacaugcccaacgaccccaacagaaacguggacgagaacgccaacgccaacaacgccgugaagaacaacaacaacgaggagcccagcgacaagcacaucgagcaguaccugaagaagauccagaacagccugagcaccgaguggagccccugcagcgugaccugcggcaacggcauccaggugagaaucaagcccggcagcgccaacaagcccaaggacgagcuggacuacgagaacgacaucgagaagaagaucugcaagauggagaagugcagcagcguguucaacguggugaacagcagcaucggccugaucauggugcugagcuuccuguuccugaacuga

SEQ ID NO: 4635 - RNA, 1233 nt, Artificial Sequence
  derived and/or modified CDS sequence (opt4) from Pf(IT)____CSP
augaugagaaagcuggccauccugagcgugagcagcuuccuguucguggaggcccuguuccaggaguaccagugcuacggcagcagcagcaacaccagagugcugaacgagcugaacuacgacaacgccggcaccaaccuguacaacgagcuggagaugaacuacuacggcaagcaggagaacugguacagccugaagaagaacagcagaagccugggcgagaacgacgacggcgacaacgacaacggcaacaacaacaacggcaacaacaacaacggcgacaacggcagagagggcaaggacgaggacaagagagacggcaacaacgaggacaacgagaagcugagaaagcccaagcacaagaagcugaagcagcccggcgacgacaaccccgaccccaacgccaaccccaacguggaccccaacgccaaccccaacguggaccccaacgccaaccccaacgccaaccccaacgccaaccccaacgccaaccccaacgccaaccccaacgccaaccccaacgccaaccccaacguggaccccaacgccaaccccaacgccaaccccaacgccaaccccaacgccaaccccaacgccaaccccaacgccaaccccaacgccaaccccaacgccaaccccaacgccaaccccaacgccaaccccaacgccaaccccaacgccaaccccaacgccaaccccaacgccaaccccaacgccaaccccaacgccaaccccaacgccaaccccaacgccaaccccaacgccaaccccaacgccaaccccaacgccaaccccaacgccaaccccaacgccaaccccaacgccaaccccaacgccaaccccaacgccaaccccaacaagaacaaccagggcaacggccagggccacaacaugcccaacgaccccaacagaaacguggacgagaacgccaacgccaacaacgccgugaagaacaacaacaacgaggagcccagcgacaagcacaucgagcaguaccugaagaagauccagaacagccugagcaccgaguggagccccugcagcgugaccugcggcaacggcauccaggugagaaucaagcccggcagcgccgacaagcccaaggaccagcuggacuacgagaacgacaucgagaagaagaucugcaagauggagaagugcagcagcguguucaacguggugaacagcagcaucggccugaucauggugcugagcuuccuguuccugaacuga

SEQ ID NO: 4636 - RNA, 1227 nt, Artificial Sequence
  derived and/or modified CDS sequence (opt4) from Pf(14)__AGR53782.1__CSP
augaugagaaagcuggccauccugagcgugagcagcuuccuguucguggaggcccuguuccaggaguaccagugcuacggcagcagcagcaacaccagagugcugaacgagcugaacuacgacaacgccggcaccaaccuguacaacgagcuggagaugaacuacuacggcaagcaggagaacugguacagccugaagaagaacagcagaagccugggcgagaacgacgacggcaacaacaacaacggcgacaacggcagagagggcaaggacgaggacaagagagacggcaacaacgaggacaacgagaagcugagaaagcccaagcacaagaagcugaagcagcccggcgacggcaaccccgaccccaacgccaaccccaacguggaccccaacgccaaccccaacguggaccccaacgccaaccccaacguggaccccaacgccaaccccaacgccaaccccaacgccaaccccaacgccaaccccaacgccaaccccaacgccaaccccaacgccaaccccaacgccaaccccaacgccaaccccaacgccaaccccaacgccaaccccaacguggaccccaacgccaaccccaacgccaaccccaacgccaaccccaacgccaaccccaacgccaaccccaacgccaaccccaacgccaaccccaacgccaaccccaacgccaaccccaacgccaaccccaacgccaaccccaacgccaaccccaacgccaaccccaacgccaaccccaacgccaaccccaacgccaaccccaacgccaaccccaacgccaaccccaacgccaaccccaacgccaaccccaacgccaaccccaacgccaaccccaacaagaacaaccagggcaacggccagggccacaacaugcccaacgaccccaacagaaacguggacgagaacgccaacgccaacaacgccgugaagaacaacaacaacgaggagcccagcgaccagcacaucgagaaguaccugcagaagauccagaacagccugagcaccgaguggagccccugcagcgugaccugcggcaacggcauccaggugagaaucaagcccggcagcgccaacaagcccaaggaccagcugaacuacgagaacgacaucggcaagaagaucugcaagauggagaagugcagcagcguguucaacguggugaacagcagcaucggccugaucauggugcugagcuuccuguuccugaacuga

SEQ ID NO: 4637 - RNA, 1227 nt, Artificial Sequence
  derived and/or modified CDS sequence (opt4) from Pf(Asembo Bay)__AAN87609.1__CSP
augaugagaaagcuggccauccugagcgugagcagcuuccuguucguggaggcccuguuccaggaguaccagugcuacggcagcagcagcaacaccagagugcugaacgagcugaacuacgacaacgccggcaccaaccuguacaacgagcuggagaugaacuacuacggcaagcaggagaacugguacagccugaagaagaacagcagaagccugggcgagaacgacgacggcaacaacaacaacggcgacaacggcagagagggcaaggacgaggacaagagagacggcaacaacgaggacaacgagaagcugagaaagcccaagcacaagaagcugaagcagcccgccgacggcaaccccgaccccaacgccaaccccaacguggaccccaacgccaaccccaacguggaccccaacgccaaccccaacguggaccccaacgccaaccccaacgccaaccccaacgccaaccccaacgccaaccccaacgccaaccccaacgccaaccccaacgccaaccccaacgccaaccccaacgccaaccccaacgccaaccccaacgccaaccccaacgccaaccccaacgccaaccccaacgccaaccccaacguggaccccaacgccaaccccaacgccaaccccaacgccaaccccaacgccaaccccaacgccaaccccaacgccaaccccaacgccaaccccaacgccaaccccaacgccaaccccaacgccaaccccaacgccaaccccaacgccaaccccaacgccaaccccaacgccaaccccaacgccaaccccaacgccaaccccaacgccaaccccaacgccaaccccaacgccaaccccaacaagaacaaccagggcaacggccagggccacaacaugcccaacaaccccaacagaaacguggacgagaacgccaacgccaacaacgccgugaagaacaacaacaacgaggagcccagcgacaagcacaucgagcaguaccugaagaccauccagaacagccugagcaccgaguggagccccugcagcgugaccugcggcaacggcauccaggugagaaucaagcccggcagcgccaacaagcccaaggaccagcuggacuacgccaacgacaucgagaagaagaucugcaagauggagaagugcagcagcguguucaacguggugaacagcagcaucggccugaucauggugcugagcuuccuguuccugaacuga

SEQ ID NO: 4638 - RNA, 1227 nt, Artificial Sequence
  derived and/or modified CDS sequence (opt4) from Pf(Bolivar)__AAN87613.1__CSP
augaugagaaagcuggccauccugagcgugagcagcuuccuguucguggaggcccuguuccaggaguaccagugcuacggcagcagcagcaacaccagagugcugaacgagcugaacuacgacaacgccggcaccaaccuguacaacgagcuggagaugaacuacuacggcaagcaggagaacugguacagccugaagaagaacagcagaagccugggcgagaacgacgacggcaacaacaacaacggcgacaacggcagagagggcaaggacgaggacaagagagacggcaacaacgaggacaacgagaagcugagaaagcccaagcacaagaagcugaagcagcccggcgacggcaaccccgaccccaacgccaaccccaacguggaccccaacgccaaccccaacguggaccccaacgccaaccccaacguggaccccaacgccaaccccaacgccaaccccaacgccaaccccaacgccaaccccaacgccaaccccaacgccaaccccaacgccaaccccaacgccaaccccaacgccaaccccaacgccaaccccaacgccaaccccaacguggaccccaacgccaaccccaacgccaaccccaacgccaaccccaacgccaaccccaacgccaaccccaacgccaaccccaacgccaaccccaacgccaaccccaacgccaaccccaacgccaaccccaacgccaaccccaacgccaaccccaacgccaaccccaacgccaaccccaacgccaaccccaacgccaaccccaacgccaaccccaacgccaaccccaacgccaaccccaacgccaaccccaacgccaaccccaacgccaaccccaacaagaacaaccagggcaacggccagggccacaacaugcccaacgaccccaacagaaacguggacgagaacgccaacgccaacaacgccgugaagaacaacaacaacgaggagcccagcgacaagcacaucgagcaguaccugaagaagauccagaacgcccugagcaccgaguggagccccugcagcgugaccugcggcaacggcauccaggugagaaucaagcccggcagcgccaacaagcccaaggaccagcuggacuacgagaacgacaucgagaagaagaucugcaagauggagaagugcagcagcguguucaacguggugaacagcagcaucggccugaucauggugcugagcuuccuguuccugaacuga

SEQ ID NO: 4639 - RNA, 1227 nt, Artificial Sequence
  derived and/or modified CDS sequence (opt4) from Pf(Br419M3)__BAM85120.1__CSP
augaugagaaagcuggccauccugagcgugagcagcuuccuguucguggaggcccuguuccaggaguaccagugcuacggcagcagcagcaacaccagagugcugaacgagcugaacuacgacaacgccggcaccaaccuguacaacgagcuggagaugaacuacuacggcaagcaggagaacugguacagccugaagaagaacagcagaagccugggcgagaacgacgacggcaacaacaacaacggcgacaacggcagagagggcaaggacgaggacaagagagacggcaacaacgaggacaacgagaagcugagaaagcccaagcacaagaagcugaagcagcccgccgacggcaaccccgaccccaacgccaaccccaacguggaccccaacgccaaccccaacguggaccccaacgccaaccccaacguggaccccaacgccaaccccaacgccaaccccaacgccaaccccaacgccaaccccaacgccaaccccaacgccaaccccaacgccaaccccaacgccaaccccaacgccaaccccaacgccaaccccaacgccaaccccaacgccaaccccaacgccaaccccaacgccaaccccaacgccaaccccaacguggaccccaacgccaaccccaacgccaaccccaacgccaaccccaacgccaaccccaacgccaaccccaacgccaaccccaacgccaaccccaacgccaaccccaacgccaaccccaacgccaaccccaacgccaaccccaacgccaaccccaacgccaaccccaacgccaaccccaacgccaaccccaacgccaaccccaacgccaaccccaacgccaaccccaacaagaacaaccagggcaacggccagggccacaacaugcccaacaaccccaacagaaacguggacgagaacgccaacgccaacaacgccgugaagaacaacaacaacgaggagcccagcgacaagcacaucgagcaguaccugaagaagauccagaacagccugagcaccgaguggagccccugcagcgugaccugcggcaacggcauccaggugagaaucaagcccggcagcgccggcaagagcaaggacgagcuggacuacgagaacgacaucgagaagaagaucugcaagauggagaagugcagcagcguguucaacguggugaacagcagcaucggccugaucauggugcugagcuuccuguuccugaacuga

SEQ ID NO: 4640 - RNA, 1227 nt, Artificial Sequence
  derived and/or modified CDS sequence (opt4) from Pf(Gha1110-003)__BAM84840.1__CSP
augaugagaaagcuggccauccugagcgugagcagcuuccuguucguggaggcccuguuccaggaguaccagugcuacggcagcagcagcaacaccagagugcugaacgagcugaacuacgacaacgccggcaccaaccuguacaacgagcuggagaugaacuacuacggcaagcaggagaacugguacagccugaagaagaacagcagaagccugggcgagaacgacgacggcaacaacaacaacggcgacaacggcagagagggcaaggacgaggacaagagagacggcaacaacgaggacaacgagaagcugagaaagcccaagcacaagaagcugaagcagcccgccgacggcaaccccgaccccaacgccaaccccaacguggaccccaacgccaaccccaacguggaccccaacgccaaccccaacguggaccccaacgccaaccccaacgccaaccccaacgccaaccccaacgccaaccccaacgccaaccccaacgccaaccccaacgccaaccccaacgccaaccccaacgccaaccccaacgccaaccccaacgccaaccccaacgccaaccccaacgccaaccccaacgccaaccccaacguggaccccaacgccaaccccaacgccaaccccaacgccaaccccaacgccaaccccaacgccaaccccaacgccaaccccaacgccaaccccaacgccaaccccaacgccaaccccaacgccaaccccaacgccaaccccaacgccaaccccaacgccaaccccaacgccaaccccaacgccaaccccaacgccaaccccaacgccaaccccaacgccaaccccaacgccaaccccaacaagaacaaccagggcaacggccagggccacaacaugcccaacgaccccaacagaaacguggacgagaacgccaacgccaacaacgccgugaagaacaacaacaacgaggagcccagcgaccagcacaucgagaaguaccugaagaccaucaagaacagccugagcaccgaguggagccccugcagcgugaccugcggcaacggcauccaggugagaaucaagcccggcagcgccaacaagcccaaggaccagcuggacuacgccaacgacaucgagaagaagaucugcaagauggagaagugcagcagcguguucaacguggugaacagcagcaucggccugaucauggugcugagcuuccuguuccugaacuga

SEQ ID NO: 4641 - RNA, 1227 nt, Artificial Sequence
  derived and/or modified CDS sequence (opt4) from Pf(Tz03-032)__BAM84799.1__CSP
augaugagaaagcuggccauccugagcgugagcagcuuccuguucguggaggcccuguuccaggaguaccagugcuacggcagcagcagcaacaccagagugcugaacgagcugaacuacgacaacgccggcaccaaccuguacaacgagcuggagaugaacuacuacggcaagcaggagaacugguacagccugaagaagaacagcagaagccugggcgagaacgacgacggcaacaacaacaacggcgacaacggcagagagggcaaggacgaggacaagagagacggcaacaacgaggacaacgagaagcugagaaagcccaagcacaagaagcugaagcagcccgccgacggcaaccccgaccccaacgccaaccccaacguggaccccaacgccaaccccaacguggaccccaacgccaaccccaacguggaccccaacgccaaccccaacgccaaccccaacgccaaccccaacgccaaccccaacgccaaccccaacgccaaccccaacgccaaccccaacgccaaccccaacgccaaccccaacgccaaccccaacguggaccccaacgccaaccccaacgccaaccccaacgccaaccccaacgccaaccccaacgccaaccccaacgccaaccccaacgccaaccccaacgccaaccccaacgccaaccccaacgccaaccccaacgccaaccccaacgccaaccccaacgccaaccccaacgccaaccccaacgccaaccccaacgccaaccccaacgccaaccccaacgccaaccccaacgccaaccccaacgccaaccccaacgccaaccccaacgccaaccccaacgccaaccccaacaagaacaaccagggcaacggccagggccacaacaugcccaacgaccccaacagaaacguggacgagaacgccaacgccaacaacgccgugaagaacaacaacaacgaggagcccagcgaccagcacaucgagaaguaccugaagaagauccagaacagccugagcaccgaguggagccccugcagcgugaccugcggcaacggcauccaggugagaaucaagcccggcagcgccaacaagcccaaggaccagcuggacuacgccaacgacaucgagaagaagaucugcaagauggagaagugcagcagcguguucaacguggugaacagcagcaucggccugaucauggugcugagcuuccuguuccugaacuga

SEQ ID NO: 4642 - RNA, 1227 nt, Artificial Sequence
  derived and/or modified CDS sequence (opt4) from Pf(Tz03-033)__BAM84800.1__CSP
augaugagaaagcuggccauccugagcgugagcagcuuccuguucguggaggcccuguuccaggaguaccagugcuacggcagcagcagcaacaccagagugcugaacgagcugaacuacgacaacgccggcaccaaccuguacaacgagcuggagaugaacuacuacggcaagcaggagaacugguacagccugaagaagaacagcagaagccugggcgagaacgacgacggcaacaacaacaacggcgacaacggcagagagggcaaggacgaggacaagagagacggcaacaacgaggacaacgagaagcugagaaagcccaagcacaagaagcugaagcagcccgccgacggcaaccccgaccccaacgccaaccccaacguggaccccaacgccaaccccaacguggaccccaacgccaaccccaacguggaccccaacgccaaccccaacgccaaccccaacgccaaccccaacgccaaccccaacgccaaccccaacgccaaccccaacgccaaccccaacgccaaccccaacgccaaccccaacgccaaccccaacgccaaccccaacgccaaccccaacgccaaccccaacgccaaccccaacguggaccccaacgccaaccccaacgccaaccccaacgccaaccccaacgccaaccccaacgccaaccccaacgccaaccccaacgccaaccccaacgccaaccccaacgccaaccccaacgccaaccccaacgccaaccccaacgccaaccccaacgccaaccccaacgccaaccccaacgccaaccccaacgccaaccccaacgccaaccccaacgccaaccccaacgccaaccccaacaagaacaaccagggcaacggccagggccacaacaugcccaacgaccccaacagaaacguggacgagaacgccaacgccaacaacgccgugaagaacaacaacaacgaggagcccagcgaccagcacaucgagaaguaccugaagaccaucaagaacagccugagcaccgaguggagccccugcagcgugaccugcggcaacggcauccaggugagaaucaagcccggcagcgccaacaagcccaaggacgagcuggacuacgccaacgacaucgagaagaagaucugcaagauggagaagugcagcagcguguucaacguggugaacagcagcaucggccugaucauggugcugagcuuccuguuccugaacuga

SEQ ID NO: 4643 - RNA, 1227 nt, Artificial Sequence
  derived and/or modified CDS sequence (opt4) from Pf(Tz93-056)__BAM84765.1__CSP
augaugagaaagcuggccauccugagcgugagcagcuuccuguucguggaggcccuguuccaggaguaccagugcuacggcagcagcagcaacaccagagugcugaacgagcugaacuacgacaacgccggcaccaaccuguacaacgagcuggagaugaacuacuacggcaagcaggagaacugguacagccugaagaagaacagcagaagccugggcgagaacgacgacggcaacaacaacaacggcgacaacggcagagagggcaaggacgaggacaagagagacggcaacaacgaggacaacgagaagcugagaaagcccaagcacaagaagcugaagcagcccgccgacggcaaccccgaccccaacgccaaccccaacguggaccccaacgccaaccccaacguggaccccaacgccaaccccaacguggaccccaacgccaaccccaacgccaaccccaacgccaaccccaacgccaaccccaacgccaaccccaacgccaaccccaacgccaaccccaacgccaaccccaacgccaaccccaacgccaaccccaacgccaaccccaacgccaaccccaacgccaaccccaacgccaaccccaacguggaccccaacgccaaccccaacgccaaccccaacgccaaccccaacgccaaccccaacgccaaccccaacgccaaccccaacgccaaccccaacgccaaccccaacgccaaccccaacgccaaccccaacgccaaccccaacgccaaccccaacgccaaccccaacgccaaccccaacgccaaccccaacgccaaccccaacgccaaccccaacgccaaccccaacgccaaccccaacaagaacaaccagggcaacggccagggccacaacaugcccaacgaccccaacagaaacguggacgagaacgccaacgccaacaacgccgugaagaacaacaacaacgaggagcccagcgacaagcacaucaaggaguaccugaccaagaucaagaacagcaucagcaccgaguggagccccugcagcgugaccugcggcaacggcauccaggugagaaucaagcccggcagcgccaacaagcccaaggacgagcuggacuacgagaacgacaucgagaagaagaucugcaagauggagaagugcagcagcguguucaacguggugaacagcagcaucggccugaucauggugcugagcuuccuguuccugaacuga

SEQ ID NO: 4644 - RNA, 1227 nt, Artificial Sequence
  derived and/or modified CDS sequence (opt4) from Pf(Tz93-085)__BAM84771.1__CSP
augaugagaaagcuggccauccugagcgugagcagcuuccuguucguggaggcccuguuccaggaguaccagugcuacggcagcagcagcaacaccagagugcugaacgagcugaacuacgacaacgccggcaccaaccuguacaacgagcuggagaugaacuacuacggcaagcaggagaacugguacagccugaagaagaacagcagaagccugggcgagaacgacgacggcaacaacaacaacggcgacaacggcagagagggcaaggacgaggacaagagagacggcaacaacgaggacaacgagaagcugagaaagcccaagcacaagaagcugaagcagcccgccgacggcaaccccgaccccaacgccaaccccaacguggaccccaacgccaaccccaacguggaccccaacgccaaccccaacguggaccccaacgccaaccccaacgccaaccccaacgccaaccccaacgccaaccccaacgccaaccccaacgccaaccccaacgccaaccccaacgccaaccccaacgccaaccccaacgccaaccccaacgccaaccccaacgccaaccccaacgccaaccccaacgccaaccccaacguggaccccaacgccaaccccaacgccaaccccaacgccaaccccaacgccaaccccaacgccaaccccaacgccaaccccaacgccaaccccaacgccaaccccaacgccaaccccaacgccaaccccaacgccaaccccaacgccaaccccaacgccaaccccaacgccaaccccaacgccaaccccaacgccaaccccaacgccaaccccaacgccaaccccaacgccaaccccaacaagaacaaccagggcaacggccagggccacaacaugcccaacgaccccaacagaaacguggacgagaacgccaaggccaacaacgccgugaagaacaacaacaacgaggagcccagcgacaagcacaucaaggaguaccugaacaagauccagaacagcaucagcaccgaguggagccccugcagcgugaccugcggcaacggcauccaggugagaaucaagcccggcagcgccgacaagcccaaggaccagcuggacuacaucaacgacaucgagaagaagaucugcaagauggagaagugcagcagcguguucaacguggugaacagcagcaucggccugaucauggugcugagcuuccuguuccugaacuga

SEQ ID NO: 4645 - RNA, 1227 nt, Artificial Sequence
  derived and/or modified CDS sequence (opt4) from Pf(Tz93-102)__BAM84773.1__CSP
augaugagaaagcuggccauccugagcgugagcagcuuccuguucguggaggcccuguuccaggaguaccagugcuacggcagcagcagcaacaccagagugcugaacgagcugaacuacgacaacgccggcaccaaccuguacaacgagcuggagaugaacuacuacggcaagcaggagaacugguacagccugaagaagaacagcagaagccugggcgagaacgacgacggcaacaacaacaacggcgacaacggcagagagggcaaggacgaggacaagagagacggcaacaacgaggacaacgagaagcugagaaagcccaagcacaagaagcugaagcagcccggcgacggcaaccccgaccccaacgccaaccccaacguggaccccaacgccaaccccaacguggaccccaacgccaaccccaacguggaccccaacgccaaccccaacgccaaccccaacgccaaccccaacgccaaccccaacgccaaccccaacgccaaccccaacgccaaccccaacgccaaccccaacgccaaccccaacgccaaccccaacgccaaccccaacgccaaccccaacgccaaccccaacgccaaccccaacguggaccccaacgccaaccccaacgccaaccccaacgccaaccccaacgccaaccccaacgccaaccccaacgccaaccccaacgccaaccccaacgccaaccccaacgccaaccccaacgccaaccccaacgccaaccccaacgccaaccccaacgccaaccccaacgccaaccccaacgccaaccccaacgccaaccccaacgccaaccccaacgccaaccccaacgccaaccccaacaagaacaaccagggcaacggccagggccacaacaugcccaacgaccccaacagaaacguggacgagaacgccaacgccaacaacgccgugaagaacaacaacaacgaggagcccagcgacaagcacaucgagcaguaccugaagaccaucaagaacagccugagcaccgaguggagccccugcagcgugaccugcggcaacggcauccaggugagaaucaagcccggcagcgccaacaagcccaaggacgagcugaacuacgagaacgacaucgagaagaagaucugcaagauggagaagugcagcagcguguucaacguggugaacagcagcaucggccugaucauggugcugagcuuccuguuccugaacuga

SEQ ID NO: 4646 - RNA, 1227 nt, Artificial Sequence
  derived and/or modified CDS sequence (opt4) from Pf(Tz98-021)__BAM84783.1__CSP
augaugagaaagcuggccauccugagcgugagcagcuuccuguucguggaggcccuguuccaggaguaccagugcuacggcagcagcagcaacaccagagugcugaacgagcugaacuacgacaacgccggcaccaaccuguacaacgagcuggagaugaacuacuacggcaagcaggagaacugguacagccugaagaagaacagcagaagccugggcgagaacgacgacggcaacaacaacaacggcgacaacggcagagagggcaaggacgaggacaagagagacggcaacaacgaggacaacgagaagcugagaaagcccaagcacaagaagcugaagcagcccgccgacggcaaccccgaccccaacgccaaccccaacguggaccccaacgccaaccccaacguggaccccaacgccaaccccaacguggaccccaacgccaaccccaacgccaaccccaacgccaaccccaacgccaaccccaacgccaaccccaacgccaaccccaacgccaaccccaacgccaaccccaacgccaaccccaacgccaaccccaacgccaaccccaacguggaccccaacgccaaccccaacgccaaccccaacgccaaccccaacgccaaccccaacgccaaccccaacgccaaccccaacgccaaccccaacgccaaccccaacgccaaccccaacgccaaccccaacgccaaccccaacgccaaccccaacgccaaccccaacgccaaccccaacgccaaccccaacgccaaccccaacgccaaccccaacgccaaccccaacgccaaccccaacgccaaccccaacgccaaccccaacgccaaccccaacaagaacaaccagggcaacggccagggccacaacaugcccaacgaccccaacagaaacguggacgagaacgccaacgccaacaacgccgugaagaacaacaacaacgaggagcccagcgaccagcacaucgagaaguaccugaagaccauccagaacagccugagcaccgaguggagccccugcagcgugaccugcggcaacggcauccaggugagaaucaagcccggcagcgccaacaagcccaaggaccagcuggacuacgccaacgacaucgagaagaagaucugcaagauggagaagugcagcagcguguucaacguggugaacagcagcaucggccugaucauggugcugagcuuccuguuccugaacuga

SEQ ID NO: 4647 - RNA, 1227 nt, Artificial Sequence
  derived and/or modified CDS sequence (opt4) from Pf(Tz98-030)__BAM84785.1__CSP
augaugagaaagcuggccauccugagcgugagcagcuuccuguucguggaggcccuguuccaggaguaccagugcuacggcagcagcagcaacaccagagugcugaacgagcugaacuacgacaacgccggcaccaaccuguacaacgagcuggagaugaacuacuacggcaagcaggagaacugguacagccugaagaagaacagcagaagccugggcgagaacgacgacggcaacaacaacaacggcgacaacggcagagagggcaaggacgaggacaagagagacggcaacaacgaggacaacgagaagcugagaaagcccaagcacaagaagcugaagcagcccggcgacggcaaccccgaccccaacgccaaccccaacguggaccccaacgccaaccccaacguggaccccaacgccaaccccaacguggaccccaacgccaaccccaacgccaaccccaacgccaaccccaacgccaaccccaacgccaaccccaacgccaaccccaacgccaaccccaacgccaaccccaacgccaaccccaacgccaaccccaacgccaaccccaacguggaccccaacgccaaccccaacgccaaccccaacgccaaccccaacgccaaccccaacgccaaccccaacgccaaccccaacgccaaccccaacgccaaccccaacgccaaccccaacgccaaccccaacgccaaccccaacgccaaccccaacgccaaccccaacgccaaccccaacgccaaccccaacgccaaccccaacgccaaccccaacgccaaccccaacgccaaccccaacgccaaccccaacgccaaccccaacgccaaccccaacaagaacaaccagggcaacggccagggccacaacaugcccaacgaccccaacagaaacguggacgagaacgccaacgccaacaacgccgugaagaacaacaacaacgaggagcccagcgaccagcacaucgagaaguaccugcagaagauccagaacagccugagcaccgaguggagccccugcagcgugaccugcggcaacggcauccaggugagaaucaagcccggcagcgccaacaagcccaaggaccagcugaacuacgagaacgacaucgagaagaagaucugcaagauggagaagugcagcagcguguucaacguggugaacagcagcaucggccugaucauggugcugagcuuccuguuccugaacuga

SEQ ID NO: 4648 - RNA, 1227 nt, Artificial Sequence
  derived and/or modified CDS sequence (opt4) from Pf(Tz98-070)__BAM84790.1__CSP
augaugagaaagcuggccauccugagcgugagcagcuuccuguucguggaggcccuguuccaggaguaccagugcuacggcagcagcagcaacaccagagugcugaacgagcugaacuacgacaacgccggcaccaaccuguacaacgagcuggagaugaacuacuacggcaagcaggagaacugguacagccugaagaagaacagcagaagccugggcgagaacgacgacggcaacaacaacaacggcgacaacggcagagagggcaaggacgaggacaagagagacggcaacaacgaggacaacgagaagcugagaaagcccaagcacaagaagcugaagcagcccggcgacggcaaccccgaccccaacgccaaccccaacguggaccccaacgccaaccccaacguggaccccaacgccaaccccaacguggaccccaacgccaaccccaacgccaaccccaacgccaaccccaacgccaaccccaacgccaaccccaacgccaaccccaacgccaaccccaacgccaaccccaacgccaaccccaacgccaaccccaacgccaaccccaacgccaaccccaacgccaaccccaacgccaaccccaacguggaccccaacgccaaccccaacgccaaccccaacgccaaccccaacgccaaccccaacgccaaccccaacgccaaccccaacgccaaccccaacgccaaccccaacgccaaccccaacgccaaccccaacgccaaccccaacgccaaccccaacgccaaccccaacgccaaccccaacgccaaccccaacgccaaccccaacgccaaccccaacgccaaccccaacgccaaccccaacaagaacaaccagggcaacggccagggccacaacaugcccaacgaccccaacagaaacguggacgagaacgccaacgccaacgacgccgugaagaacaacaacaacgaggagcccagcgaccagcacaucgagaaguaccugaagaucaucaagaacagccugagcaccgaguggagccccugcagcgugaccugcggcaacggcauccaggugagaaucaagcccggcagcgccaacaagcccaaggaccagcuggacuacgccaacgacaucgagaagaagaucugcaagauggagaagugcagcagcguguucaacguggugaacagcagcaucggccugaucauggugcugagcuuccuguuccugaacuga

SEQ ID NO: 4649 - RNA, 1224 nt, Artificial Sequence
  derived and/or modified CDS sequence (opt4) from Pf(A150)__ACO49332.1__CSP
augagaaagcuggccauccugagcgugagcagcuuccuguucguggaggcccuguuccaggaguaccagugcuacggcagcagcagcaacaccagagugcugaacgagcugaacuacgacaacgccggcaccaaccuguacaacgagcuggagaugaacuacuacggcaagcaggagaacugguacagccugaagaagaacagcagaagccugggcgagaacgacgacggcaacaacaacaacggcgacaacggcagagagggcaaggacgaggacaagagagacggcaacaacgaggacaacgagaagcugagaaagcccaagcacaagaagcugaagcagcccggcgacggcaaccccgaccccaacgccaaccccaacguggaccccaacgccaaccccaacguggaccccaacgccaaccccaacguggaccccaacgccaaccccaacgccaaccccaacgccaaccccaacgccaaccccaacgccaaccccaacgccaaccccaacgccaaccccaacgccaaccccaacgccaaccccaacgccaaccccaacgccaaccccaacgccaaccccaacgccaaccccaacgccaaccccaacgccaaccccaacgccaaccccaacgccaaccccaacgccaaccccaacgccaaccccaacgccaaccccaacgccaaccccaacgccaaccccaacgccaaccccaacgccaaccccaacgccaaccccaacgccaaccccaacgccaaccccaacgccaaccccaacgccaaccccaacgccaaccccaacgccaaccccaacgccaaccccaacgccaaccccaacgccaaccccaacaagaacaaccagggcaacggccagggccacaacaugcccaacgaccccaacagaaacguggacgagaacgccaacgccaacaacgccgugaagaacaacaacaacgaggagcccagcgacaagcacaucgagcaguaccugaagaagauccagaacagccugagcaccgaguggagccccugcagcgugaccugcggcaacggcauccaggugagaaucaagcccggcagcgccaacaagcccaaggacgagcuggacuacgagaacgacaucgagaagaagaucugcaagauggagaagugcagcagcguguucaacguggugaacagcagcaucggccugaucauggugcugagcuuccuguuccugaacuga

SEQ ID NO: 4650 - RNA, 1215 nt, Artificial Sequence
  derived and/or modified CDS sequence (opt4) from Pf(Gha1109-183)__BAM84829.1__CSP
augaugagaaagcuggccauccugagcgugagcagcuuccuguucguggaggcccuguuccaggaguaccagugcuacggcagcagcagcaacaccagagugcugaacgagcugaacuacgacaacgccggcaccaaccuguacaacgagcuggagaugaacuacuacggcaagcaggagaacugguacagccugaagaagaacagcagaagccugggcgagaacgacgacggcaacaacaacaacggcgacaacggcagagagggcaaggacgaggacaagagagacggcaacaacgaggacaacgagaagcugagaaagcccaagcacaagaagcugaagcagcccgccgacggcaaccccgaccccaacgccaaccccaacguggaccccaacgccaaccccaacguggaccccaacgccaaccccaacguggaccccaacgccaaccccaacgccaaccccaacgccaaccccaacgccaaccccaacgccaaccccaacgccaaccccaacgccaaccccaacgccaaccccaacgccaaccccaacgccaaccccaacgccaaccccaacgccaaccccaacgccaaccccaacguggaccccaacgccaaccccaacgccaaccccaacgccaaccccaacgccaaccccaacgccaaccccaacgccaaccccaacgccaaccccaacgccaaccccaacgccaaccccaacgccaaccccaacgccaaccccaacgccaaccccaacgccaaccccaacgccaaccccaacgccaaccccaacgccaaccccaacgccaaccccaacgccaaccccaacgccaaccccaacaagaacaaccagggcaacggccagggccacaacaugcccaacgaccccaacagaaacguggacgagaacgccaacgccaacaacgccgugaagaacaacaacaacgaggagcccagcgaccagcacaucgagaaguaccugaagaccaucaagaacagccugagcaccgaguggagccccugcagcgugaccugcggcaacggcauccaggugagaaucaagcccggcagcgccaacaagcccaaggaccagcuggacuacgccaacgacaucgagaagaagaucugcaagauggagaagugcagcagcguguucaacguggugaacagcagcaucggccugaucauggugcugagcuuccuguuccugaacuga

SEQ ID NO: 4651 - RNA, 1215 nt, Artificial Sequence
  derived and/or modified CDS sequence (opt4) from Pf(Pal97-107)__BAM84956.1__CSP
augaugagaaagcuggccauccugagcgugagcagcuuccuguucguggaggcccuguuccaggaguaccagugcuacggcagcagcagcaacaccagagugcugaacgagcugaacuacgacaacgccggcaccaaccuguacaacgagcuggagaugaacuacuacggcaagcaggagaacugguacagccugaagaagaacagcagaagccugggcgagaacgacgacggcaacaacaacaacggcgacaacggcagagagggcaaggacgaggacaagagagacggcaacaacgaggacaacgagaagcugagaaagcccaagcacaagaagcugaagcagcccggcgacggcaaccccgaccccaacgccaaccccaacguggaccccaacgccaaccccaacguggaccccaacgccaaccccaacguggaccccaacgccaaccccaacgccaaccccaacgccaaccccaacgccaaccccaacgccaaccccaacgccaaccccaacgccaaccccaacgccaaccccaacgccaaccccaacgccaaccccaacgccaaccccaacgccaaccccaacgccaaccccaacguggaccccaacgccaaccccaacgccaaccccaacgccaaccccaacgccaaccccaacgccaaccccaacgccaaccccaacgccaaccccaacgccaaccccaacgccaaccccaacgccaaccccaacgccaaccccaacgccaaccccaacgccaaccccaacgccaaccccaacgccaaccccaacgccaaccccaacgccaaccccaacgccaaccccaacgccaaccccaacaagaacaaccagggcaacggccagggccacaacaugcccaacgaccccaacagaaacguggacgagaacgccaacgccaacaacgccgugaagaacaacaacaacgaggagcccagcgacaagcacaucaaggaguaccugaccaagaucaagaacagcaucagcaccgaguggagccccugcagcgugaccugcggcaacggcauccaggugagaaucaagcccggcagcgccaacaagcccaaggacgagcuggacuacgagaacgacaucgagaagaagaucugcaagauggagaagugcagcagcguguucaacguggugaacagcagcaucggccugaucauggugcugagcuuccuguuccugaacuga

SEQ ID NO: 4652 - RNA, 1215 nt, Artificial Sequence
  derived and/or modified CDS sequence (opt4) from Pf(Tz98-103)__BAM84795.1__CSP
augaugagaaagcuggccauccugagcgugagcagcuuccuguucguggaggcccuguuccaggaguaccagugcuacggcagcagcagcaacaccagagugcugaacgagcugaacuacgacaacgccggcaccaaccuguacaacgagcuggagaugaacuacuacggcaagcaggagaacugguacagccugaagaagaacagcagaagccugggcgagaacgacgacggcaacaacaacaacggcgacaacggcagagagggcaaggacgaggacaagagagacggcaacaacgaggacaacgagaagcugagaaagcccaagcacaagaagcugaagcagcccgccgacggcaaccccgaccccaacgccaaccccaacguggaccccaacgccaaccccaacguggaccccaacgccaaccccaacguggaccccaacgccaaccccaacgccaaccccaacgccaaccccaacgccaaccccaacgccaaccccaacgccaaccccaacgccaaccccaacgccaaccccaacgccaaccccaacgccaaccccaacgccaaccccaacgccaaccccaacgccaaccccaacgccaaccccaacguggaccccaacgccaaccccaacgccaaccccaacgccaaccccaacgccaaccccaacgccaaccccaacgccaaccccaacgccaaccccaacgccaaccccaacgccaaccccaacgccaaccccaacgccaaccccaacgccaaccccaacgccaaccccaacgccaaccccaacgccaaccccaacgccaaccccaacgccaaccccaacgccaaccccaacaagaacaaccagggcaacggccagggccacaacaugcccaacgaccccaacagaaacguggacgagaacgccaacgccaacaacgccgugaagaacaacaacaacgaggagcccagcgacaagcacaucaccgaguaccugaagagaauccagaacagccugagcaccgaguggagccccugcagcgugaccugcggcaacggcauccaggugagaaucaagcccggcagcgccggcaagagcaagaacgagcuggacuacgagaacgacaucgagaagaagaucugcaagauggagaagugcagcagcguguucaacguggugaacagcagcaucggccugaucauggugcugagcuuccuguuccugaacuga

SEQ ID NO: 4653 - RNA, 1215 nt, Artificial Sequence
  derived and/or modified CDS sequence (opt4) from Pf(Yaounde)__AAN87588.1__CSP
augaugagaaagcuggccauccugagcgugagcagcuuccuguucguggaggcccuguuccaggaguaccagugcuacggcagcagcagcaacaccagagugcugaacgagcugaacuacgacaacgccggcaccaaccuguacaacgagcuggagaugaacuacuacggcaagcaggagaacugguacagccugaagaagaacagcagaagccugggcgagaacgacgacggcaacaacaacaacggcgacaacggcagagagggcaaggacgaggacaagagagacggcaacaacgaggacaacgagaagcugagaaagcccaagcacaagaagcugaagcagcccgccgacggcaaccccgaccccaacgccaaccccaacguggaccccaacgccaaccccaacguggaccccaacgccaaccccaacguggaccccaacgccaaccccaacgccaaccccaacgccaaccccaacgccaaccccaacgccaaccccaacgccaaccccaacgccaaccccaacgccaaccccaacgccaaccccaacguggaccccaacgccaaccccaacgccaaccccaacgccaaccccaacgccaaccccaacgccaaccccaacgccaaccccaacgccaaccccaacgccaaccccaacgccaaccccaacgccaaccccaacgccaaccccaacgccaaccccaacgccaaccccaacgccaaccccaacgccaaccccaacgccaaccccaacgccaaccccaacgccaaccccaacgccaaccccaacgccaaccccaacgccaaccccaacgccaaccccaacgccaaccccaacaagaacaaccagggcaacggccagggccacaacaugcccaacgaccccaacagaaacguggacgagaacgccaacgccaacaacgccgugaagaacaacaacaacgaggagcccagcgaccagcacaucgagaaguaccugaacaagaucaagaacagccugagcaccgaguggagccccugcagcgugaccugcggcaacggcauccaggugagaaucaagcccggcagcgccaacaagcccaaggaccagcuggacuacgccaacgacaucgagaagaagaucugcaagauggagaagugcagcagcguguucaacguggugaacagcagcaucggccugaucauggugcugagcuuccuguuccugaacuga

SEQ ID NO: 4654 - RNA, 1209 nt, Artificial Sequence
  derived and/or modified CDS sequence (opt4) from Pf(CMC247)__ADF48384.1__CSP
augagaaagcuggccauccugagcgugagcagcuuccuguucguggaggcccuguuccaggaguaccagugcuacggcagcagcagcaacaccagagugcugaacgagcugaacuacgacaacgccggcaccaaccuguacaacgagcuggagaugaacuacuacggcaagcaggagaacugguacagccugaagaagaacagcagaagccugggcgagaacgacgacggcaacaacaacaacggcgacaacggcagagagggcaaggacgaggacaagagagacggcaacaacgaggacaacgagaagcugagaaagcccaagcacaagaagcugaagcagcccggcgacggcaaccccgaccccaacgccaaccccaacguggaccccaacgccaaccccaacguggaccccaacgccaaccccaacguggaccccaacgccaaccccaacgccaaccccaacgccaaccccaacgccaaccccaacgccaaccccaacgccaaccccaacgccaaccccaacgccaaccccaacgccaaccccaacgccaaccccaacgccaaccccaacgccaaccccaacgccaaccccaacgccaaccccaacgccaaccccaacgccaaccccaacgccaaccccaacgccaaccccaacgccaaccccaacgccaaccccaacgccaaccccaacgccaaccccaacgccaaccccaacgccaaccccaacgccaaccccaacgccaaccccaacgccaaccccaacgccaaccccaacgccaaccccaacgccaaccccaacgccaaccccaacgccaaccccaacgccaaccccaacaagaacaaccagggcaacggccagggccacaacaugcccaacgaccccaacagaaacguggacgagaacgccaacgccaacaacgacgagaacaacaacaacgaggagcccagcgacaagcacaucgagcaguaccugaagaagauccaguacagccugagcaccgaguggagccccugcagcgugaccugcggcaacggcauccaggugagaaucaagcccggcagcgccgacaagcccaaggaccagcuggacuacgagaacgacaucgagaagaagaucugcaagauggagaagugcagcagcguguucaacguggugaacagcagcaucggccugaucauggugcugagcuuccuguuccugaacuga

SEQ ID NO: 4655 - RNA, 1206 nt, Artificial Sequence
  derived and/or modified CDS sequence (opt4) from Pf(Gha1109-215)__BAM84833.1__CSP
augaugagaaagcuggccauccugagcgugagcagcuuccuguucguggaggcccuguuccaggaguaccagugcuacggcagcagcagcaacaccagagugcugaacgagcugaacuacgacaacgccggcaccaaccuguacaacgagcuggagaugaacuacuacggcaagcaggagaacugguacagccugaagaagaacagcagaagccugggcgagaacgacgacggcaacaacgaggacaacgagaagcugagaaagcccaagcacaagaagcugaagcagcccgccgacggcaaccccgaccccaacgccaaccccaacguggaccccaacgccaaccccaacguggaccccaacgccaaccccaacguggaccccaacgccaaccccaacgccaaccccaacgccaaccccaacgccaaccccaacgccaaccccaacgccaaccccaacgccaaccccaacgccaaccccaacgccaaccccaacgccaaccccaacgccaaccccaacgccaaccccaacgccaaccccaacgccaaccccaacgccaaccccaacgccaaccccaacgccaaccccaacguggaccccaacgccaaccccaacgccaaccccaacgccaaccccaacgccaaccccaacgccaaccccaacgccaaccccaacgccaaccccaacgccaaccccaacgccaaccccaacgccaaccccaacgccaaccccaacgccaaccccaacgccaaccccaacgccaaccccaacgccaaccccaacgccaaccccaacgccaaccccaacgccaaccccaacgccaaccccaacaagaacaaccagggcaacggccagggccacaacaugcccaacgaccccaacagaaacguggacgagaacgccaaggccaacaacgccgugaagaacaacaacaacgaggagcccagcgacaagcacaucgagcaguaccugaagaccauccagaacagccugagcaccgaguggagccccugcagcgugaccugcggcaacggcauccaggugagaaucaagcccggcagcgccaacaagcccaaggaccagcuggacuacgagaacgacaucgagaagaagaucugcaagauggagaagugcagcagcguguucaacguggugaacagcagcaucggccugaucauggugcugagcuuccuguuccugaacuga

SEQ ID NO: 4656 - RNA, 1203 nt, Artificial Sequence
  derived and/or modified CDS sequence (opt4) from Pf(Gha1109-199)__BAM84831.1__CSP
augaugagaaagcuggccauccugagcgugagcagcuuccuguucguggaggcccuguuccaggaguaccagugcuacggcagcagcagcaacaccagagugcugaacgagcugaacuacgacaacgccggcaccaaccuguacaacgagcuggagaugaacuacuacggcaagcaggagaacugguacagccugaagaagaacagcagaagccugggcgagaacgacgacggcaacaacaacaacggcgacaacggcagagagggcaaggacgaggacaagagagacggcaacaacgaggacaacgagaagcugagaaagcccaagcacaagaagcugaagcagcccgccgacggcaaccccgaccccaacgccaaccccaacguggaccccaacgccaaccccaacguggaccccaacgccaaccccaacguggaccccaacgccaaccccaacgccaaccccaacgccaaccccaacgccaaccccaacgccaaccccaacgccaaccccaacgccaaccccaacgccaaccccaacgccaaccccaacgccaaccccaacgccaaccccaacgccaaccccaacguggaccccaacgccaaccccaacgccaaccccaacgccaaccccaacgccaaccccaacgccaaccccaacgccaaccccaacgccaaccccaacgccaaccccaacgccaaccccaacgccaaccccaacgccaaccccaacgccaaccccaacgccaaccccaacgccaaccccaacgccaaccccaacgccaaccccaacgccaaccccaacgccaaccccaacgccaaccccaacaagaacaaccagggcaacggccagggccacaacaugcccaacgaccccaacagaaacguggacgagaacgccaacgccaacagcgccgugaagaacaacaacaacgaggagcccagcgacaagcacaucaaggaguaccugaacaagauccagaacagccugagcaccgaguggagccccugcagcgugaccugcggcaacggcauccaggugagaaucaagcccggcagcgccaacaagcccaaggacgagcuggacuacgccaacgacaucgagaagaagaucugcaagauggagaagugcagcagcguguucaacguggugaacagcagcaucggccugaucauggugcugagcuuccuguuccugaacuga

SEQ ID NO: 4657 - RNA, 1194 nt, Artificial Sequence
  derived and/or modified CDS sequence (opt4) from Pf(Asembo Bay)__AAN87582.1__CSP
augaugagaaagcuggccauccugagcgugagcagcuuccuguucguggaggcccuguuccaggaguaccagugcuacggcagcagcagcaacaccagagugcugaacgagcugaacuacgacaacgccggcaccaaccuguacaacgagcuggagaugaacuacuacggcaagcaggagaacugguacagccugaagaagaacagcagaagccugggcgagaacgacgacggcaacaacgaggacaacgagaagcugagaaagcccaagcacaagaagcugaagcagcccgccgacggcaaccccgaccccaacgccaaccccaacguggaccccaacgccaaccccaacguggaccccaacgccaaccccaacguggaccccaacgccaaccccaacgccaaccccaacgccaaccccaacgccaaccccaacgccaaccccaacgccaaccccaacgccaaccccaacgccaaccccaacgccaaccccaacgccaaccccaacgccaaccccaacgccaaccccaacgccaaccccaacgccaaccccaacgccaaccccaacgccaaccccaacgccaaccccaacguggaccccaacgccaaccccaacgccaaccccaacgccaaccccaacgccaaccccaacgccaaccccaacgccaaccccaacgccaaccccaacgccaaccccaacgccaaccccaacgccaaccccaacgccaaccccaacgccaaccccaacgccaaccccaacgccaaccccaacgccaaccccaacgccaaccccaacgccaaccccaacgccaaccccaacaagaacaaccagggcaacggccagggccacaacaugcccaacgaccccaacagaaacguggacgagaacgccaacgccaacaacgccgugaagaacaacaacaacgaggagcccagcgaccagcacaucgagaaguaccugaagaccauccagaacagccugagcaccgaguggagccccugcagcgugaccugcggcaacggcauccaggugagaaucaagcccggcagcgccaacaagcccaaggaccagcuggacuacgccaacgacaucgagaagaagaucugcaagauggagaagugcagcagcguguucaacguggugaacagcagcaucggccugaucauggugcugagcuuccuguuccugaacuga

SEQ ID NO: 4658 - RNA, 1194 nt, Artificial Sequence
  derived and/or modified CDS sequence (opt4) from Pf(Tz98-017)__BAM84782.1__CSP
augaugagaaagcuggccauccugagcgugagcagcuuccuguucguggaggcccuguuccaggaguaccagugcuacggcagcagcagcaacaccagagugcugaacgagcugaacuacgacaacgccggcaccaaccuguacaacgagcuggagaugaacuacuacggcaagcaggagaacugguacagccugaagaagaacagcagaagccugggcgagaacgacgacggcaacaacgaggacaacgagaagcugagaaagcccaagcacaagaagcugaagcagcccgccgacggcaaccccgaccccaacgccaaccccaacguggaccccaacgccaaccccaacguggaccccaacgccaaccccaacguggaccccaacgccaaccccaacgccaaccccaacgccaaccccaacgccaaccccaacgccaaccccaacgccaaccccaacgccaaccccaacgccaaccccaacgccaaccccaacgccaaccccaacgccaaccccaacgccaaccccaacgccaaccccaacgccaaccccaacgccaaccccaacgccaaccccaacgccaaccccaacguggaccccaacgccaaccccaacgccaaccccaacgccaaccccaacgccaaccccaacgccaaccccaacgccaaccccaacgccaaccccaacgccaaccccaacgccaaccccaacgccaaccccaacgccaaccccaacgccaaccccaacgccaaccccaacgccaaccccaacgccaaccccaacgccaaccccaacgccaaccccaacgccaaccccaacaagaacaaccagggcaacggccagggccacaacaugcccaacgaccccaacagaaacguggacgagaacgccaacgccaacaacgccgugaagaacaacaacaacgaggagcccagcgacaagcacaucgagcaguaccugaacaagaucaagaacagcaucagcaccgaguggagccccugcagcgugaccugcggcaacggcauccaggugagaaucaagcccggcagcgccaacaagcccaaggacgagcugaacuacgagaacgacaucgagaagaagaucugcaagauggagaagugcagcagcguguucaacguggugaacagcagcaucggccugaucauggugcugagcuuccuguuccugaacuga

SEQ ID NO: 4659 - RNA, 1194 nt, Artificial Sequence
  derived and/or modified CDS sequence (opt4) from Pf(Yaounde)__AAN87583.1__CSP
augaugagaaagcuggccauccugagcgugagcagcuuccuguucguggaggcccuguuccaggaguaccagugcuacggcagcagcagcaacaccagagugcugaacgagcugaacuacgacaacgccggcaccaaccuguacaacgagcuggagaugaacuacuacggcaagcaggagaacugguacagccugaagaagaacagcagaagccugggcgagaacgacgacggcaacaacgaggacaacgagaagcugagaaagcccaagcacaagaagcugaagcagcccgccgacggcaaccccgaccccaacgccaaccccaacguggaccccaacgccaaccccaacguggaccccaacgccaaccccaacguggaccccaacgccaaccccaacgccaaccccaacgccaaccccaacgccaaccccaacgccaaccccaacgccaaccccaacgccaaccccaacgccaaccccaacgccaaccccaacgccaaccccaacgccaaccccaacgccaaccccaacgccaaccccaacgccaaccccaacgccaaccccaacgccaaccccaacgccaaccccaacguggaccccaacgccaaccccaacgccaaccccaacgccaaccccaacgccaaccccaacgccaaccccaacgccaaccccaacgccaaccccaacgccaaccccaacgccaaccccaacgccaaccccaacgccaaccccaacgccaaccccaacgccaaccccaacgccaaccccaacgccaaccccaacgccaaccccaacgccaaccccaacgccaaccccaacaagaacaaccagggcaacggccagggccacaacaugcccaacgaccccaacagaaacguggacgagaacgccaacgccaacaacgccgugaagaacaacaacaacgaggagcccagcgaccagcacaucgagaaguaccugaagagaauccagaacagccugagcaccgaguggagccccugcagcgugaccugcggcaacggcauccaggugagaaucaagcccggcagcgccaacaagcccaaggaccagcuggacuacgccaacgacaucgagaagaagaucugcaagauggagaagugcagcagcguguucaacguggugaacagcagcaucggccugaucauggugcugagcuuccuguuccugaacuga

SEQ ID NO: 4660 - RNA, 1191 nt, Artificial Sequence
  derived and/or modified CDS sequence (opt4) from Pf(Amazonas)__AAN87593.1__CSP
augaugagaaagcuggccauccugagcgugagcagcuuccuguucguggaggcccuguuccaggaguaccagugcuacggcagcagcagcaacaccagagugcugaacgagcugaacuacgacaacgccggcaccaaccuguacaacgagcuggagaugaacuacuacggcaagcaggagaacugguacagccugaagaagaacagcagaagccugggcgagaacgacgacggcaacaacaacaacggcgacaacggcagagagggcaaggacgaggacaagagagacggcaacaacgaggacaacgagaagcugagaaagcccaagcacaagaagcugaagcagcccgccgacggcaaccccgaccccaacgccaaccccaacguggaccccaacgccaaccccaacguggaccccaacgccaaccccaacguggaccccaacgccaaccccaacgccaaccccaacgccaaccccaacgccaaccccaacgccaaccccaacgccaaccccaacgccaaccccaacgccaaccccaacgccaaccccaacgccaaccccaacgccaaccccaacgccaaccccaacguggaccccaacgccaaccccaacgccaaccccaacgccaaccccaacgccaaccccaacgccaaccccaacgccaaccccaacgccaaccccaacgccaaccccaacgccaaccccaacgccaaccccaacgccaaccccaacgccaaccccaacgccaaccccaacgccaaccccaacgccaaccccaacgccaaccccaacgccaaccccaacgccaaccccaacaagaacaaccagggcaacggccagggccacaacaugcccaacgaccccaacagaaacguggacgagaacgccaacgccaacaacgccgugaagaacaacaacaacgaggagcccagcgacaagcacaucaccgaguaccugaagagaauccagaacagccugagcaccgaguggagccccugcagcgugaccugcggcaacggcauccaggugagaaucaagcccggcagcgccggcaagagcaagaacgagcuggacuacgagaacgacaucgagaagaagaucugcaagauggagaagugcagcagcguguucaacguggugaacagcagcaucggccugaucauggugcugagcuuccuguuccugaacuga

SEQ ID NO: 4661 - RNA, 1191 nt, Artificial Sequence
  derived and/or modified CDS sequence (opt4) from Pf(Amazonas)__AAN87594.1__CSP
augaugagaaagcuggccauccugagcgugagcagcuuccuguucguggaggcccuguuccaggaguaccagugcuacggcagcagcagcaacaccagagugcugaacgagcugaacuacgacaacgccggcaccaaccuguacaacgagcuggagaugaacuacuacggcaagcaggagaacugguacagccugaagaagaacagcagaagccugggcgagaacgacgacggcaacaacaacaacggcgacaacggcagagagggcaaggacgaggacaagagagacggcaacaacgaggacaacgagaaccugagaaagcccaagcacaagaagcugaagcagcccgccgacggcaaccccgaccccaacgccaaccccaacguggaccccaacgccaaccccaacguggaccccaacgccaaccccaacguggaccccaacgccaaccccaacgccaaccccaacgccaaccccaacgccaaccccaacgccaaccccaacgccaaccccaacgccaaccccaacgccaaccccaacgccaaccccaacgccaaccccaacgccaaccccaacgccaaccccaacguggaccccaacgccaaccccaacgccaaccccaacgccaaccccaacgccaaccccaacgccaaccccaacgccaaccccaacgccaaccccaacgccaaccccaacgccaaccccaacgccaaccccaacgccaaccccaacgccaaccccaacgccaaccccaacgccaaccccaacgccaaccccaacgccaaccccaacgccaaccccaacgccaaccccaacaagaacaaccagggcaacggccagggccacaacaugcccaacgaccccaacagaaacguggacgagaacgccaacgccaacaacgccgugaagaacaacaacaacgaggagcccagcgacaagcacaucaccgaguaccugaagagaauccagaacagccugagcaccgaguggagccccugcagcgugaccugcggcaacggcauccaggugagaaucaagcccggcagcgccggcaagagcaagaacgagcuggacuacgagaacgacaucgagaagaagaucugcaagauggagaagugcagcagcguguucaacguggugaacagcagcaucggccugaucauggugcugagcuuccuguuccugaacuga

SEQ ID NO: 4662 - RNA, 1191 nt, Artificial Sequence
  derived and/or modified CDS sequence (opt4) from Pf(Bolivar)__AAN87592.1__CSP
augaugagaaagcuggccauccugagcgugagcagcuuccuguucguggaggcccuguuccaggaguaccagugcuacggcagcagcagcaacaccagagugcugaacgagcugaacuacgacaacgccggcaccaaccuguacaacgagcuggagaugaacuacuacggcaagcaggagaacugguacagccugaagaagaacagcagaagccugggcgagaacgacgacggcaacaacaacaacggcgacaacggcagagagggcaaggacgaggacaagagagacggcaacaacgaggacaacgagaagcugagaaagcccaagcacaagaagcugaagcagcccgccgacggcaaccccgaccccaacgccaaccccaacguggaccccaacgccaaccccaacguggaccccaacgccaaccccaacguggaccccaacgccaaccccaacgccaaccccaacgccaaccccaacgccaaccccaacgccaaccccaacgccaaccccaacgccaaccccaacgccaaccccaacgccaaccccaacgccaaccccaacgccaaccccaacgccaaccccaacguggaccccaacgccaaccccaacgccaaccccaacgccaaccccaacgccaaccccaacgccaaccccaacgccaaccccaacgccaaccccaacgccaaccccaacgccaaccccaacgccaaccccaacgccaaccccaacgccaaccccaacgccaaccccaacgccaaccccaacgccaaccccaacgccaaccccaacgccaaccccaacgccaaccccaacaagaacaaccagggcaacggccagggccacaacaugcccaacgaccccaacagaaacguggacgagaacgccaacgccaacaacgccgugaagaacaacaacaacgaggagcccagcgacaagcacaucaccgaguaccugaagagaauccagaacagccugagcaccgaguggagccccugcagcgugaccugcggcaacggcauccaggugagaaucaagcccggcagcgccggcaagagcaagaaccagcuggacuacgagaacgacaucgagaagaagaucugcaagauggagaagugcagcagcguguucaacguggugaacagcagcaucggccugaucauggugcugagcuuccuguuccugaacuga

SEQ ID NO: 4663 - RNA, 1182 nt, Artificial Sequence
  derived and/or modified CDS sequence (opt4) from Pf(30)__AGR53781.1__CSP
augaugagaaagcuggccauccugagcgugagcagcuuccuguucguggaggcccuguuccaggaguaccagugcuacggcagcagcagcaacaccagagugcugaacgagcugaacuacgacaacgccggcaccaaccuguacaacgagcuggagaugaacuacuacggcaagcaggagaacugguacagccugaagaagaacagcagaagccugggcgagaacgacgacggcaacaacgaggacaacgagaagcugagaaagcccaagcacaagaagcugaagcagcccggcgacggcaaccccgaccccaacgccaaccccaacguggaccccaacgccaaccccaacguggaccccaacgccaaccccaacguggaccccaacgccaaccccaacgccaaccccaacgccaaccccaacgccaaccccaacgccaaccccaacgccaaccccaacgccaaccccaacgccaaccccaacgccaaccccaacgccaaccccaacgccaaccccaacgccaaccccaacgccaaccccaacgccaaccccaacgccaaccccaacguggaccccaacgccaaccccaacgccaaccccaacgccaaccccaacgccaaccccaacgccaaccccaacgccaaccccaacgccaaccccaacgccaaccccaacgccaaccccaacgccaaccccaacgccaaccccaacgccaaccccaacgccaaccccaacgccaaccccaacgccaaccccaacgccaaccccaacgccaaccccaacgccaaccccaacgccaaccccaacaagaacaaccagggcaacggccagggccacaacaugcccaacgaccccaacagaaacguggacgagaacgccaacgccaacaacgccgugaagaacaacaacaacgaggagcccagcgacaagcacaucaccgaguaccugaagaagauccagaacagccugagcaccgaguggagccccugcagcgugaccugcggcaacggcauccaggugagaaucaagcccggcagcgccggcaagagcaagaacgagcuggacuacgagaacgacaucgagaagaagaucugcaagauggagaagugcagcagcguguucaacguggugaacagcagcaucggccugaucauggugcugagcuuccuguuccugaacuga

SEQ ID NO: 4664 - RNA, 1182 nt, Artificial Sequence
  derived and/or modified CDS sequence (opt4) from Pf(Gha1108-087)__BAM84819.1__CSP
augaugagaaagcuggccauccugagcgugagcagcuuccuguucguggaggcccuguuccaggaguaccagugcuacggcagcagcagcaacaccagagugcugaacgagcugaacuacgacaacgccggcaccaaccuguacaacgagcuggagaugaacuacuacggcaagcaggagaacugguacagccugaagaagaacagcagaagccugggcgagaacgacgacggcaacaacgaggacaacgagaagcugagaaagcccaagcacaagaagcugaagcagcccgccgacggcaaccccgaccccaacgccaaccccaacguggaccccaacgccaaccccaacguggaccccaacgccaaccccaacguggaccccaacgccaaccccaacgccaaccccaacgccaaccccaacgccaaccccaacgccaaccccaacgccaaccccaacgccaaccccaacgccaaccccaacgccaaccccaacgccaaccccaacgccaaccccaacgccaaccccaacgccaaccccaacgccaaccccaacgccaaccccaacgccaaccccaacguggaccccaacgccaaccccaacgccaaccccaacgccaaccccaacgccaaccccaacgccaaccccaacgccaaccccaacgccaaccccaacgccaaccccaacgccaaccccaacgccaaccccaacgccaaccccaacgccaaccccaacgccaaccccaacgccaaccccaacgccaaccccaacgccaaccccaacgccaaccccaacgccaaccccaacaagaacaaccagggcaacggccagggccacaacaugcccaacgaccccaacagaaacguggacgagaacgccaacgccaacaacgccgugaagaacaacaacaacgaggagcccagcgaccagcacaucgagaaguaccugaagagaauccagaacagccugagcaccgaguggagccccugcagcgugaccugcggcaacggcauccaggugagaaucaagcccggcagcgccaacaagcccaaggaccagcuggacuacgccaacgacaucgagaagaagaucugcaagauggagaagugcagcagcguguucaacguggugaacagcagcaucggccugaucauggugcugagcuuccuguuccugaacuga

SEQ ID NO: 4665 - RNA, 1182 nt, Artificial Sequence
  derived and/or modified CDS sequence (opt4) from Pf(Gha1108-098)__BAM84821.1__CSP
augaugagaaagcuggccauccugagcgugagcagcuuccuguucguggaggcccuguuccaggaguaccagugcuacggcagcagcagcaacaccagagugcugaacgagcugaacuacgacaacgccggcaccaaccuguacaacgagcuggagaugaacuacuacggcaagcaggagaacugguacagccugaagaagaacagcagaagccugggcgagaacgacgacggcaacaacgaggacaacgagaagcugagaaagcccaagcacaagaagcugaagcagcccggcgacggcaaccccgaccccaacgccaaccccaacguggaccccaacgccaaccccaacguggaccccaacgccaaccccaacguggaccccaacgccaaccccaacgccaaccccaacgccaaccccaacgccaaccccaacgccaaccccaacgccaaccccaacgccaaccccaacgccaaccccaacgccaaccccaacgccaaccccaacgccaaccccaacgccaaccccaacgccaaccccaacgccaaccccaacgccaaccccaacguggaccccaacgccaaccccaacgccaaccccaacgccaaccccaacgccaaccccaacgccaaccccaacgccaaccccaacgccaaccccaacgccaaccccaacgccaaccccaacgccaaccccaacgccaaccccaacgccaaccccaacgccaaccccaacgccaaccccaacgccaaccccaacgccaaccccaacgccaaccccaacgccaaccccaacgccaaccccaacaagaacaaccagggcaacggccagggccacaacaugcccaacgagcccaacagaaacguggacgagaacgccaacgccaacaacgccgugaagaacaacaacaacgaggagcccagcgacaagcacaucgagcaguaccugaacaagauccagaacagccugagcaccgaguggagccccugcagcgugaccugcggcaacggcauccaggugagaaucaagcccggcagcgccaacaagcccaaggaccagcuggacuacgccaacgacaucgagaagaagaucugcaagauggagaagugcagcagcguguucaacguggugaacagcagcaucggccugaucauggugcugagcuuccuguuccugaacuga

SEQ ID NO: 4666 - RNA, 1182 nt, Artificial Sequence
  derived and/or modified CDS sequence (opt4) from Pf(Gha1108-101)__BAM84808.1__CSP
augaugagaaagcuggccauccugagcgugagcagcuuccuguucguggaggcccuguuccaggaguaccagugcuacggcagcagcagcaacaccagagugcugaacgagcugaacuacgacaacgccggcaccaaccuguacaacgagcuggagaugaacuacuacggcaagcaggagaacugguacagccugaagaagaacagcagaagccugggcgagaacgacgacggcaacaacgaggacaacgagaagcugagaaagcccaagcacaagaagcugaagcagcccgccgacggcaaccccgaccccaacgccaaccccaacguggaccccaacgccaaccccaacguggaccccaacgccaaccccaacguggaccccaacgccaaccccaacgccaaccccaacgccaaccccaacgccaaccccaacgccaaccccaacgccaaccccaacgccaaccccaacgccaaccccaacgccaaccccaacgccaaccccaacgccaaccccaacgccaaccccaacgccaaccccaacgccaaccccaacgccaaccccaacguggaccccaacgccaaccccaacgccaaccccaacgccaaccccaacgccaaccccaacgccaaccccaacgccaaccccaacgccaaccccaacgccaaccccaacgccaaccccaacgccaaccccaacgccaaccccaacgccaaccccaacgccaaccccaacgccaaccccaacgccaaccccaacgccaaccccaacgccaaccccaacgccaaccccaacgccaaccccaacaagaacaaccagggcaacggccagggccacaacaugcccaacgaccccaacagaaacguggacgagaacgccaacgccaacaacgccgugaagaacaacaacaacgaggagcccagcgaccagcacaucgagaaguaccugaacaagaucaagaacagccugagcaccgaguggagccccugcagcgugaccugcggcaacggcauccaggugagaaucaagcccggcagcgccaacaagcccaaggaccagcuggacuacgccaacgacaucgagaagaagaucugcaagauggagaagugcagcagcguguucaacguggugaacagcagcaucggccugaucauggugcugagcuuccuguuccugaacuga

SEQ ID NO: 4667 - RNA, 1182 nt, Artificial Sequence
  derived and/or modified CDS sequence (opt4) from Pf(Gha1108-148)__BAM84814.1__CSP
augaugagaaagcuggccauccugagcgugagcagcuuccuguucguggaggcccuguuccaggaguaccagugcuacggcagcagcagcaacaccagagugcugaacgagcugaacuacgacaacgccggcaccaaccuguacaacgagcuggagaugaacuacuacggcaagcaggagaacugguacagccugaagaagaacagcagaagccugggcgagaacgacgacggcaacaacgaggacaacgagaagcugagaaagcccaagcacaagaagcugaagcagcccggcgacggcaaccccgaccccaacgccaaccccaacguggaccccaacgccaaccccaacguggaccccaacgccaaccccaacguggaccccaacgccaaccccaacgccaaccccaacgccaaccccaacgccaaccccaacgccaaccccaacgccaaccccaacgccaaccccaacgccaaccccaacgccaaccccaacgccaaccccaacgccaaccccaacgccaaccccaacgccaaccccaacgccaaccccaacgccaaccccaacguggaccccaacgccaaccccaacgccaaccccaacgccaaccccaacgccaaccccaacgccaaccccaacgccaaccccaacgccaaccccaacgccaaccccaacgccaaccccaacgccaaccccaacgccaaccccaacgccaaccccaacgccaaccccaacgccaaccccaacgccaaccccaacgccaaccccaacgccaaccccaacgccaaccccaacgccaaccccaacaagaacaaccagggcaacggccagggccacaacaugcccaacgaccccaacagaaacguggacgagaacgccaacgccaacagcgccgugaagaacaacaacaacgaggagcccagcgacaagcacaucaaggaguaccugaacaagauccagaacagccugagcaccgaguggagccccugcagcgugaccugcggcaacggcauccaggugagaaucaagcccggcagcgccaacaagcccaaggacgagcuggacuacgccaacgacaucgagaagaagaucugcaagauggagaagugcagcagcguguucaacguggugaacagcagcaucggccugaucauggugcugagcuuccuguuccugaacuga

SEQ ID NO: 4668 - RNA, 1182 nt, Artificial Sequence
  derived and/or modified CDS sequence (opt4) from Pf(Gha1109-097)__BAM84838.1__CSP
augaugagaaagcuggccauccugagcgugagcagcuuccuguucguggaggcccuguuccaggaguaccagugcuacggcagcagcagcaacaccagagugcugaacgagcugaacuacgacaacgccggcaccaaccuguacaacgagcuggagaugaacuacuacggcaagcaggagaacugguacagccugaagaagaacagcagaagccugggcgagaacgacgacggcaacaacgaggacaacgagaagcugagaaagcccaagcacaagaagcugaagcagcccgccgacggcaaccccgaccccaacgccaaccccaacguggaccccaacgccaaccccaacguggaccccaacgccaaccccaacguggaccccaacgccaaccccaacgccaaccccaacgccaaccccaacgccaaccccaacgccaaccccaacgccaaccccaacgccaaccccaacgccaaccccaacgccaaccccaacgccaaccccaacgccaaccccaacgccaaccccaacgccaaccccaacgccaaccccaacgccaaccccaacguggaccccaacgccaaccccaacgccaaccccaacgccaaccccaacgccaaccccaacgccaaccccaacgccaaccccaacgccaaccccaacgccaaccccaacgccaaccccaacgccaaccccaacgccaaccccaacgccaaccccaacgccaaccccaacgccaaccccaacgccaaccccaacgccaaccccaacgccaaccccaacgccaaccccaacgccaaccccaacaagaacaaccagggcaacggccagggccacaacaugcccaacgaccccaacagaaacguggacgagaacgccaaggccaacaacgccgugaagaacaacaacaacgaggagcccagcgacaagcacaucgagcaguaccugaagaccauccagaacagccugagcaccgaguggagccccugcagcgugaccugcggcaacggcauccaggugagaaucaagcccggcagcgccaacaagcccaaggaccagcuggacuacgagaacgacaucgagaagaagaucugcaagauggagaagugcagcagcguguucaacguggugaacagcagcaucggccugaucauggugcugagcuuccuguuccugaacuga

SEQ ID NO: 4669 - RNA, 1182 nt, Artificial Sequence
  derived and/or modified CDS sequence (opt4) from Pf(Gha1110-021)__BAM84839.1__CSP
augaugagaaagcuggccauccugagcgugagcagcuuccuguucguggaggcccuguuccaggaguaccagugcuacggcagcagcagcaacaccagagugcugaacgagcugaacuacgacaacgccggcaccaaccuguacaacgagcuggagaugaacuacuacggcaagcaggagaacugguacagccugaagaagaacagcagaagccugggcgagaacgacgacggcaacaacgaggacaacgagaagcugagaaagcccaagcacaagaagcugaagcagcccgccgacggcaaccccgaccccaacgccaaccccaacguggaccccaacgccaaccccaacguggaccccaacgccaaccccaacguggaccccaacgccaaccccaacgccaaccccaacgccaaccccaacgccaaccccaacgccaaccccaacgccaaccccaacgccaaccccaacgccaaccccaacgccaaccccaacgccaaccccaacgccaaccccaacgccaaccccaacgccaaccccaacgccaaccccaacgccaaccccaacguggaccccaacgccaaccccaacgccaaccccaacgccaaccccaacgccaaccccaacgccaaccccaacgccaaccccaacgccaaccccaacgccaaccccaacgccaaccccaacgccaaccccaacgccaaccccaacgccaaccccaacgccaaccccaacgccaaccccaacgccaaccccaacgccaaccccaacgccaaccccaacgccaaccccaacgccaaccccaacaagaacaaccagggcaacggccagggccacaacaugcccaacgaccccaacagaaacguggacgagaacgccaacgccaacaacgccgugaagaacaacaacaacgaggagcccagcgacaagcacaucgagcaguaccugaagaccaucaagaacagccugagcaccgaguggagccccugcagcgugaccugcggcaacggcauccaggugagaaucaagcccggcagcgccaacaagcccaaggacgagcugaacuacgagaacgacaucgagaagaagaucugcaagauggagaagugcagcagcguguucaacguggugaacagcagcaucggccugaucauggugcugagcuuccuguuccugaacuga

SEQ ID NO: 4670 - RNA, 1182 nt, Artificial Sequence
  derived and/or modified CDS sequence (opt4) from Pf(Tz03-068)__BAM84802.1__CSP
augaugagaaagcuggccauccugagcgugagcagcuuccuguucguggaggcccuguuccaggaguaccagugcuacggcagcagcagcaacaccagagugcugaacgagcugaacuacgacaacgccggcaccaaccuguacaacgagcuggagaugaacuacuacggcaagcaggagaacugguacagccugaagaagaacagcagaagccugggcgagaacgacgacggcaacaacgaggacaacgagaagcugagaaagcccaagcacaagaagcugaagcagcccgccgacggcaaccccgaccccaacgccaaccccaacguggaccccaacgccaaccccaacguggaccccaacgccaaccccaacguggaccccaacgccaaccccaacgccaaccccaacgccaaccccaacgccaaccccaacgccaaccccaacgccaaccccaacgccaaccccaacgccaaccccaacgccaaccccaacgccaaccccaacgccaaccccaacgccaaccccaacgccaaccccaacgccaaccccaacgccaaccccaacguggaccccaacgccaaccccaacgccaaccccaacgccaaccccaacgccaaccccaacgccaaccccaacgccaaccccaacgccaaccccaacgccaaccccaacgccaaccccaacgccaaccccaacgccaaccccaacgccaaccccaacgccaaccccaacgccaaccccaacgccaaccccaacgccaaccccaacgccaaccccaacgccaaccccaacgccaaccccaacaagaacaaccagggcaacggccagggccacaacaugcccaacgaccccaacagaaacguggacgagaacgccaacgccaacaacgccgugaagaacaacaacaacgaggagcccagcgaccagcacaucgagaaguaccugaagaucauccagaacagccugagcaccgaguggagccccugcagcgugaccugcggcaacggcauccaggugagaaucaagcccggcagcgccaacaagcccaaggaccagcuggacuacgccaacgacaucgagaagaagaucugcaagauggagaagugcagcagcguguucaacguggugaacagcagcaucggccugaucauggugcugagcuuccuguuccugaacuga

SEQ ID NO: 4671 - RNA, 1182 nt, Artificial Sequence
  derived and/or modified CDS sequence (opt4) from Pf(Tz03-070)__BAM84803.1__CSP
augaugagaaagcuggccauccugagcgugagcagcuuccuguucguggaggcccuguuccaggaguaccagugcuacggcagcagcagcaacaccagagugcugaacgagcugaacuacgacaacgccggcaccaaccuguacaacgagcuggagaugaacuacuacggcaagcaggagaacugguacagccugaagaagaacagcagaagccugggcgagaacgacgacggcaacaacgaggacaacgagaagcugagaaagcccaagcacaagaagcugaagcagcccgccgacggcaaccccgaccccaacgccaaccccaacguggaccccaacgccaaccccaacguggaccccaacgccaaccccaacguggaccccaacgccaaccccaacgccaaccccaacgccaaccccaacgccaaccccaacgccaaccccaacgccaaccccaacgccaaccccaacgccaaccccaacgccaaccccaacgccaaccccaacgccaaccccaacgccaaccccaacgccaaccccaacgccaaccccaacgccaaccccaacgccaaccccaacguggaccccaacgccaaccccaacgccaaccccaacgccaaccccaacgccaaccccaacgccaaccccaacgccaaccccaacgccaaccccaacgccaaccccaacgccaaccccaacgccaaccccaacgccaaccccaacgccaaccccaacgccaaccccaacgccaaccccaacgccaaccccaacgccaaccccaacgccaaccccaacgccaaccccaacaagaacaaccagggcaacggccagggccacaacaugcccaacgaccccaacagaaacguggacgagaacgccaacgccaacaacgccgugaagaacaacaacaacgaggagcccagcgaccagcacaucgagaaguaccugcagaagauccagaacagccugagcaccgaguggagccccugcagcgugaccugcggcaacggcauccaggugagaaucaagcccggcagcgccaacaagcccaaggaccagcugaacuacgagaacgacaucgagaagaagaucugcaagauggagaagugcagcagcguguucaacguggugaacagcagcaucggccugaucauggugcugagcuuccuguuccugaacuga

SEQ ID NO: 4672 - RNA, 1182 nt, Artificial Sequence
  derived and/or modified CDS sequence (opt4) from Pf(Yaounde)__AAN87579.1__CSP
augaugagaaagcuggccauccugagcgugagcagcuuccuguucguggaggcccuguuccaggaguaccagugcuacggcagcagcagcaacaccagagugcugaacgagcugaacuacgacaacgccggcaccaaccuguacaacgagcuggagaugaacuacuacggcaagcaggagaacugguacagccugaagaagaacagcagaagccugggcgagaacgacgacggcaacaacgaggacaacgagaagcugagaaagcccaagcacaagaagcugaagcagcccggcgacggcaaccccgaccccaacgccaaccccaacguggaccccaacgccaaccccaacguggaccccaacgccaaccccaacguggaccccaacgccaaccccaacgccaaccccaacgccaaccccaacgccaaccccaacgccaaccccaacgccaaccccaacgccaaccccaacgccaaccccaacgccaaccccaacgccaaccccaacgccaaccccaacgccaaccccaacgccaaccccaacgccaaccccaacgccaaccccaacguggaccccaacgccaaccccaacgccaaccccaacgccaaccccaacgccaaccccaacgccaaccccaacgccaaccccaacgccaaccccaacgccaaccccaacgccaaccccaacgccaaccccaacgccaaccccaacgccaaccccaacgccaaccccaacgccaaccccaacgccaaccccaacgccaaccccaacgccaaccccaacgccaaccccaacgccaaccccaacaagaacaaccagggcaacggccagggccacaacaugcccaacgaccccaacagaaacguggacaagaacgccaacgccaacaacgccgugaagaacaacaacaacgaggagcccagcgacaagcacaucgaggaguaccugaagaagaucaagaacagcaucagcaccgaguggagccccugcagcgugaccugcggcaacggcauccaggugagaaucaagcccggcagcgccaacaagcccaaggacgagcuggacuacgagaacgacaucgagaagaagaucugcaagauggagaagugcagcagcguguucaacguggugaacagcagcaucggccugaucauggugcugagcuuccuguuccugaacuga

SEQ ID NO: 4673 - RNA, 1182 nt, Artificial Sequence
  derived and/or modified CDS sequence (opt4) from Pf(Yaounde)__AAN87578.1__CSP
augaugagaaagcuggccauccugagcgugagcagcuuccuguucguggaggcccuguuccaggaguaccagugcuacggcagcagcagcaacaccagagugcugaacgagcugaacuacgacaacgccggcaccaaccuguacaacgagcuggagaugaacuacuacggcaagcaggagaacugguacagccugaagaagaacagcagaagccugggcgagaacgacgacggcaacaacgaggacaacgagaagcugagaaagcccaagcacaagaagcugaagcagcccggcgacggcaaccccgaccccaacgccaaccccaacguggaccccaacgccaaccccaacguggaccccaacgccaaccccaacguggaccccaacgccaaccccaacgccaaccccaacgccaaccccaacgccaaccccaacgccaaccccaacgccaaccccaacgccaaccccaacgccaaccccaacgccaaccccaacgccaaccccaacgccaaccccaacgccaaccccaacgccaaccccaacgccaaccccaacgccaaccccaacguggaccccaacgccaaccccaacgccaaccccaacgccaaccccaacgccaaccccaacgccaaccccaacgccaaccccaacgccaaccccaacgccaaccccaacgccaaccccaacgccaaccccaacgccaaccccaacgccaaccccaacgccaaccccaacgccaaccccaacgccaaccccaacgccaaccccaacgccaaccccaacgccaaccccaacgccaaccccaacaagaacaaccagggcaacggccagggccacaacaugcccaacgaccccaacagaaacgugaacgagaacgccaacgccaacaacgccgugaagaacaacaacaacgaggagcccagcgacaagcacaucgagaaguaccugaaggagauccagaacagccugagcaccgaguggagccccugcagcgugaccugcggcaacggcauccaggugagaaucaagcccggcagcgccggcaagcccaagaacgagcuggacuacgagaacgacaucgagaagaagaucugcaagauggagaagugcagcagcguguucaacguggugaacagcagcaucggccugaucauggugcugagcuuccuguuccugaacuga

SEQ ID NO: 4674 - RNA, 1179 nt, Artificial Sequence
  derived and/or modified CDS sequence (opt4) from Pf(Asembo Bay)__AAN87607.1__CSP
augaugagaaagcuggccauccugagcgugagcagcuuccuguucguggaggcccuguuccaggaguaccagugcuacggcagcagcagcaacaccagagugcugaacgagcugaacuacgacaacgccggcaccaaccuguacaacgagcuggagaugaacuacuacggcaagcaggagaacugguacagccugaagaagaacagcagaagccugggcgagaacgacgacggcaacaacaacaacggcgacaacggcagagagggcaaggacgaggacaagagagacggcaacaacgaggacaacgagaagcugagaaagcccaagcacaagaagcugaagcagcccgccgacggcaaccccgaccccaacgccaaccccaacguggaccccaacgccaaccccaacguggaccccaacgccaaccccaacgccaaccccaacgccaaccccaacgccaaccccaacgccaaccccaacgccaaccccaacgccaaccccaacgccaaccccaacgccaaccccaacgccaaccccaacgccaaccccaacgccaaccccaacguggaccccaacgccaaccccaacgccaaccccaacgccaaccccaacgccaaccccaacgccaaccccaacgccaaccccaacgccaaccccaacgccaaccccaacgccaaccccaacgccaaccccaacgccaaccccaacgccaaccccaacgccaaccccaacgccaaccccaacgccaaccccaacgccaaccccaacgccaaccccaacgccaaccccaacgccaaccccaacaagaacaaccagggcaacggccagggccacaacaugcccaacgaccccaacagaaacguggacgagaacgccaacgccaacaacgccgugaagaacaacaacaacgaggagcccagcgacaagcacaucgagcaguaccugaacaagaucaagaacagcaucagcaccgaguggagccccugcagcgugaccugcggcaacggcauccaggugagaaucaagcccggcagcgccaacaagcccaaggaccagcuggacuacgagaacgacaucgagaagaagaucugcaagauggagaagugcagcagcguguucaacguggugaacagcagcaucggccugaucauggugcugagcuuccuguuccugaacuga

SEQ ID NO: 4675 - RNA, 1179 nt, Artificial Sequence
  derived and/or modified CDS sequence (opt4) from Pf(Asembo Bay)__AAN87608.1__CSP
augaugagaaagcuggccauccugagcgugagcagcuuccuguucguggaggcccuguuccaggaguaccagugcuacggcagcagcagcaacaccagagugcugaacgagcugaacuacgacaacgccggcaccaaccuguacaacgagcuggagaugaacuacuacggcaagcaggagaacugguacagccugaagaagaacagcagaagccugggcgagaacgacgacggcaacaacaacaacggcgacaacggcagagagggcaaggacgaggacaagagagacggcaacaacgaggacaacgagaagcugagaaagcccaagcacaagaagcugaagcagcccgccgacggcaaccccgaccccaacgccaaccccaacguggaccccaacgccaaccccaacguggaccccaacgccaaccccaacguggaccccaacgccaaccccaacgccaaccccaacgccaaccccaacgccaaccccaacgccaaccccaacgccaaccccaacgccaaccccaacgccaaccccaacgccaaccccaacgccaaccccaacguggaccccaacgccaaccccaacgccaaccccaacgccaaccccaacgccaaccccaacgccaaccccaacgccaaccccaacgccaaccccaacgccaaccccaacgccaaccccaacgccaaccccaacgccaaccccaacgccaaccccaacgccaaccccaacgccaaccccaacgccaaccccaacgccaaccccaacgccaaccccaacgccaaccccaacgccaaccccaacaagaacaaccagggcaacggccagggccacaacaugcccaacgaccccaacagaaacguggacgagaacgccaacgccaacaacgccgugaagaacaacaacaacgaggagcccagcgacaagcacaucgagcaguaccugaagaucaucaagaacagccugagcaccgaguggagccccugcagcgugaccugcggcaacggcauccaggugagaaucaagcccggcagcgccaacaagcccaaggacgagcuggacuacgccaacgacaucgagaagaagaucugcaagauggagaagugcagcagcguguucaacguggugaacagcagcaucggccugaucauggugcugagcuuccuguuccugaacuga

SEQ ID NO: 4676 - RNA, 1179 nt, Artificial Sequence
  derived and/or modified CDS sequence (opt4) from Pf(Asembo Bay)__AAN87595.1__CSP
augaugagaaagcuggccauccugagcgugagcagcuuccuguucguggaggcccuguuccaggaguaccagugcuacggcagcagcagcaacaccagagugcugaacgagcugaacuacgacaacgccggcaccaaccuguacaacgagcuggagaugaacuacuacggcaagcaggagaacugguacagccugaagaagaacagcagaagccugggcgagaacgacgacggcaacaacaacaacggcgacaacggcagagagggcaaggacgaggacaagagagacggcaacaacgaggacaacgagaagcugagaaagcccaagcacaagaagcugaagcagcccgccgacggcaaccccgaccccaacgccaaccccaacguggaccccaacgccaaccccaacguggaccccaacgccaaccccaacguggaccccaacgccaaccccaacgccaaccccaacgccaaccccaacgccaaccccaacgccaaccccaacgccaaccccaacgccaaccccaacgccaaccccaacgccaaccccaacgccaaccccaacguggaccccaacgccaaccccaacgccaaccccaacgccaaccccaacgccaaccccaacgccaaccccaacgccaaccccaacgccaaccccaacgccaaccccaacgccaaccccaacgccaaccccaacgccaaccccaacgccaaccccaacgccaaccccaacgccaaccccaacgccaaccccaacgccaaccccaacgccaaccccaacgccaaccccaacgccaaccccaacaagaacaaccagggcaacggccagggccacaacaugcccaacgaccccaacagaaacguggacgagaacgccaacgccaacaacgccgugaagaacaacaacaacgaggagcccagcgacaagcacaucaccgaguaccugaagagaauccagaacagccugagcaccgaguggagccccugcagcgugaccugcggcaacggcauccaggugagaaucaagcccggcagcgccggcaagagcaagaacgagcuggacuacgagaacgacaucgagaagaagaucugcaagauggagaagugcagcagcguguucaacguggugaacagcagcaucggccugaucauggugcugagcuuccuguuccugaacuga

SEQ ID NO: 4677 - RNA, 1179 nt, Artificial Sequence
  derived and/or modified CDS sequence (opt4) from Pf(India)__AAN87618.1__CSP
augaugagaaagcuggccauccugagcgugagcagcuuccuguucguggaggcccuguuccaggaguaccagugcuacggcagcagcagcaacaccagagugcugaacgagcugaacuacgacaacgccggcaccaaccuguacaacgagcuggagaugaacuacuacggcaagcaggagaacugguacagccugaagaagaacagcagaagccugggcgagaacgacgacggcaacaacaacaacggcgacaacggcagagagggcaaggacgaggacaagagagacggcaacaacgaggacaacgagaagcugagaaagcccaagcacaagaagcugaagcagcccggcggcgacaaccccgaccccaacgccaaccccaacguggaccccaacgccaaccccaacgccaaccccaacgccaaccccaacgccaaccccaacgccaaccccaacgccaaccccaacgccaaccccaacgccaaccccaacgccaaccccaacgccaaccccaacgccaaccccaacgccaaccccaacgccaaccccaacgccaaccccaacgccaaccccaacgccaaccccaacgccaaccccaacgccaaccccaacgccaaccccaacgccaaccccaacgccaaccccaacgccaaccccaacgccaaccccaacgccaaccccaacgccaaccccaacgccaaccccaacgccaaccccaacgccaaccccaacgccaaccccaacgccaaccccaacgccaaccccaacgccaaccccaacgccaaccccaacgccaaccccaacaagaacaaccagggcaacggccagggccacaacaugcccaacgaccccaacagaaacguggacgagaacgccaacgccaacaacgccgugaagaacaacaacaacgaggagcccagcgacaagcacaucgagcaguaccugaagaagauccagaacagccugagcaccgaguggagccccugcagcgugaccugcggcaacggcauccaggugagaaucaagcccggcagcgccaacaagcccaaggacgagcuggacuacgagaacgacaucgagaagaagaucugcaagauggagaagugcagcagcguguucaacguggugaacagcagcaucggccugaucauggugcugagcuuccuguuccugaacuga

SEQ ID NO: 4678 - RNA, 1170 nt, Artificial Sequence
  derived and/or modified CDS sequence (opt4) from Pf(Asembo Bay)__AAN87585.1__CSP
augaugagaaagcuggccauccugagcgugagcagcuuccuguucguggaggcccuguuccaggaguaccagugcuacggcagcagcagcaacaccagagugcugaacgagcugaacuacgacaacgccggcaccaaccuguacaacgagcuggagaugaacuacuacggcaagcaggagaacugguacagccugaagaagaacagcagaagccugggcgagaacgacgacggcaacaacgaggacaacgagaagcugagaaagcccaagcacaagaagcugaagcagcccgccgacggcaaccccgaccccaacgccaaccccaacguggaccccaacgccaaccccaacguggaccccaacgccaaccccaacguggaccccaacgccaaccccaacgccaaccccaacgccaaccccaacgccaaccccaacgccaaccccaacgccaaccccaacgccaaccccaacgccaaccccaacgccaaccccaacgccaaccccaacgccaaccccaacgccaaccccaacgccaaccccaacgccaaccccaacgccaaccccaacguggaccccaacgccaaccccaacgccaaccccaacgccaaccccaacgccaaccccaacgccaaccccaacgccaaccccaacgccaaccccaacgccaaccccaacgccaaccccaacgccaaccccaacgccaaccccaacgccaaccccaacgccaaccccaacgccaaccccaacgccaaccccaacgccaaccccaacgccaaccccaacgccaaccccaacaagaacaaccagggcaacggccagggccacaacaugcccaacgaccccaacagaaacguggacgagaacgccaacgccaacaacgccgugaagaacaacaacaacgaggagcccagcgaccagcacaucgagaaguaccugaagaccauccagaacagccugagcaccgaguggagccccugcagcgugaccugcggcaacggcauccaggugagaaucaagcccggcagcgccaacaagcccaaggaccagcuggacuacgccaacgacaucgagaagaagaucugcaagauggagaagugcagcagcguguucaacguggugaacagcagcaucggccugaucauggugcugagcuuccuguuccugaacuga

SEQ ID NO: 4679 - RNA, 1170 nt, Artificial Sequence
  derived and/or modified CDS sequence (opt4) from Pf(Asembo Bay)__AAN87577.1__CSP
augaugagaaagcuggccauccugagcgugagcagcuuccuguucguggaggcccuguuccaggaguaccagugcuacggcagcagcagcaacaccagagugcugaacgagcugaacuacgacaacgccggcaccaaccuguacaacgagcuggagaugaacuacuacggcaagcaggagaacugguacagccugaagaagaacagcagaagccugggcgagaacgacgacggcaacaacgaggacaacgagaagcugagaaagcccaagcacaagaagcugaagcagcccggcgacggcaaccccgaccccaacgccaaccccaacguggaccccaacgccaaccccaacguggaccccaacgccaaccccaacguggaccccaacgccaaccccaacgccaaccccaacgccaaccccaacgccaaccccaacgccaaccccaacgccaaccccaacgccaaccccaacgccaaccccaacgccaaccccaacgccaaccccaacgccaaccccaacgccaaccccaacgccaaccccaacgccaaccccaacguggaccccaacgccaaccccaacgccaaccccaacgccaaccccaacgccaaccccaacgccaaccccaacgccaaccccaacgccaaccccaacgccaaccccaacgccaaccccaacgccaaccccaacgccaaccccaacgccaaccccaacgccaaccccaacgccaaccccaacgccaaccccaacgccaaccccaacgccaaccccaacgccaaccccaacgccaaccccaacaagaacaaccagggcaacggccagggccacaacaugcccaacgaccccaacagaaacgugaacgagaacgccaacgccaacaacgccgugaagaacaacaacaacgaggagcccagcgacaagcacaucgagaaguaccugaaggagauccagaacagccugagcaccgaguggagccccugcagcgugaccugcggcaacggcauccaggugagaaucaagcccggcagcgccggcaagcccaagaacgagcuggacuacgagaacgacaucgagaagaagaucugcaagauggagaagugcagcagcguguucaacguggugaacagcagcaucggccugaucauggugcugagcuuccuguuccugaacuga

SEQ ID NO: 4680 - RNA, 1170 nt, Artificial Sequence
  derived and/or modified CDS sequence (opt4) from Pf(Gha1108-043)__BAM84815.1__CSP
augaugagaaagcuggccauccugagcgugagcagcuuccuguucguggaggcccuguuccaggaguaccagugcuacggcagcagcagcaacaccagagugcugaacgagcugaacuacgacaacgccggcaccaaccuguacaacgagcuggagaugaacuacuacggcaagcaggagaacugguacagccugaagaagaacagcagaagccugggcgagaacgacgacggcaacaacgaggacaacgagaagcugagaaagcccaagcacaagaagcugaagcagcccggcgacggcaaccccgaccccaacgccaaccccaacguggaccccaacgccaaccccaacguggaccccaacgccaaccccaacguggaccccaacgccaaccccaacgccaaccccaacgccaaccccaacgccaaccccaacgccaaccccaacgccaaccccaacgccaaccccaacgccaaccccaacgccaaccccaacgccaaccccaacgccaaccccaacgccaaccccaacgccaaccccaacgccaaccccaacguggaccccaacgccaaccccaacgccaaccccaacgccaaccccaacgccaaccccaacgccaaccccaacgccaaccccaacgccaaccccaacgccaaccccaacgccaaccccaacgccaaccccaacgccaaccccaacgccaaccccaacgccaaccccaacgccaaccccaacgccaaccccaacgccaaccccaacgccaaccccaacgccaaccccaacgccaaccccaacaagaacaaccagggcaacggccagggccacaacaugcccaacgaccccaacagaaacguggacgagaacgccaacgccaacagcgccgugaagaacaacaacaacgaggagcccagcgacaagcacaucaaggaguaccugaacaagauccagaacagccugagcaccgaguggagccccugcagcgugaccugcggcaacggcauccaggugagaaucaagcccggcagcgccaacaagcccaaggacgagcuggacuacgccaacgacaucgagaagaagaucugcaagauggagaagugcagcagcguguucaacguggugaacagcagcaucggccugaucauggugcugagcuuccuguuccugaacuga

SEQ ID NO: 4681 - RNA, 1170 nt, Artificial Sequence
  derived and/or modified CDS sequence (opt4) from Pf(Gha1108-052)__BAM84816.1__CSP
augaugagaaagcuggccauccugagcgugagcagcuuccuguucguggaggcccuguuccaggaguaccagugcuacggcagcagcagcaacaccagagugcugaacgagcugaacuacgacaacgccggcaccaaccuguacaacgagcuggagaugaacuacuacggcaagcaggagaacugguacagccugaagaagaacagcagaagccugggcgagaacgacgacggcaacaacgaggacaacgagaagcugagaaagcccaagcacaagaagcugaagcagcccgccgacggcaaccccgaccccaacgccaaccccaacguggaccccaacgccaaccccaacguggaccccaacgccaaccccaacguggaccccaacgccaaccccaacgccaaccccaacgccaaccccaacgccaaccccaacgccaaccccaacgccaaccccaacgccaaccccaacgccaaccccaacgccaaccccaacgccaaccccaacgccaaccccaacgccaaccccaacgccaaccccaacgccaaccccaacguggaccccaacgccaaccccaacgccaaccccaacgccaaccccaacgccaaccccaacgccaaccccaacgccaaccccaacgccaaccccaacgccaaccccaacgccaaccccaacgccaaccccaacgccaaccccaacgccaaccccaacgccaaccccaacgccaaccccaacgccaaccccaacgccaaccccaacgccaaccccaacgccaaccccaacgccaaccccaacaagaacaaccagggcaacggccagggccacaacaugcccaacgaccccaacagaaacguggacgagaacgccaacgccaacagcgccgugaagaacaacaacaacgaggagcccagcgacaagcacaucgagcaguaccugaagaccauccagaacagccugagcaccgaguggagccccugcagcgugaccugcggcaacggcauccaggugagaaucaagcccggcagcgccaacaagcccaaggaccagcuggacuacgagaacgacaucgagaagaagaucugcaagauggagaagugcagcagcguguucaacguggugaacagcagcaucggccugaucauggugcugagcuuccuguuccugaacuga

SEQ ID NO: 4682 - RNA, 1170 nt, Artificial Sequence
  derived and/or modified CDS sequence (opt4) from Pf(Gha1108-124)__BAM84812.1__CSP
augaugagaaagcuggccauccugagcgugagcagcuuccuguucguggaggcccuguuccaggaguaccagugcuacggcagcagcagcaacaccagagugcugaacgagcugaacuacgacaacgccggcaccaaccuguacaacgagcuggagaugaacuacuacggcaagcaggagaacugguacagccugaagaagaacagcagaagccugggcgagaacgacgacggcaacaacgaggacaacgagaagcugagaaagcccaagcacaagaagcugaagcagcccgccgacggcaaccccgaccccaacgccaaccccaacguggaccccaacgccaaccccaacguggaccccaacgccaaccccaacguggaccccaacgccaaccccaacgccaaccccaacgccaaccccaacgccaaccccaacgccaaccccaacgccaaccccaacgccaaccccaacgccaaccccaacgccaaccccaacgccaaccccaacgccaaccccaacgccaaccccaacgccaaccccaacgccaaccccaacgccaaccccaacguggaccccaacgccaaccccaacgccaaccccaacgccaaccccaacgccaaccccaacgccaaccccaacgccaaccccaacgccaaccccaacgccaaccccaacgccaaccccaacgccaaccccaacgccaaccccaacgccaaccccaacgccaaccccaacgccaaccccaacgccaaccccaacgccaaccccaacgccaaccccaacgccaaccccaacaagaacaaccagggcaacggccagggccacaacaugcccaacgaccccaacagaaacguggacgagaacgccaacgccaacaacgccgugaagaacaacaacaacgaggagcccagcgaccagcacaucgagaaguaccugaacaagaucaagaacagccugagcaccgaguggagccccugcagcgugaccugcggcaacggcauccaggugagaaucaagcccggcagcgccaacaagcccaaggaccagcuggacuacgccaacgacaucgagaagaagaucugcaagauggagaagugcagcagcguguucaacguggugaacagcagcaucggccugaucauggugcugagcuuccuguuccugaacuga

SEQ ID NO: 4683 - RNA, 1170 nt, Artificial Sequence
  derived and/or modified CDS sequence (opt4) from Pf(Gha1109-003)__BAM84834.1__CSP
augaugagaaagcuggccauccugagcgugagcagcuuccuguucguggaggcccuguuccaggaguaccagugcuacggcagcagcagcaacaccagagugcugaacgagcugaacuacgacaacgccggcaccaaccuguacaacgagcuggagaugaacuacuacggcaagcaggagaacugguacagccugaagaagaacagcagaagccugggcgagaacgacgacggcaacaacgaggacaacgagaagcugagaaagcccaagcacaagaagcugaagcagcccgccgacggcaaccccgaccccaacgccaaccccaacguggaccccaacgccaaccccaacguggaccccaacgccaaccccaacguggaccccaacgccaaccccaacgccaaccccaacgccaaccccaacgccaaccccaacgccaaccccaacgccaaccccaacgccaaccccaacgccaaccccaacgccaaccccaacgccaaccccaacgccaaccccaacgccaaccccaacgccaaccccaacgccaaccccaacguggaccccaacgccaaccccaacgccaaccccaacgccaaccccaacgccaaccccaacgccaaccccaacgccaaccccaacgccaaccccaacgccaaccccaacgccaaccccaacgccaaccccaacgccaaccccaacgccaaccccaacgccaaccccaacgccaaccccaacgccaaccccaacgccaaccccaacgccaaccccaacgccaaccccaacgccaaccccaacaagaacaaccagggcaacggccagggccacaacaugcccaacgaccccaacagaaacguggacgagaacgccaacgccaacgacgccgugaagaacaacaacaacgaggagcccagcgaccagcacaucgagaaguaccugaagaucaucaagaacagccugagcaccgaguggagccccugcagcgugaccugcggcaacggcauccaggugagaaucaagcccggcagcgccaacaagcccaaggaccagcuggacuacgccaacgacaucgagaagaagaucugcaagauggagaagugcagcagcguguucaacguggugaacagcagcaucggccugaucauggugcugagcuuccuguuccugaacuga

SEQ ID NO: 4684 - RNA, 1170 nt, Artificial Sequence
  derived and/or modified CDS sequence (opt4) from Pf(Gha1109-058)__BAM84835.1__CSP
augaugagaaagcuggccauccugagcgugagcagcuuccuguucguggaggcccuguuccaggaguaccagugcuacggcagcagcagcaacaccagagugcugaacgagcugaacuacgacaacgccggcaccaaccuguacaacgagcuggagaugaacuacuacggcaagcaggagaacugguacagccugaagaagaacagcagaagccugggcgagaacgacgacggcaacaacgaggacaacgagaagcugagaaagcccaagcacaagaagcugaagcagcccggcgacggcaaccccgaccccaacgccaaccccaacguggaccccaacgccaaccccaacguggaccccaacgccaaccccaacguggaccccaacgccaaccccaacgccaaccccaacgccaaccccaacgccaaccccaacgccaaccccaacgccaaccccaacgccaaccccaacgccaaccccaacgccaaccccaacgccaaccccaacgccaaccccaacgccaaccccaacgccaaccccaacgccaaccccaacguggaccccaacgccaaccccaacgccaaccccaacgccaaccccaacgccaaccccaacgccaaccccaacgccaaccccaacgccaaccccaacgccaaccccaacgccaaccccaacgccaaccccaacgccaaccccaacgccaaccccaacgccaaccccaacgccaaccccaacgccaaccccaacgccaaccccaacgccaaccccaacgccaaccccaacgccaaccccaacaagaacaaccagggcaacggccagggccacaacaugcccaacgaccccaacagaaacguggacgagaacgccaacgccaacaacgccgugaagaacaacaacaacgaggagcccagcgacaagcacaucaccgaguaccugaagaagauccagaacagccugagcaccgaguggagccccugcagcgugaccugcggcaacggcauccaggugagaaucaagcccggcagcgccggcaagagcaagaacgagcuggacuacgagaacgacaucgagaagaagaucugcaagauggagaagugcagcagcguguucaacguggugaacagcagcaucggccugaucauggugcugagcuuccuguuccugaacuga

SEQ ID NO: 4685 - RNA, 1170 nt, Artificial Sequence
  derived and/or modified CDS sequence (opt4) from Pf(Gha1109-105)__BAM84822.1__CSP
augaugagaaagcuggccauccugagcgugagcagcuuccuguucguggaggcccuguuccaggaguaccagugcuacggcagcagcagcaacaccagagugcugaacgagcugaacuacgacaacgccggcaccaaccuguacaacgagcuggagaugaacuacuacggcaagcaggagaacugguacagccugaagaagaacagcagaagccugggcgagaacgacgacggcaacaacgaggacaacgagaagcugagaaagcccaagcacaagaagcugaagcagcccgccgacggcaaccccgaccccaacgccaaccccaacguggaccccaacgccaaccccaacgccaaccccaacgccaaccccaacgccaaccccaacgccaaccccaacgccaaccccaacguggaccccaacgccaaccccaacguggaccccaacgccaaccccaacgccaaccccaacgccaaccccaacgccaaccccaacgccaaccccaacgccaaccccaacgccaaccccaacgccaaccccaacguggaccccaacgccaaccccaacgccaaccccaacgccaaccccaacgccaaccccaacgccaaccccaacgccaaccccaacgccaaccccaacgccaaccccaacgccaaccccaacgccaaccccaacgccaaccccaacgccaaccccaacgccaaccccaacgccaaccccaacgccaaccccaacgccaaccccaacgccaaccccaacgccaaccccaacgccaaccccaacgccaaccccaacaagaacaaccagggcaacggccagggccacaacaugcccaacgaccccaacagaaacguggacgagaacgccaaggccaacaacgccgugaagaacaacaacaacgaggagcccagcgacaagcacaucgagcaguaccugaagaccauccagaacagccugagcaccgaguggagccccugcagcgugaccugcggcaacggcauccaggugagaaucaagcccggcagcgccaacaagcccaaggaccagcuggacuacgagaacgacaucgagaagaagaucugcaagauggagaagugcagcagcguguucaacguggugaacagcagcaucggccugaucauggugcugagcuuccuguuccugaacuga

SEQ ID NO: 4686 - RNA, 1170 nt, Artificial Sequence
  derived and/or modified CDS sequence (opt4) from Pf(Gha1109-111)__BAM84823.1__CSP
augaugagaaagcuggccauccugagcgugagcagcuuccuguucguggaggcccuguuccaggaguaccagugcuacggcagcagcagcaacaccagagugcugaacgagcugaacuacgacaacgccggcaccaaccuguacaacgagcuggagaugaacuacuacggcaagcaggagaacugguacagccugaagaagaacagcagaagccugggcgagaacgacgacggcaacaacgaggacaacgagaagcugagaaagcccaagcacaagaagcugaagcagcccggcgacggcaaccccgaccccaacgccaaccccaacguggaccccaacgccaaccccaacguggaccccaacgccaaccccaacguggaccccaacgccaaccccaacgccaaccccaacgccaaccccaacgccaaccccaacgccaaccccaacgccaaccccaacgccaaccccaacgccaaccccaacgccaaccccaacgccaaccccaacgccaaccccaacgccaaccccaacgccaaccccaacgccaaccccaacguggaccccaacgccaaccccaacgccaaccccaacgccaaccccaacgccaaccccaacgccaaccccaacgccaaccccaacgccaaccccaacgccaaccccaacgccaaccccaacgccaaccccaacgccaaccccaacgccaaccccaacgccaaccccaacgccaaccccaacgccaaccccaacgccaaccccaacgccaaccccaacgccaaccccaacgccaaccccaacaagaacaaccagggcaacggccagggccacaacaugcccaacgaccccaacagaaacguggacgagaacgccaacgccaacaacgccgugaagaacaacaacaacgaggagcccagcgacaagcacaucaaggaguaccugaacaagauccagaacagcaucagcaccgaguggagccccugcagcgugaccugcggcaacggcauccaggugagaaucaagcccggcagcgccgacaagcccaaggaccagcuggacuacaucaacgacaucgagaagaagaucugcaagauggagaagugcagcagcguguucaacguggugaacagcagcaucggccugaucauggugcugagcuuccuguuccugaacuga

SEQ ID NO: 4687 - RNA, 1170 nt, Artificial Sequence
  derived and/or modified CDS sequence (opt4) from Pf(Gha1109-125)__BAM84824.1__CSP
augaugagaaagcuggccauccugagcgugagcagcuuccuguucguggaggcccuguuccaggaguaccagugcuacggcagcagcagcaacaccagagugcugaacgagcugaacuacgacaacgccggcaccaaccuguacaacgagcuggagaugaacuacuacggcaagcaggagaacugguacagccugaagaagaacagcagaagccugggcgagaacgacgacggcaacaacgaggacaacgagaagcugagaaagcccaagcacaagaagcugaagcagcccgccgacggcaaccccgaccccaacgccaaccccaacguggaccccaacgccaaccccaacguggaccccaacgccaaccccaacguggaccccaacgccaaccccaacgccaaccccaacgccaaccccaacgccaaccccaacgccaaccccaacgccaaccccaacgccaaccccaacgccaaccccaacgccaaccccaacgccaaccccaacgccaaccccaacgccaaccccaacgccaaccccaacgccaaccccaacgccaaccccaacguggaccccaacgccaaccccaacgccaaccccaacgccaaccccaacgccaaccccaacgccaaccccaacgccaaccccaacgccaaccccaacgccaaccccaacgccaaccccaacgccaaccccaacgccaaccccaacgccaaccccaacgccaaccccaacgccaaccccaacgccaaccccaacgccaaccccaacgccaaccccaacgccaaccccaacaagaacaaccagggcaacggccagggccacaacaugcccaacgaccccaacagaaacguggacgagaacgccaacgccaacaacgccgugaagaacaacaacaacgaggagcccagcgaccagcacaucgagaaguaccugaagaccaucaagaacagccugagcaccgaguggagccccugcagcgugaccugcggcaacggcauccaggugagaaucaagcccggcagcgccaacaagcccaaggaccagcuggacuacgccaacgacaucgagaagaagaucugcaagauggagaagugcagcagcguguucaacguggugaacagcagcaucggccugaucauggugcugagcuuccuguuccugaacuga

SEQ ID NO: 4688 - RNA, 1170 nt, Artificial Sequence
  derived and/or modified CDS sequence (opt4) from Pf(Gha1109-127)__BAM84825.1__CSP
augaugagaaagcuggccauccugagcgugagcagcuuccuguucguggaggcccuguuccaggaguaccagugcuacggcagcagcagcaacaccagagugcugaacgagcugaacuacgacaacgccggcaccaaccuguacaacgagcuggagaugaacuacuacggcaagcaggagaacugguacagccugaagaagaacagcagaagccugggcgagaacgacgacggcaacaacgaggacaacgagaagcugagaaagcccaagcacaagaagcugaagcagcccggcgacggcaaccccgaccccaacgccaaccccaacguggaccccaacgccaaccccaacguggaccccaacgccaaccccaacguggaccccaacgccaaccccaacgccaaccccaacgccaaccccaacgccaaccccaacgccaaccccaacgccaaccccaacgccaaccccaacgccaaccccaacgccaaccccaacgccaaccccaacgccaaccccaacgccaaccccaacgccaaccccaacgccaaccccaacguggaccccaacgccaaccccaacgccaaccccaacgccaaccccaacgccaaccccaacgccaaccccaacgccaaccccaacgccaaccccaacgccaaccccaacgccaaccccaacgccaaccccaacgccaaccccaacgccaaccccaacgccaaccccaacgccaaccccaacgccaaccccaacgccaaccccaacgccaaccccaacgccaaccccaacgccaaccccaacaagaacaaccagggcaacggccagggccacaacaugcccaacgaccccaacagaaacguggacgagaacgccaacgccaacaacgccgugaagaacaacaacaacgaggagcccagcgacaagcacaucaccgaguaccugaagaagaucaagaacagccugagcaccgaguggagccccugcagcgugaccugcggcaacggcauccaggugagaaucaagcccggcagcgccggcaagagcaagaacgagcuggacuacgagaacgacaucgagaagaagaucugcaagauggagaagugcagcagcguguucaacguggugaacagcagcaucggccugaucauggugcugagcuuccuguuccugaacuga

SEQ ID NO: 4689 - RNA, 1170 nt, Artificial Sequence
  derived and/or modified CDS sequence (opt4) from Pf(Gha1109-158)__BAM84826.1__CSP
augaugagaaagcuggccauccugagcgugagcagcuuccuguucguggaggcccuguuccaggaguaccagugcuacggcagcagcagcaacaccagagugcugaacgagcugaacuacgacaacgccggcaccaaccuguacaacgagcuggagaugaacuacuacggcaagcaggagaacugguacagccugaagaagaacagcagaagccugggcgagaacgacgacggcaacaacgaggacaacgagaagcugagaaagcccaagcacaagaagcugaagcagcccgccgacggcaaccccgaccccaacgccaaccccaacguggaccccaacgccaaccccaacguggaccccaacgccaaccccaacguggaccccaacgccaaccccaacgccaaccccaacgccaaccccaacgccaaccccaacgccaaccccaacgccaaccccaacgccaaccccaacgccaaccccaacgccaaccccaacgccaaccccaacgccaaccccaacgccaaccccaacgccaaccccaacgccaaccccaacguggaccccaacgccaaccccaacgccaaccccaacgccaaccccaacgccaaccccaacgccaaccccaacgccaaccccaacgccaaccccaacgccaaccccaacgccaaccccaacgccaaccccaacgccaaccccaacgccaaccccaacgccaaccccaacgccaaccccaacgccaaccccaacgccaaccccaacgccaaccccaacgccaaccccaacgccaaccccaacaagaacaaccagggcaacggccagggccacaacaugcccaacgaccccaacagaaacguggacgagaacgccaacgccaacaacgccgugaagaacaacaacaacgaggagcccagcgacaagcacaucgagcaguaccugaagaccaucaagaacagccugagcaccgaguggagccccugcagcgugaccugcggcaacggcauccaggugagaaucaagcccggcagcgccaacaagcccaaggaccagcuggacuacgccaacgacaucgagaagaagaucugcaagauggagaagugcagcagcguguucaacguggugaacagcagcaucggccugaucauggugcugagcuuccuguuccugaacuga

SEQ ID NO: 4690 - RNA, 1170 nt, Artificial Sequence
  derived and/or modified CDS sequence (opt4) from Pf(Gha1109-205)__BAM84832.1__CSP
augaugagaaagcuggccauccugagcgugagcagcuuccuguucguggaggcccuguuccaggaguaccagugcuacggcagcagcagcaacaccagagugcugaacgagcugaacuacgacaacgccggcaccaaccuguacaacgagcuggagaugaacuacuacggcaagcaggagaacugguacagccugaagaagaacagcagaagccugggcgagaacgacgacggcaacaacgaggacaacgagaagcugagaaagcccaagcacaagaagcugaagcagcccgccgacggcaaccccgaccccaacgccaaccccaacguggaccccaacgccaaccccaacguggaccccaacgccaaccccaacguggaccccaacgccaaccccaacgccaaccccaacgccaaccccaacgccaaccccaacgccaaccccaacgccaaccccaacgccaaccccaacgccaaccccaacgccaaccccaacgccaaccccaacgccaaccccaacgccaaccccaacgccaaccccaacgccaaccccaacguggaccccaacgccaaccccaacgccaaccccaacgccaaccccaacgccaaccccaacgccaaccccaacgccaaccccaacgccaaccccaacgccaaccccaacgccaaccccaacgccaaccccaacgccaaccccaacgccaaccccaacgccaaccccaacgccaaccccaacgccaaccccaacgccaaccccaacgccaaccccaacgccaaccccaacgccaaccccaacaagaacaaccagggcaacggccagggccacaacaugcccaacgaccccaacagaaacguggacgagaacgccaacgccaacaacgccgugaagaacaacaacaacgaggagcccagcgaccagcacaucgagaaguaccugaagaucauccagaacagccugagcaccgaguggagccccugcagcgugaccugcggcaacggcauccaggugagaaucaagcccggcagcgccaacaagcccaaggaccagcuggacuacgccaacgacaucgagaagaagaucugcaagauggagaagugcagcagcguguucaacguggugaacagcagcaucggccugaucauggugcugagcuuccuguuccugaacuga

SEQ ID NO: 4691 - RNA, 1170 nt, Artificial Sequence
  derived and/or modified CDS sequence (opt4) from Pf(T9/96)__BAD73957.1__CSP
augaugagaaagcuggccauccugagcgugagcagcuuccuguucguggaggcccuguuccaggaguaccagugcuacggcagcagcagcaacaccagagugcugaacgagcugaacuacgacaacgccggcaccaaccuguacaacgagcuggagaugaacuacuacggcaagcaggagaacugguacagccugaagaagaacagcagaagccugggcgagaacgacgacggcaacaacgaggacaacgagaagcugagaaagcccaagcacaagaagcugaagcagcccgccgacggcaaccccgaccccaacgccaaccccaacguggaccccaacgccaaccccaacguggaccccaacgccaaccccaacguggaccccaacgccaaccccaacgccaaccccaacgccaaccccaacgccaaccccaacgccaaccccaacgccaaccccaacgccaaccccaacgccaaccccaacgccaaccccaacgccaaccccaacgccaaccccaacgccaaccccaacgccaaccccaacgccaaccccaacguggaccccaacgccaaccccaacgccaaccccaacgccaaccccaacgccaaccccaacgccaaccccaacgccaaccccaacgccaaccccaacgccaaccccaacgccaaccccaacgccaaccccaacgccaaccccaacgccaaccccaacgccaaccccaacgccaaccccaacgccaaccccaacgccaaccccaacgccaaccccaacgccaaccccaacgccaaccccaacaagaacaaccagggcaacggccagggccacaacaugcccaacgaccccaacagaaacguggacgagaacgccaacgccaacaacgccgugaagaacaacaacaacgaggagcccagcgacaagcacaucgagcaguaccugaagaccaucaagaacagccugagcaccgaguggagccccugcagcgugaccugcggcaacggcauccaggugagaaucaagcccggcagcgccaacaagcccaaggacgagcuggacuacgccaacgacaucgagaagaagaucugcaagauggagaagugcagcagcguguucaacguggugaacagcagcaucggccugaucauggugcugagcuuccuguuccugaacuga

SEQ ID NO: 4692 - RNA, 1170 nt, Artificial Sequence
  derived and/or modified CDS sequence (opt4) from Pf(Tz93-015)__BAM84752.1__CSP
augaugagaaagcuggccauccugagcgugagcagcuuccuguucguggaggcccuguuccaggaguaccagugcuacggcagcagcagcaacaccagagugcugaacgagcugaacuacgacaacgccggcaccaaccuguacaacgagcuggagaugaacuacuacggcaagcaggagaacugguacagccugaagaagaacagcagaagccugggcgagaacgacgacggcaacaacgaggacaacgagaagcugagaaagcccaagcacaagaagcugaagcagcccggcgacggcaaccccgaccccaacgccaaccccaacguggaccccaacgccaaccccaacguggaccccaacgccaaccccaacguggaccccaacgccaaccccaacgccaaccccaacgccaaccccaacgccaaccccaacgccaaccccaacgccaaccccaacgccaaccccaacgccaaccccaacgccaaccccaacgccaaccccaacgccaaccccaacgccaaccccaacgccaaccccaacgccaaccccaacguggaccccaacgccaaccccaacgccaaccccaacgccaaccccaacgccaaccccaacgccaaccccaacgccaaccccaacgccaaccccaacgccaaccccaacgccaaccccaacgccaaccccaacgccaaccccaacgccaaccccaacgccaaccccaacgccaaccccaacgccaaccccaacgccaaccccaacgccaaccccaacgccaaccccaacgccaaccccaacaagaacaaccagggcaacggccagggccacaacaugcccaacgaccccaacagaaacguggacgagaacgccaacgccaacgacgccgugaagaacaacaacaacgaggagcccagcgaccagcacaucgagaaguaccugaagaucaucaagaacagccugagcaccgaguggagccccugcagcgugaccugcggcaacggcauccaggugagaaucaagcccggcagcgccaacaagcccaaggaccagcuggacuacgccaacgacaucgagaagaagaucugcaagauggagaagugcagcagcguguucaacguggugaacagcagcaucggccugaucauggugcugagcuuccuguuccugaacuga

SEQ ID NO: 4693 - RNA, 1170 nt, Artificial Sequence
  derived and/or modified CDS sequence (opt4) from Pf(Tz93-050)__BAM84762.1__CSP
augaugagaaagcuggccauccugagcgugagcagcuuccuguucguggaggcccuguuccaggaguaccagugcuacggcagcagcagcaacaccagagugcugaacgagcugaacuacgacaacgccggcaccaaccuguacaacgagcuggagaugaacuacuacggcaagcaggagaacugguacagccugaagaagaacagcagaagccugggcgagaacgacgacggcaacaacgaggacaacgagaagcugagaaagcccaagcacaagaagcugaagcagcccggcgacggcaaccccgaccccaacgccaaccccaacguggaccccaacgccaaccccaacguggaccccaacgccaaccccaacguggaccccaacgccaaccccaacgccaaccccaacgccaaccccaacgccaaccccaacgccaaccccaacgccaaccccaacgccaaccccaacgccaaccccaacgccaaccccaacgccaaccccaacgccaaccccaacgccaaccccaacgccaaccccaacgccaaccccaacguggaccccaacgccaaccccaacgccaaccccaacgccaaccccaacgccaaccccaacgccaaccccaacgccaaccccaacgccaaccccaacgccaaccccaacgccaaccccaacgccaaccccaacgccaaccccaacgccaaccccaacgccaaccccaacgccaaccccaacgccaaccccaacgccaaccccaacgccaaccccaacgccaaccccaacgccaaccccaacaagaacaaccagggcaacggccagggccacaacaugcccaacgaccccaacagaaacguggacgagaacgccaacgccaacaaccccgugaagaacaacaacaacgaggagcccagcgacaagcacaucaccgaguaccugaagaagaucaagaacagcaucagcaccgaguggagccccugcagcgugaccugcggcaacggcauccaggugagaaucaagcccggcagcgccaacaagcccaaggacgagcuggacuacgagaacgacaucgagaagaagaucugcaagauggagaagugcagcagcguguucaacguggugaacagcagcaucggccugaucauggugcugagcuuccuguuccugaacuga

SEQ ID NO: 4694 - RNA, 1170 nt, Artificial Sequence
  derived and/or modified CDS sequence (opt4) from Pf(Tz93-105)__BAM84774.1__CSP
augaugagaaagcuggccauccugagcgugagcagcuuccuguucguggaggcccuguuccaggaguaccagugcuacggcagcagcagcaacaccagagugcugaacgagcugaacuacgacaacgccggcaccaaccuguacaacgagcuggagaugaacuacuacggcaagcaggagaacugguacagccugaagaagaacagcagaagccugggcgagaacgacgacggcaacaacgaggacaacgagaagcugagaaagcccaagcacaagaagcugaagcagcccggcgacggcaaccccgaccccaacgccaaccccaacguggaccccaacgccaaccccaacguggaccccaacgccaaccccaacguggaccccaacgccaaccccaacgccaaccccaacgccaaccccaacgccaaccccaacgccaaccccaacgccaaccccaacgccaaccccaacgccaaccccaacgccaaccccaacgccaaccccaacgccaaccccaacgccaaccccaacgccaaccccaacgccaaccccaacguggaccccaacgccaaccccaacgccaaccccaacgccaaccccaacgccaaccccaacgccaaccccaacgccaaccccaacgccaaccccaacgccaaccccaacgccaaccccaacgccaaccccaacgccaaccccaacgccaaccccaacgccaaccccaacgccaaccccaacgccaaccccaacgccaaccccaacgccaaccccaacgccaaccccaacgccaaccccaacaagaacaaccagggcaacggccagggccacaacaugcccaacgaccccaacagaaacguggacgagaacgccaacgccaacaacgccgugaagaacaacaacaacgaggagcccagcgaccagcacaucgagaaguaccugaagaucauccagaacagccugagcaccgaguggagccccugcagcgugaccugcggcaacggcauccaggugagaaucaagcccggcagcgccaacaagcccaaggaccagcuggacuacgccaacgacaucgagaagaagaucugcaagauggagaagugcagcagcguguucaacguggugaacagcagcaucggccugaucauggugcugagcuuccuguuccugaacuga

SEQ ID NO: 4695 - RNA, 1170 nt, Artificial Sequence
  derived and/or modified CDS sequence (opt4) from Pf(Tz93-121)__BAM84777.1__CSP
augaugagaaagcuggccauccugagcgugagcagcuuccuguucguggaggcccuguuccaggaguaccagugcuacggcagcagcagcaacaccagagugcugaacgagcugaacuacgacaacgccggcaccaaccuguacaacgagcuggagaugaacuacuacggcaagcaggagaacugguacagccugaagaagaacagcagaagccugggcgagaacgacgacggcaacaacgaggacaacgagaagcugagaaagcccaagcacaagaagcugaagcagcccggcgacggcaaccccgaccccaacgccaaccccaacguggaccccaacgccaaccccaacguggaccccaacgccaaccccaacguggaccccaacgccaaccccaacgccaaccccaacgccaaccccaacgccaaccccaacgccaaccccaacgccaaccccaacgccaaccccaacgccaaccccaacgccaaccccaacgccaaccccaacgccaaccccaacguggaccccaacgccaaccccaacgccaaccccaacgccaaccccaacgccaaccccaacgccaaccccaacgccaaccccaacgccaaccccaacgccaaccccaacgccaaccccaacgccaaccccaacgccaaccccaacgccaaccccaacgccaaccccaacgccaaccccaacgccaaccccaacgccaaccccaacgccaaccccaacgccaaccccaacgccaaccccaacgccaaccccaacgccaaccccaacgccaaccccaacaagaacaaccagggcaacggccagggccacaacaugcccaacgaccccaacagaaacguggacgagaacgccaacgccaacaacgccgugaagaacaacaacaacgaggagcccagcgaccagcacaucgagaaguaccugaagaagaucaagaacagcaucagcaccgaguggagccccugcagcgugaccugcggcaacggcauccaggugagaaucaagcccggcagcgccaacaagcccaaggacgagcuggacuacgagaacgacaucgagaagaagaucugcaagauggagaagugcagcagcguguucaacguggugaacagcagcaucggccugaucauggugcugagcuuccuguuccugaacuga

SEQ ID NO: 4696 - RNA, 1170 nt, Artificial Sequence
  derived and/or modified CDS sequence (opt4) from Pf(Tz98-032)__BAM84786.1__CSP
augaugagaaagcuggccauccugagcgugagcagcuuccuguucguggaggcccuguuccaggaguaccagugcuacggcagcagcagcaacaccagagugcugaacgagcugaacuacgacaacgccggcaccaaccuguacaacgagcuggagaugaacuacuacggcaagcaggagaacugguacagccugaagaagaacagcagaagccugggcgagaacgacgacggcaacaacgaggacaacgagaagcugagaaagcccaagcacaagaagcugaagcagcccgccgacggcaaccccgaccccaacgccaaccccaacguggaccccaacgccaaccccaacguggaccccaacgccaaccccaacguggaccccaacgccaaccccaacgccaaccccaacgccaaccccaacgccaaccccaacgccaaccccaacgccaaccccaacgccaaccccaacgccaaccccaacgccaaccccaacgccaaccccaacgccaaccccaacgccaaccccaacgccaaccccaacgccaaccccaacgccaaccccaacguggaccccaacgccaaccccaacgccaaccccaacgccaaccccaacgccaaccccaacgccaaccccaacgccaaccccaacgccaaccccaacgccaaccccaacgccaaccccaacgccaaccccaacgccaaccccaacgccaaccccaacgccaaccccaacgccaaccccaacgccaaccccaacgccaaccccaacgccaaccccaacgccaaccccaacaagaacaaccagggcaacggccagggccacaacaugcccaacgaccccaacagaaacguggacgagaacgccaacgccaacaacgccgugaagaacaacaacaacgaggagcccagcgacaagcacaucgagcaguaccugaacaagaucaagaacagcaucagcaccgaguggagccccugcagcgugaccugcggcaacggcauccaggugagaaucaagcccggcagcgccaacaagcccaaggacgagcugaacuacgagaacgacaucgagaagaagaucugcaagauggagaagugcagcagcguguucaacguggugaacagcagcaucggccugaucauggugcugagcuuccuguuccugaacuga

SEQ ID NO: 4697 - RNA, 1170 nt, Artificial Sequence
  derived and/or modified CDS sequence (opt4) from Pf(Tz98-107)__BAM84796.1__CSP
augaugagaaagcuggccauccugagcgugagcagcuuccuguucguggaggcccuguuccaggaguaccagugcuacggcagcagcagcaacaccagagugcugaacgagcugaacuacgacaacgccggcaccaaccuguacaacgagcuggagaugaacuacuacggcaagcaggagaacugguacagccugaagaagaacagcagaagccugggcgagaacgacgacggcaacaacgaggacaacgagaagcugagaaagcccaagcacaagaagcugaagcagcccgccgacggcaaccccgaccccaacgccaaccccaacguggaccccaacgccaaccccaacguggaccccaacgccaaccccaacguggaccccaacgccaaccccaacgccaaccccaacgccaaccccaacgccaaccccaacgccaaccccaacgccaaccccaacgccaaccccaacgccaaccccaacgccaaccccaacgccaaccccaacgccaaccccaacgccaaccccaacgccaaccccaacgccaaccccaacguggaccccaacgccaaccccaacgccaaccccaacgccaaccccaacgccaaccccaacgccaaccccaacgccaaccccaacgccaaccccaacgccaaccccaacgccaaccccaacgccaaccccaacgccaaccccaacgccaaccccaacgccaaccccaacgccaaccccaacgccaaccccaacgccaaccccaacgccaaccccaacgccaaccccaacgccaaccccaacaagaacaaccagggcaacggccagggccacaacaugcccaacgaccccaacagaaacguggacgagaacgccaacgccaacaacgccgugaagaacaacaacaacgaggagcccagcgaccagcacaucgagaaguaccugaagagaauccagaacagccugagcaccgaguggagccccugcagcgugaccugcggcaacggcauccaggugagaaucaagcccggcagcgccaacaagcccaaggaccagcuggacuacgccaacgacaucgagaagaagaucugcaagauggagaagugcagcagcguguucaacguggugaacagcagcaucggccugaucauggugcugagcuuccuguuccugaacuga

SEQ ID NO: 4698 - RNA, 1167 nt, Artificial Sequence
  derived and/or modified CDS sequence (opt4) from Pf(Asembo Bay)__AAN87599.1__CSP
augaugagaaagcuggccauccugagcgugagcagcuuccuguucguggaggcccuguuccaggaguaccagugcuacggcagcagcagcaacaccagagugcugaacgagcugaacuacgacaacgccggcaccaaccuguacaacgagcuggagaugaacuacuacggcaagcaggagaacugguacagccugaagaagaacagcagaagccugggcgagaacgacgacggcaacaacaacaacggcgacaacggcagagagggcaaggacgaggacaagagagacggcaacaacgaggacaacgagaagcugagaaagcccaagcacaagaagcugaagcagcccgccgacggcaaccccgaccccaacgccaaccccaacguggaccccaacgccaaccccaacguggaccccaacgccaaccccaacguggaccccaacgccaaccccaacgccaaccccaacgccaaccccaacgccaaccccaacgccaaccccaacgccaaccccaacgccaaccccaacgccaaccccaacgccaaccccaacguggaccccaacgccaaccccaacgccaaccccaacgccaaccccaacgccaaccccaacgccaaccccaacgccaaccccaacgccaaccccaacgccaaccccaacgccaaccccaacgccaaccccaacgccaaccccaacgccaaccccaacgccaaccccaacgccaaccccaacgccaaccccaacgccaaccccaacgccaaccccaacgccaaccccaacgccaaccccaacaagaacaaccagggcaacggccagggccacaacaugcccaacgaccccaacagaaacguggacgagaacgccaacgccaacaacgccgugaagaacaacaacaacgaggagcccagcgacaagcacaucgagcaguaccugaacaagauccagaacagccugagcaccgaguggagccccugcagcgugaccugcggcaacggcauccaggugagaaucaagcccggcagcgccaacaagcccaaggaccagcuggacuacgccaacgacaucgagaagaagaucugcaagauggagaagugcagcagcguguucaacguggugaacagcagcaucggccugaucauggugcugagcuuccuguuccugaacuga

SEQ ID NO: 4699 - RNA, 1158 nt, Artificial Sequence
  derived and/or modified CDS sequence (opt4) from Pf(Asembo Bay)__AAN87581.1__CSP
augaugagaaagcuggccauccugagcgugagcagcuuccuguucguggaggcccuguuccaggaguaccagugcuacggcagcagcagcaacaccagagugcugaacgagcugaacuacgacaacgccggcaccaaccuguacaacgagcuggagaugaacuacuacggcaagcaggagaacugguacagccugaagaagaacagcagaagccugggcgagaacgacgacggcaacaacgaggacaacgagaagcugagaaagcccaagcacaagaagcugaagcagcccgccgacggcaaccccgaccccaacgccaaccccaacguggaccccaacgccaaccccaacguggaccccaacgccaaccccaacguggaccccaacgccaaccccaacgccaaccccaacgccaaccccaacgccaaccccaacgccaaccccaacgccaaccccaacgccaaccccaacgccaaccccaacgccaaccccaacgccaaccccaacgccaaccccaacgccaaccccaacgccaaccccaacguggaccccaacgccaaccccaacgccaaccccaacgccaaccccaacgccaaccccaacgccaaccccaacgccaaccccaacgccaaccccaacgccaaccccaacgccaaccccaacgccaaccccaacgccaaccccaacgccaaccccaacgccaaccccaacgccaaccccaacgccaaccccaacgccaaccccaacgccaaccccaacgccaaccccaacgccaaccccaacaagaacaaccagggcaacggccagggccacaacaugcccaacgaccccaacagaaacguggacgagaacgccaaggccaacaacgccgugaagaacaacaacaacgaggagcccagcgacaagcacaucaagcaguaccugaagaagauccagaacagcaucagcaccgaguggagccccugcagcgugaccugcggcaacggcauccaggugagaaucaagcccggcagcgccgacaagcccaaggaccagcuggacuacgacaacgacaucgagaagaagaucugcaagauggagaagugcagcagcguguucaacguggugaacagcagcaucggccugaucauggugcugagcuuccuguuccugaacuga

SEQ ID NO: 4700 - RNA, 1158 nt, Artificial Sequence
  derived and/or modified CDS sequence (opt4) from Pf(Gha1108-115)__BAM84810.1__CSP
augaugagaaagcuggccauccugagcgugagcagcuuccuguucguggaggcccuguuccaggaguaccagugcuacggcagcagcagcaacaccagagugcugaacgagcugaacuacgacaacgccggcaccaaccuguacaacgagcuggagaugaacuacuacggcaagcaggagaacugguacagccugaagaagaacagcagaagccugggcgagaacgacgacggcaacaacgaggacaacgagaagcugagaaagcccaagcacaagaagcugaagcagcccgccgacggcaaccccgaccccaacgccaaccccaacguggaccccaacgccaaccccaacguggaccccaacgccaaccccaacguggaccccaacgccaaccccaacgccaaccccaacgccaaccccaacgccaaccccaacgccaaccccaacgccaaccccaacgccaaccccaacgccaaccccaacgccaaccccaacgccaaccccaacguggaccccaacgccaaccccaacgccaaccccaacgccaaccccaacgccaaccccaacgccaaccccaacgccaaccccaacgccaaccccaacgccaaccccaacgccaaccccaacgccaaccccaacgccaaccccaacgccaaccccaacgccaaccccaacgccaaccccaacgccaaccccaacgccaaccccaacgccaaccccaacgccaaccccaacgccaaccccaacgccaaccccaacgccaaccccaacgccaaccccaacaagaacaaccagggcaacggccagggccacaacaugcccaacgaccccaacagaaacguggacgagaacgccaacgccaacaacgccgugaagaacaacaacaacgaggagcccagcgaccagcacaucgagaaguaccugcagaagauccagaacagccugagcaccgaguggagccccugcagcgugaccugcggcaacggcauccaggugagaaucaagcccggcagcgccaacaagcccaaggaccagcugaacuacgagaacgacaucgagaagaagaucugcaagauggagaagugcagcagcguguucaacguggugaacagcagcaucggccugaucauggugcugagcuuccuguuccugaacuga

SEQ ID NO: 4701 - RNA, 1158 nt, Artificial Sequence
  derived and/or modified CDS sequence (opt4) from Pf(Gha1108-119)__BAM84811.1__CSP
augaugagaaagcuggccauccugagcgugagcagcuuccuguucguggaggcccuguuccaggaguaccagugcuacggcagcagcagcaacaccagagugcugaacgagcugaacuacgacaacgccggcaccaaccuguacaacgagcuggagaugaacuacuacggcaagcaggagaacugguacagccugaagaagaacagcagaagccugggcgagaacgacgacggcaacaacgaggacaacgagaagcugagaaagcccaagcacaagaagcugaagcagcccggcgacggcaaccccgaccccaacgccaaccccaacguggaccccaacgccaaccccaacguggaccccaacgccaaccccaacguggaccccaacgccaaccccaacgccaaccccaacgccaaccccaacgccaaccccaacgccaaccccaacgccaaccccaacgccaaccccaacgccaaccccaacgccaaccccaacgccaaccccaacgccaaccccaacgccaaccccaacgccaaccccaacguggaccccaacgccaaccccaacgccaaccccaacgccaaccccaacgccaaccccaacgccaaccccaacgccaaccccaacgccaaccccaacgccaaccccaacgccaaccccaacgccaaccccaacgccaaccccaacgccaaccccaacgccaaccccaacgccaaccccaacgccaaccccaacgccaaccccaacgccaaccccaacgccaaccccaacgccaaccccaacaagaacaaccagggcaacggccagggccacaacaugcccaacgaccccaacagaaacguggacgagaacgccaacgccaacaacgccgugaagaacaacaacaacgaggagcccagcgaccagcacaucgagaaguaccugaagaccaucaagaacagccugagcaccgaguggagccccugcagcgugaccugcggcaacggcauccaggugagaaucaagcccggcagcgccaacaagcccaaggaccagcuggacuacgagaacgacaucgagaagaagaucugcaagauggagaagugcagcagcguguucaacguggugaacagcagcaucggccugaucauggugcugagcuuccuguuccugaacuga

SEQ ID NO: 4702 - RNA, 1158 nt, Artificial Sequence
  derived and/or modified CDS sequence (opt4) from Pf(Gha1109-071)__BAM84836.1__CSP
augaugagaaagcuggccauccugagcgugagcagcuuccuguucguggaggcccuguuccaggaguaccagugcuacggcagcagcagcaacaccagagugcugaacgagcugaacuacgacaacgccggcaccaaccuguacaacgagcuggagaugaacuacuacggcaagcaggagaacugguacagccugaagaagaacagcagaagccugggcgagaacgacgacggcaacaacgaggacaacgagaagcugagaaagcccaagcacaagaagcugaagcagcccggcgacggcaaccccgaccccaacgccaaccccaacguggaccccaacgccaaccccaacguggaccccaacgccaaccccaacguggaccccaacgccaaccccaacgccaaccccaacgccaaccccaacgccaaccccaacgccaaccccaacgccaaccccaacgccaaccccaacgccaaccccaacgccaaccccaacgccaaccccaacgccaaccccaacgccaaccccaacgccaaccccaacgccaaccccaacguggaccccaacgccaaccccaacgccaaccccaacgccaaccccaacgccaaccccaacgccaaccccaacgccaaccccaacgccaaccccaacgccaaccccaacgccaaccccaacgccaaccccaacgccaaccccaacgccaaccccaacgccaaccccaacgccaaccccaacgccaaccccaacgccaaccccaacgccaaccccaacgccaaccccaacaagaacaaccagggcaacggccagggccacaacaugcccaacgaccccaacagaaacguggacgagaacgccaacgccaacaacgccgugaagaacaacaacaacgaggagcccagcgaccagcacaucgagaaguacaucaagaagauccagaacagccugagcaccgaguggagccccugcagcgugaccugcggcaacggcauccaggugagaaucaagcccggcagcgccaacaagcccaaggacgagcugaacuacgagaacgacaucgagaagaagaucugcaagauggagaagugcagcagcguguucaacguggugaacagcagcaucggccugaucauggugcugagcuuccuguuccugaacuga

SEQ ID NO: 4703 - RNA, 1158 nt, Artificial Sequence
  derived and/or modified CDS sequence (opt4) from Pf(Gha1109-163)__BAM84827.1__CSP
augaugagaaagcuggccauccugagcgugagcagcuuccuguucguggaggcccuguuccaggaguaccagugcuacggcagcagcagcaacaccagagugcugaacgagcugaacuacgacaacgccggcaccaaccuguacaacgagcuggagaugaacuacuacggcaagcaggagaacugguacagccugaagaagaacagcagaagccugggcgagaacgacgacggcaacaacgaggacaacgagaagcugagaaagcccaagcacaagaagcugaagcagcccgccgacggcaaccccgaccccaacgccaaccccaacguggaccccaacgccaaccccaacguggaccccaacgccaaccccaacguggaccccaacgccaaccccaacgccaaccccaacgccaaccccaacgccaaccccaacgccaaccccaacgccaaccccaacgccaaccccaacgccaaccccaacgccaaccccaacgccaaccccaacgccaaccccaacgccaaccccaacgccaaccccaacgccaaccccaacguggaccccaacgccaaccccaacgccaaccccaacgccaaccccaacgccaaccccaacgccaaccccaacgccaaccccaacgccaaccccaacgccaaccccaacgccaaccccaacgccaaccccaacgccaaccccaacgccaaccccaacgccaaccccaacgccaaccccaacgccaaccccaacgccaaccccaacgccaaccccaacgccaaccccaacaagaacaaccagggcaacggccagggccacaacaugcccaacgaccccaacagaaacguggacgagaacgccaacgccaacaacgccgugaagaacaacaacaacgaggagcccagcgaccagcacaucgagaaguaccugaagaccauccagaacagccugagcaccgaguggagccccugcagcgugaccugcggcaacggcauccaggugagaaucaagcccggcagcgccaacaagcccaaggaccagcuggacuacgccaacgacaucgagaagaagaucugcaagauggagaagugcagcagcguguucaacguggugaacagcagcaucggccugaucauggugcugagcuuccuguuccugaacuga

SEQ ID NO: 4704 - RNA, 1158 nt, Artificial Sequence
  derived and/or modified CDS sequence (opt4) from Pf(Tz93-007)__BAM84748.1__CSP
augaugagaaagcuggccauccugagcgugagcagcuuccuguucguggaggcccuguuccaggaguaccagugcuacggcagcagcagcaacaccagagugcugaacgagcugaacuacgacaacgccggcaccaaccuguacaacgagcuggagaugaacuacuacggcaagcaggagaacugguacagccugaagaagaacagcagaagccugggcgagaacgacgacggcaacaacgaggacaacgagaagcugagaaagcccaagcacaagaagcugaagcagcccgccgacggcaaccccgaccccaacgccaaccccaacguggaccccaacgccaaccccaacguggaccccaacgccaaccccaacguggaccccaacgccaaccccaacgccaaccccaacgccaaccccaacgccaaccccaacgccaaccccaacgccaaccccaacgccaaccccaacgccaaccccaacgccaaccccaacgccaaccccaacgccaaccccaacgccaaccccaacgccaaccccaacguggaccccaacgccaaccccaacgccaaccccaacgccaaccccaacgccaaccccaacgccaaccccaacgccaaccccaacgccaaccccaacgccaaccccaacgccaaccccaacgccaaccccaacgccaaccccaacgccaaccccaacgccaaccccaacgccaaccccaacgccaaccccaacgccaaccccaacgccaaccccaacgccaaccccaacgccaaccccaacaagaacaaccagggcaacggccagggccacaacaugcccaacgaccccaacagaaacguggacgagaacgccaacgccaacaacgccgugaagaacaacaacaacgaggagcccagcgacaagcacaucgagcaguaccugaagaccaucaagaacagccugagcaccgaguggagccccugcagcgugaccugcggcaacggcauccaggugagaaucaagcccggcagcgccaacaagcccaaggacgagcuggacuacgccaacgacaucgagaagaagaucugcaagauggagaagugcagcagcguguucaacguggugaacagcagcaucggccugaucauggugcugagcuuccuguuccugaacuga

SEQ ID NO: 4705 - RNA, 1158 nt, Artificial Sequence
  derived and/or modified CDS sequence (opt4) from Pf(Tz93-008)__BAM84749.1__CSP
augaugagaaagcuggccauccugagcgugagcagcuuccuguucguggaggcccuguuccaggaguaccagugcuacggcagcagcagcaacaccagagugcugaacgagcugaacuacgacaacgccggcaccaaccuguacaacgagcuggagaugaacuacuacggcaagcaggagaacugguacagccugaagaagaacagcagaagccugggcgagaacgacgacggcaacaacgaggacaacgagaagcugagaaagcccaagcacaagaagcugaagcagcccgccgacggcaaccccgaccccaacgccaaccccaacguggaccccaacgccaaccccaacguggaccccaacgccaaccccaacguggaccccaacgccaaccccaacgccaaccccaacgccaaccccaacgccaaccccaacgccaaccccaacgccaaccccaacgccaaccccaacgccaaccccaacgccaaccccaacgccaaccccaacgccaaccccaacgccaaccccaacgccaaccccaacguggaccccaacgccaaccccaacgccaaccccaacgccaaccccaacgccaaccccaacgccaaccccaacgccaaccccaacgccaaccccaacgccaaccccaacgccaaccccaacgccaaccccaacgccaaccccaacgccaaccccaacgccaaccccaacgccaaccccaacgccaaccccaacgccaaccccaacgccaaccccaacgccaaccccaacgccaaccccaacaagaacaaccagggcaacggccagggccacaacaugcccaacgaccccaacagaaacguggacgagaacgccaacgccaacaacgccgugaagaacaacaacaacgaggagcccagcgacaagcacaucaccgaguaccugaagaagauccagaacagccugagcaccgaguggagccccugcagcgugaccugcggcaacggcauccaggugagaaucaagcccggcagcgccggcaagagcaagaacgagcuggacuacgagaacgacaucgagaagaagaucugcaagauggagaagugcagcagcguguucaacguggugaacagcagcaucggccugaucauggugcugagcuuccuguuccugaacuga

SEQ ID NO: 4706 - RNA, 1158 nt, Artificial Sequence
  derived and/or modified CDS sequence (opt4) from Pf(Tz93-013)__BAM84751.1__CSP
augaugagaaagcuggccauccugagcgugagcagcuuccuguucguggaggcccuguuccaggaguaccagugcuacggcagcagcagcaacaccagagugcugaacgagcugaacuacgacaacgccggcaccaaccuguacaacgagcuggagaugaacuacuacggcaagcaggagaacugguacagccugaagaagaacagcagaagccugggcgagaacgacgacggcaacaacgaggacaacgagaagcugagaaagcccaagcacaagaagcugaagcagcccgccgacggcaaccccgaccccaacgccaaccccaacguggaccccaacgccaaccccaacguggaccccaacgccaaccccaacguggaccccaacgccaaccccaacgccaaccccaacgccaaccccaacgccaaccccaacgccaaccccaacgccaaccccaacgccaaccccaacgccaaccccaacgccaaccccaacgccaaccccaacgccaaccccaacgccaaccccaacgccaaccccaacguggaccccaacgccaaccccaacgccaaccccaacgccaaccccaacgccaaccccaacgccaaccccaacgccaaccccaacgccaaccccaacgccaaccccaacgccaaccccaacgccaaccccaacgccaaccccaacgccaaccccaacgccaaccccaacgccaaccccaacgccaaccccaacgccaaccccaacgccaaccccaacgccaaccccaacgccaaccccaacaagaacaaccagggcaacggccagggccacaacaugcccaacgaccccaacagaaacgugaacgagaacgccaacgccaacaacgccgugaagaacaacaacaacgaggagcccagcgacaagcacaucaccgaguaccugaagaagauccagaacagccugagcaccgaguggagccccugcagcgugaccugcggcaacggcauccaggugagaaucaagcccggcagcgccggcaagagcagagacgagcuggacuacgagaacgacaucgagaagaagaucugcaagauggagaagugcagcagcguguucaacguggugaacagcagcaucggccugaucauggugcugagcuuccuguuccugaacuga

SEQ ID NO: 4707 - RNA, 1158 nt, Artificial Sequence
  derived and/or modified CDS sequence (opt4) from Pf(Tz93-048)__BAM84761.1__CSP
augaugagaaagcuggccauccugagcgugagcagcuuccuguucguggaggcccuguuccaggaguaccagugcuacggcagcagcagcaacaccagagugcugaacgagcugaacuacgacaacgccggcaccaaccuguacaacgagcuggagaugaacuacuacggcaagcaggagaacugguacagccugaagaagaacagcagaagccugggcgagaacgacgacggcaacaacgaggacaacgagaagcugagaaagcccaagcacaagaagcugaagcagcccgccgacggcaaccccgaccccaacgccaaccccaacguggaccccaacgccaaccccaacguggaccccaacgccaaccccaacguggaccccaacgccaaccccaacgccaaccccaacgccaaccccaacgccaaccccaacgccaaccccaacgccaaccccaacgccaaccccaacgccaaccccaacgccaaccccaacgccaaccccaacgccaaccccaacgccaaccccaacgccaaccccaacgccaaccccaacguggaccccaacgccaaccccaacgccaaccccaacgccaaccccaacgccaaccccaacgccaaccccaacgccaaccccaacgccaaccccaacgccaaccccaacgccaaccccaacgccaaccccaacgccaaccccaacgccaaccccaacgccaaccccaacgccaaccccaacgccaaccccaacgccaaccccaacgccaaccccaacgccaaccccaacaagaacaaccagggcaacggccagggccacaacaugcccaacgaccccaacagaaacguggacgagaacgccaacgccaacaacgccgugaagaacaacaacaacgaggagcccagcgaccagcacaucgagaaguaccugaagaucaucaagaacagccugagcaccgaguggagccccugcagcgugaccugcggcaacggcauccaggugagaaucaagcccggcagcgccaacaagcccaaggaccagcuggacuacgccaacgacaucgagaagaagaucugcaagauggagaagugcagcagcguguucaacguggugaacagcagcaucggccugaucauggugcugagcuuccuguuccugaacuga

SEQ ID NO: 4708 - RNA, 1158 nt, Artificial Sequence
  derived and/or modified CDS sequence (opt4) from Pf(Tz93-120)__BAM84776.1__CSP
augaugagaaagcuggccauccugagcgugagcagcuuccuguucguggaggcccuguuccaggaguaccagugcuacggcagcagcagcaacaccagagugcugaacgagcugaacuacgacaacgccggcaccaaccuguacaacgagcuggagaugaacuacuacggcaagcaggagaacugguacagccugaagaagaacagcagaagccugggcgagaacgacgacggcaacaacgaggacaacgagaagcugagaaagcccaagcacaagaagcugaagcagcccgccgacggcaaccccgaccccaacgccaaccccaacguggaccccaacgccaaccccaacguggaccccaacgccaaccccaacguggaccccaacgccaaccccaacgccaaccccaacgccaaccccaacgccaaccccaacgccaaccccaacgccaaccccaacgccaaccccaacgccaaccccaacgccaaccccaacgccaaccccaacgccaaccccaacgccaaccccaacgccaaccccaacguggaccccaacgccaaccccaacgccaaccccaacgccaaccccaacgccaaccccaacgccaaccccaacgccaaccccaacgccaaccccaacgccaaccccaacgccaaccccaacgccaaccccaacgccaaccccaacgccaaccccaacgccaaccccaacgccaaccccaacgccaaccccaacgccaaccccaacgccaaccccaacgccaaccccaacgccaaccccaacaagaacaaccagggcaacggccagggccacaacaugcccaacgaccccaacagaaacguggacgagaacgccaacgccaacaacgccgugaagaacaacaacaacgaggagcccagcgaccagcacaucgagaaguaccugaagaucauccagaacagccugagcaccgaguggagccccugcagcgugaccugcggcaacggcauccaggugagaaucaagcccggcagcgccaacaagcccaaggaccagcuggacuacgccaacgacaucgagaagaagaucugcaagauggagaagugcagcagcguguucaacguggugaacagcagcaucggccugaucauggugcugagcuuccuguuccugaacuga

SEQ ID NO: 4709 - RNA, 1158 nt, Artificial Sequence
  derived and/or modified CDS sequence (opt4) from Pf(Tz98-101)__BAM84794.1__CSP
augaugagaaagcuggccauccugagcgugagcagcuuccuguucguggaggcccuguuccaggaguaccagugcuacggcagcagcagcaacaccagagugcugaacgagcugaacuacgacaacgccggcaccaaccuguacaacgagcuggagaugaacuacuacggcaagcaggagaacugguacagccugaagaagaacagcagaagccugggcgagaacgacgacggcaacaacgaggacaacgagaagcugagaaagcccaagcacaagaagcugaagcagcccgccgacggcaaccccgaccccaacgccaaccccaacguggaccccaacgccaaccccaacguggaccccaacgccaaccccaacguggaccccaacgccaaccccaacgccaaccccaacgccaaccccaacgccaaccccaacgccaaccccaacgccaaccccaacgccaaccccaacgccaaccccaacgccaaccccaacgccaaccccaacgccaaccccaacgccaaccccaacgccaaccccaacgccaaccccaacguggaccccaacgccaaccccaacgccaaccccaacgccaaccccaacgccaaccccaacgccaaccccaacgccaaccccaacgccaaccccaacgccaaccccaacgccaaccccaacgccaaccccaacgccaaccccaacgccaaccccaacgccaaccccaacgccaaccccaacgccaaccccaacgccaaccccaacgccaaccccaacgccaaccccaacaagaacaaccagggcaacggccagggccacaacaugcccaacgaccccaacagaaacguggacgagaacgccaacgccaacaacgccgugaagaacaacaacaacgaggagcccagcgacaagcacaucaccgaguaccugaagagaauccagaacagccugagcaccgaguggagccccugcagcgugaccugcggcaacggcauccaggugagaaucaagcccggcagcgccggcaagagcaagaacgagcuggacuacgagaacgacaucgagaagaagaucugcaagauggagaagugcagcagcguguucaacguggugaacagcagcaucggccugaucauggugcugagcuuccuguuccugaacuga

SEQ ID NO: 4710 - RNA, 1158 nt, Artificial Sequence
  derived and/or modified CDS sequence (opt4) from Pf(Yaounde)__AAN87580.1__CSP
augaugagaaagcuggccauccugagcgugagcagcuuccuguucguggaggcccuguuccaggaguaccagugcuacggcagcagcagcaacaccagagugcugaacgagcugaacuacgacaacgccggcaccaaccuguacaacgagcuggagaugaacuacuacggcaagcaggagaacugguacagccugaagaagaacagcagaagccugggcgagaacgacgacggcaacaacgaggacaacgagaagcugagaaagcccaagcacaagaagcugaagcagcccgccgacggcaaccccgaccccaacgccaaccccaacguggaccccaacgccaaccccaacguggaccccaacgccaaccccaacguggaccccaacgccaaccccaacgccaaccccaacgccaaccccaacgccaaccccaacgccaaccccaacgccaaccccaacgccaaccccaacgccaaccccaacgccaaccccaacgccaaccccaacgccaaccccaacgccaaccccaacgccaaccccaacguggaccccaacgccaaccccaacgccaaccccaacgccaaccccaacgccaaccccaacgccaaccccaacgccaaccccaacgccaaccccaacgccaaccccaacgccaaccccaacgccaaccccaacgccaaccccaacgccaaccccaacgccaaccccaacgccaaccccaacgccaaccccaacgccaaccccaacgccaaccccaacgccaaccccaacgccaaccccaacaagaacaaccagggcaacggccagggccacaacaugcccaacgaccccaacagaaacguggacgagaacgccaaggccaacaacgccgugaagaacaacaacaacgaggagcccagcgacaagcacaucgagcaguaccugaagaccauccagaacagccugagcaccgaguggagccccugcagcgugaccugcggcaacggcauccaggugagaaucaagcccggcagcgccaacaagcccaaggaccagcuggacuacgagaacgacaucgagaagaagaucugcaagauggagaagugcagcagcguguucaacguggugaacagcagcaucggccugaucauggugcugagcuuccuguuccugaacuga

SEQ ID NO: 4711 - RNA, 1143 nt, Artificial Sequence
  derived and/or modified CDS sequence (opt4) from Pf(Asembo Bay)__AAN87610.1__CSP
augaugagaaagcuggccauccugagcgugagcagcuuccuguucguggaggcccuguuccaggaguaccagugcuacggcagcagcagcaacaccagagugcugaacgagcugaacuacgacaacgccggcaccaaccuguacaacgagcuggagaugaacuacuacggcaagcaggagaacugguacagccugaagaagaacagcagaagccugggcgagaacgacgacggcaacaacaacaacggcgacaacggcagagagggcaaggacgaggacaagagagacggcaacaacgaggacaacgagaagcugagaaagcccaagcacaagaagcugaagcagcccggcgacggcaaccccgaccccaacgccaaccccaacguggaccccaacgccaaccccaacguggaccccaacgccaaccccaacguggaccccaacgccaaccccaacgccaaccccaacgccaaccccaacgccaaccccaacgccaaccccaacgccaaccccaacgccaaccccaacgccaaccccaacgccaaccccaacgccaaccccaacgccaaccccaacgccaaccccaacgccaaccccaacgccaaccccaacgccaaccccaacgccaaccccaacgccaaccccaacgccaaccccaacgccaaccccaacgccaaccccaacgccaaccccaacgccaaccccaacgccaaccccaacgccaaccccaacgccaaccccaacgccaaccccaacgccaaccccaacaagaacaaccagggcaacggccagggccacaacaugcccaacgaccccaacagaaacguggacgagaacgccaacgccaacaacgccgugaagaacaacaacaacgaggagcccagcgacaagcacaucgagcaguaccugaacaagaucaagaacagcaucagcaccgaguggagccccugcagcgugaccugcggcaacggcauccaggugagaaucaagcccggcagcgccaacaagcccaaggaccagcuggacuacgccaacgacaucgagaagaagaucugcaagauggagaagugcagcagcguguucaacguggugaacagcagcaucggccugaucauggugcugagcuuccuguuccugaacuga

SEQ ID NO: 4712 - RNA, 1143 nt, Artificial Sequence
  derived and/or modified CDS sequence (opt4) from Pf(India)__AAN87619.1__CSP
augaugagaaagcuggccauccugagcgugagcagcuuccuguucguggaggcccuguuccaggaguaccagugcuacggcagcagcagcaacaccagagugcugaacgagcugaacuacgacaacgccggcaccaaccuguacaacgagcuggagaugaacuacuacggcaagcaggagaacugguacagccugaagaagaacagcagaagccugggcgagaacgacgacggcaacaacaacaacggcgacaacggcagagagggcaaggacgaggacaagagagacggcaacaacgaggacaacgagaagcugagaaagcccaagcacaagaagcugaagcagcccggcggcgacaaccccgaccccaacgccaaccccaacgccaaccccaacgccaaccccaacgccaaccccaacgccaaccccaacgccaaccccaacguggaccccaacgccaaccccaacgccaaccccaacgccaaccccaacgccaaccccaacgccaaccccaacgccaaccccaacgccaaccccaacgccaaccccaacgccaaccccaacgccaaccccaacgccaaccccaacgccaaccccaacgccaaccccaacgccaaccccaacgccaaccccaacgccaaccccaacgccaaccccaacgccaaccccaacgccaaccccaacgccaaccccaacgccaaccccaacgccaaccccaacgccaaccccaacgccaaccccaacgccaaccccaacgccaaccccaacaagaacaaccagggcaacggccagggccacaacaugcccaacgaccccaacagaaacguggacgagaacgccaacgccaacaacgccgugaagaacaacaacaacgaggagcccagcgacaagcacaucgagcaguaccugaagaagauccagaacagccugagcaccgaguggagccccugcagcgugaccugcggcaacggcauccaggugagaaucaagcccggcagcgccaacaagcccaaggacgagcuggacuacgagaacgacaucgagaagaagaucugcaagauggagaagugcagcagcguguucaacguggugaacagcagcaucggccugaucauggugcugagcuuccuguuccugaacuga

SEQ ID NO: 4713 - RNA, 1107 nt, Artificial Sequence
  derived and/or modified CDS sequence (opt4) from Pf(India)__AAN87617.1__CSP
augaugagaaagcuggccauccugagcgugagcagcuuccuguucguggaggcccuguuccaggaguaccagugcuacggcagcagcagcaacaccagagugcugaacgagcugaacuacgacaacgccggcaccaaccuguacaacgagcuggagaugaacuacuacggcaagcaggagaacugguacagccugaagaagaacagcagaagccugggcgagaacgacgacggcaacaacaacaacggcgacaacggcagagagggcaaggacgaggacaagagagacggcaacaacgaggacaacgagaagcugagaaagcccaagcacaagaagcugaagcagcccggcggcgacaaccccgaccccaacgccaaccccaacguggaccccaacgccaaccccaacgccaaccccaacgccaaccccaacgccaaccccaacgccaaccccaacgccaaccccaacgccaaccccaacgccaaccccaacgccaaccccaacgccaaccccaacgccaaccccaacgccaaccccaacgccaaccccaacgccaaccccaacgccaaccccaacgccaaccccaacgccaaccccaacgccaaccccaacgccaaccccaacgccaaccccaacgccaaccccaacgccaaccccaacgccaaccccaacgccaaccccaacgccaaccccaacgccaaccccaacgccaaccccaacgccaaccccaacaagaacaaccagggcaacggccagggccacaacaugcccaacgaccccaacagaaacguggacgagaacgccaacgccaacaacgccgugaagaacaacaacaacgaggagcccagcgacaagcacaucgagcaguaccugaagaagauccagaacagccugagcaccgaguggagccccugcagcgugaccugcggcaacggcauccaggugagaaucaagcccggcagcgccaacaagcccaaggacgagcuggacuacgagaacgacaucgagaagaagaucugcaagauggagaagugcagcagcguguucaacguggugaacagcagcaucggccugaucauggugcugagcuuccuguuccugaacuga

SEQ ID NO: 4714 - RNA, 1095 nt, Artificial Sequence
  derived and/or modified CDS sequence (opt4) from Pf(India)__AAN87616.1__CSP
augaugagaaagcuggccauccugagcgugagcagcuuccuguucguggaggcccuguuccaggaguaccagugcuacggcagcagcagcaacaccagagugcugaacgagcugaacuacgacaacgccggcaccaaccuguacaacgagcuggagaugaacuacuacggcaagcaggagaacugguacagccugaagaagaacagcagaagccugggcgagaacgacgacggcaacaacaacaacggcgacaacggcagagagggcaaggacgaggacaagagagacggcaacaacgaggacaacgagaagcugagaaagcccaagcacaagaagcugaagcagcccggcggcgacaaccccgaccccaacgccaaccccaacguggaccccaacgccaaccccaacgccaaccccaacgccaaccccaacgccaaccccaacgccaaccccaacgccaaccccaacgccaaccccaacgccaaccccaacgccaaccccaacgccaaccccaacgccaaccccaacgccaaccccaacgccaaccccaacgccaaccccaacgccaaccccaacgccaaccccaacgccaaccccaacgccaaccccaacgccaaccccaacgccaaccccaacgccaaccccaacgccaaccccaacgccaaccccaacgccaaccccaacgccaaccccaacgccaaccccaacgccaaccccaacaagaacaaccagggcaacggccagggccacaacaugcccaacgaccccaacagaaacguggacgagaacgccaacgccaacaacgccgugaagaacaacaacaacgaggagcccagcgacaagcacaucgagcaguaccugaagaagauccagaacagccugagcaccgaguggagccccugcagcgugaccugcggcaacggcauccaggugagaaucaagcccggcagcgccaacaagcccaaggacgagcuggacuacgagaacgacaucgagaagaagaucugcaagauggagaagugcagcagcguguucaacguggugaacagcagcaucggccugaucauggugcugagcuuccuguuccugaacuga

SEQ ID NO: 4715 - RNA, 1092 nt, Artificial Sequence
  derived and/or modified CDS sequence (opt4) from Pf(Bolivar)__AAN87600.1__CSP
augaugagaaagcuggccauccugagcgugagcagcuuccuguucguggaggcccuguuccaggaguaccagugcuacggcagcagcagcaacaccagagugcugaacgagcugaacuacgacaacgccggcaccaaccuguacaacgagcuggagaugaacuacuacggcaagcaggagaacugguacagccugaagaagaacagcagaagccugggcgagaacgacgacggcaacaacaacaacggcgacaacggcagagagggcaaggacgaggacaagagagacggcaacaacgaggacaacgagaagcugagaaagcccaagcacaagaagcugaagcagcccgccgacggcaaccccgaccccaacgccaaccccaacguggaccccaacgccaaccccaaccccaacgccaacccccccaacgccaaccccaacgccaaccccaacgccaaccccaacgccaaccccaacguggaccccaacgccaaccccaacgccaaccccaacgccaaccccaacgccaaccccaacgccaaccccaacgccaaccccaacgccaaccccaacgccaaccccaacgccaaccccaacgccaaccccaacgccaaccccaacgccaaccccaacgccaaccccaacgccaaccccaacgccaaccccaacgccaaccccaacgccaaccccaacgccaaccccaacgccaaccccaacaagaacaaccagggcaacggccagggccacaacaugcccaacgaccccaacagaaacguggacgagaacgccaacgccaacaacgccgugaagaacaacaacaacgaggagcccagcgacaagcacaucgagcaguaccugaacaagauccagaacagccugagcaccgaguggagccccugcagcgugaccugcggcaacggcauccaggugagaaucaagcccggcagcgccaacaagcccaaggaccagcuggacuacgccaacgacaucgagaagaagaucugcaagauggagaagugcagcagcguguucaacguggugaacagcagcaucggccugaucauggugcugagcuuccuguuccugaacuga

SEQ ID NO: 4716 - RNA, 1083 nt, Artificial Sequence
  derived and/or modified CDS sequence (opt4) from Pf(Asembo Bay)__AAN87597.1__CSP
augaugagaaagcuggccauccugagcgugagcagcuuccuguucguggaggcccuguuccaggaguaccagugcuacggcagcagcagcaacaccagagugcugaacgagcugaacuacgacaacgccggcaccaaccuguacaacgagcuggagaugaacuacuacggcaagcaggagaacugguacagccugaagaagaacagcagaagccugggcgagaacgacgacggcaacaacaacaacggcgacaacggcagagagggcaaggacgaggacaagagagacggcaacaacgaggacaacgagaagcugagaaagcccaagcacaagaagcugaagcagcccgccgacggcaaccccgaccccaacgccaaccccaacguggaccccaacgccaaccccaacgccaaccccaacgccaaccccaacgccaaccccaacgccaaccccaacgccaaccccaacguggaccccaacgccaaccccaacgccaaccccaacgccaaccccaacgccaaccccaacgccaaccccaacgccaaccccaacgccaaccccaacgccaaccccaacgccaaccccaacgccaaccccaacgccaaccccaacgccaaccccaacgccaaccccaacgccaaccccaacgccaaccccaacgccaaccccaacgccaaccccaacgccaaccccaacgccaaccccaacaagaacaaccagggcaacggccagggccacaacaugcccaacgaccccaacagaaacguggacgagaacgccaacgccaacaacgccgugaagaacaacaacaacgaggagcccagcgacaagcacaucaaggaguaccugaagaucauccccaacagccugagcaccgaguggagccccugcagcgugaccugcggcaacggcauccaggugagaaucaagcccggcagcgccggcaagcccaaggacgagcuggacuacgccaacgacaucgagaagaagaucugcaagauggagaagugcagcagcguguucaacguggugaacagcagcaucggccugaucauggugcugagcuuccuguuccugaacuga

SEQ ID NO: 4717 - RNA, 1083 nt, Artificial Sequence
  derived and/or modified CDS sequence (opt4) from Pf(Asembo Bay)__AAN87596.1__CSP
augaugagaaagcuggccauccugagcgugagcagcuuccuguucguggaggcccuguuccaggaguaccagugcuacggcagcagcagcaacaccagagugcugaacgagcugaacuacgacaacgccggcaccaaccuguacaacgagcuggagaugaacuacuacggcaagcaggagaacugguacagccugaagaagaacagcagaagccugggcgagaacgacgacggcaacaacaacaacggcgacaacggcagagagggcaaggacgaggacaagagagacggcaacaacgaggacaacgagaagcugagaaagcccaagcacaagaagcugaagcagcccgccgacggcaaccccgaccccaacgccaaccccaacguggaccccaacgccaaccccaacgccaaccccaacgccaaccccaacgccaaccccaacgccaaccccaacgccaaccccaacguggaccccaacgccaaccccaacgccaaccccaacgccaaccccaacgccaaccccaacgccaaccccaacgccaaccccaacgccaaccccaacgccaaccccaacgccaaccccaacgccaaccccaacgccaaccccaacgccaaccccaacgccaaccccaacgccaaccccaacgccaaccccaacgccaaccccaacgccaaccccaacgccaaccccaacgccaaccccaacaagaacaaccagggcaacggccagggccacaacaugcccaacgaccccaacagaaacguggacgagaacgccaacgccaacaacgccgugaagaacaacaacaacgaggagcccagcgacaagcacaucaaggaguaccugaagaucauccagaacagccugagcaccgaguggagccccugcagcgugaccugcggcaacggcauccaggugagaaucaagcccggcagcgccggcaagcccaaggacgagcuggacuacgccaacgacaucgagaagaagaucugcaagauggagaagugcagcagcguguucaacguggugaacagcagcaucggccugaucauggugcugagcuuccuguuccugaacuga

SEQ ID NO: 4718 - RNA, 1071 nt, Artificial Sequence
  derived and/or modified CDS sequence (opt4) from Pf(India)__AAN87615.1__CSP
augaugagaaagcuggccauccugagcgugagcagcuuccuguucguggaggcccuguuccaggaguaccagugcuacggcagcagcagcaacaccagagugcugaacgagcugaacuacgacaacgccggcaccaaccuguacaacgagcuggagaugaacuacuacggcaagcaggagaacugguacagccugaagaagaacagcagaagccugggcgagaacgacgacggcaacaacaacaacggcgacaacggcagagagggcaaggacgaggacaagagagacggcaacaacgaggacaacgagaagcugagaaagcccaagcacaagaagcugaagcagcccggcgacggcaaccccgaccccaacgccaaccccaacguggaccccaacgccaaccccaacgccaaccccaacgccaaccccaacgccaaccccaacgccaaccccaacgccaaccccaacgccaaccccaacgccaaccccaacgccaaccccaacgccaaccccaacgccaaccccaacgccaaccccaacgugaaccccaacgccaaccccaacgccaaccccaacgccaaccccaacgccaaccccaacgccaaccccaacgccaaccccaacgccaaccccaacgccaaccccaacgccaaccccaacgccaaccccaacgccaaccccaacgccaaccccaacaagaacaaccagggcaacggccagggccacaacaugcccaacgaccccaacagaaacguggacgagaacgccaacgugaacaacgccgugaagaacaacaacaacgaggagcccagcgacaagcacaucgagcaguaccugaagaagauccagaacagccugagcaccgaguggagccccugcagcgugaccugcggcaacggcauccaggugagaaucaagcccggcagcgccaacaagcccaaggacgagcuggacuacgagaacgacaucgagaagaagaucugcaagauggagaagugcagcagcguguucaacguggugaacagcagcaucggccugaucauggugcugagcuuccuguuccugaacuga

SEQ ID NO: 4719 - RNA, 1110 nt, Artificial Sequence
  derived and/or modified CDS sequence (opt4) from Pk(UMMAC6)__AHF20622.1__CSP
augaagaacuucauccugcuggccgugagcagcauccugcugguggaccugcugcccacccacuucgagcacaacguggaccugagcagagccaucaacgugaacggcgugagcuucaacaacguggacaccagcagccugggcgccgcccaggugagacagagcgccagcagaggcagaggccugggcgagaagcccaaggagggcgccgacaaggagaagaagaaggagaaggagaaggagaaggaggaggagcccaagaagcccaacgagaacaagcugauccagcccgagcagcccgccgccggcgccggcggcgagcagcccgccgccggcgccggcggcgagcagcccgccgccggcgccggcggcgagcagcccgccgccggcgccggcggcgagcagcccgccgccggcgccggcggcgagcagcccgccgccggcgccagaggcgagcagcccgccgccggcgccggcggcgagcagcccgccgccggcgccggcggcgagcagcccgccgccggcgccggcggcgagcagcccgccgccggcgccggcggcgagcagcccgccgccggcgccggcggcgagcagcccgccgccggcgccagaggcgagcagcccgccgccggcgccggcggcgagcagcccgccgccggcgccggcggcgagcagcccgcccccgcccccagaagagagcagcccgccgccggcgccggcggcgagcagcccgcccccgcccccagaagagagcagcccgcccccggcgccggcgccggcgacggcgccagaggcggcaacgccggcgccggcaagggccagggccagaacaaccagggcgccaacgugcccaacgagaagguggugaacgacuaccugcacaagaucagaagcagcgugaccaccgaguggacccccugcagcgugaccugcggcaacggcgugagaaucagaagaaagggccacgccggcaacaagaaggccgaggaccugaccauggacgaccuggagguggaggccugcgugauggacaagugcgccggcaucuucaacguggugagcaacagccugggccuggugauccugcuggugcuggcccuguucaacuga

SEQ ID NO: 4720 - RNA, 1092 nt, Artificial Sequence
  derived and/or modified CDS sequence (opt4) from Pk(H (SL1_PK))__XP_002259002.1__CSP
augaagaacuucauccugcuggccgugagcagcauccugcugguggaccugcugcccacccacuucgagcacaacguggaccugagcagagccaucaacgugaacggcgugagcuucaacaacguggacaccagcagccugggcgccgcccaggugagacagagcgccagcagaggcagaggccugggcgagaagcccaaggagggcgccgacaaggagaagaagaaggagaagggcaaggagaaggaggaggagcccaagaagcccaacgagaacaagcugaagcagcccaacgagggccagccccaggcccagggcgacggcgccaacgccggccagccccaggcccagggcgacggcgccaacgccggccagccccaggcccagggcgacggcgccaacgccggccagccccaggcccagggcgacggcgccaacgccggccagccccaggcccagggcgacggcgccaacgccggccagccccaggcccagggcgacggcgccaacgccggccagccccaggcccagggcgacggcgccaacgccggccagccccaggcccagggcgacggcgccaacgccggccagccccaggcccagggcgacggcgccaacgccggccagccccaggcccagggcgacggcgccaacgccggccagccccaggcccagggcgacagagccaacgccggccagccccaggcccagggcgacggcgccaacgugcccagacagggcagaaacggcggcggcgcccccgccggcggcaacgagggcaacaagcaggccggcaagggccagggccagaacaaccagggcgccaacgcccccaacgagaagguggugaacgacuaccugcacaagaucagaagcagcgugaccaccgaguggacccccugcagcgugaccugcggcaacggcgugagaaucagaagaaaggcccacgccggcaacaagaaggccgaggaccugaccauggacgaccuggagguggaggccugcgugauggacaagugcgccggcaucuucaacguggugagcaacagccugggccuggugauccugcuggugcuggcccuguucaacuga

SEQ ID NO: 4721 - RNA, 1443 nt, Artificial Sequence
  derived and/or modified CDS sequence (opt4) from Pk(SGEHIH2-im-Y09-12)__AFD97213.1__CSP
augaagaacuucauccugcuggccgugagcagcauccugcugguggaccugcugcccacccacuucgagcacaacguggaccugagcagagccaucaacgugaacggcgugagcuucaacaacguggacaccagcagccugggcgccgcccaggugagacagagcgccagcagaggcagaggccugggcgagaagcccaaggagggcgacgacaaggagaagaagaaggagaaggagaaggaggaggagcccaagaagcugaacgagaacaaccccaagaagcccaacgaggagggcgacggcgccaagcugaagcagcccaacgaggagggcgacggcgccaagcugaagcagcccaacgccgagggcggcgccaagcugaagcagcccaacgccgagggcggcgccaacgccggccagcccaacgccgagggcggcgccaacgccggccagcccaacgccgagggcggcgccaacgccggccagcccaacgccggcggcgccaacgccggccagcccaacgccgagggcggcgccaacgccggccagcccaacgccgagggcggcgccaacgccggccagcccaacgccgagggcggcgccaacgccagacagcccaacgccgagggcggcgccaacgccagacagcccaacgccgagggcggcgccaacgccggccagcccaacgccgagggcggcgccaacgccggccagcccaacgccgagggcggcgccaacgccggccagcccaacgccgagggcggcgccaacgccagacagcccaacgccgagggcggcgccaacgccggccagcccaacgccgagggcggcgccaacgccggccagcccaacgccgagggcggcgccaacgccggccagcccaacgccgagggcggcgccaacgccggccagcccaacgccgagggcggcgccaacgccagacagcccaacgccgagggcggcgccaacgccggccagcccaacgccgagggcggcgccaacgccggccagcccaacgccgagggcggcgccaacgccagacagccccaggccgagggcggcggcgccaacgccagacagccccaggccgagggcggcggcgccaacgccagacagggcggcaacgagggcaacaagcaggccggcaagggccagggccagaacaaccagggcgccaacgcccccaacgagaagguggugaacgacuaccugcagaagaucagaagcagcgugaccaucgaguggacccccugcagcgugaccugcggcaacggcgugagaaucagaagaagagcccacgccgacaagaagaaggccgaggaccugaccauggacgaccuggagguggaggccugcgugauggacaagugcgccggcaucuucaacguggugagcaacagccugggccuggugauccugcuggugcuggcccuguucaacuga

SEQ ID NO: 4722 - RNA, 1320 nt, Artificial Sequence
  derived and/or modified CDS sequence (opt4) from Pk(NB028)__AFG25469.1__CSP
augaagaacuucauccugcuggccgugagcagcauccugcugguggaccugcugcccacccacuucgagcacaacguggaccugagcagagccaucaacgugaacggcgugagcuucaacaacguggacaccagcagccugggcgccgcccaggugagacagagcgccagcagaggcagaggccugggcgagaagcccaaggagggcgacgacaaggagaagaagaaggagaaggagaaggaggaggagcccaagaaccugaacgagaacaagcccaagcagcccaacgccgagggcgacggcgccaagcugaagcagcccaacgccgagggcgacggcgccaagcugaagcagccccaggccgagggcgacggcgccaacgccagacagccccaggccgagggcaacggcgccaacgccagacagccccaggccgagggcgacggcgccaacgccagacagccccaggccgagggcgacggcgccaacgccagacagccccaggccgagggcgacggcgccaacgccagacagccccaggccgagggcgacggcgccaacgccagacagccccaggccgagggcgacggcgccaacgccagacagccccaggccgagggcgacggcgccaacgccagacagccccaggccgagggcggcggcgccaacgccagacagccccaggccgagggcgacggcgccaacgccagacagccccaggccgagggcgacggcgccaacgccagacagccccaggccgagggcgacggcgccaacgccagacagccccaggccgagggcgacggcgccaacgccagacagccccaggccgagggcgacggcgccaacgccagacagccccaggccgagggcggcggcgccaacgccagacagccccaggccgagggcgacggcgccaacgccagacaggcccaggcccagggcgacggcggcaacgccagacagggcggcaacggcggcggcgcccccgccggcggcaacgagggcaacaagcaggccggcaagggccagggccagaacaaccagggcgccaacgcccccaacgagaagguggugaacgacuaccugcagaagaucagaagcagcgugaccaccgaguggacccccugcagcgugaccugcggcaacggcgugagaaucagaagaagagcccacgccgacaagaagaaggccgaggagcugaccauggacgaccuggagguggaggccugcgugauggacaagugcgccggcaucuucaacguggugagcaacagccugggccuggugauccugcuggugcuggcccuguucaacuga

SEQ ID NO: 4723 - RNA, 1278 nt, Artificial Sequence
  derived and/or modified CDS sequence (opt4) from Pk(SGEHIH1-im-Y09-102)__AFD97209.1__CSP
augaagaacuucauccugcuggccgugagcagcauccugcugguggaccugcugcccacccacuucgagcacaacguggaccugagcagagccaucaacgugaacggcgugagcuucaacaacguggacaccagcagccugggcgccgcccaggugagacagagcgccagcagaggcagaggccugggcgagaagcccaaggagggcgacgacaaggagaagaagaaggagaaggagaaggaggaggagcccaagaagcugaacgagaacaaccccaagaagcccaacgaggagggcgacggcgccaagcugaagcagcccaacgaggagggcgacggcgccaagcugaagcagcccaacgccgagggcggcgccaagcugaagcagcccaacgccgagggcggcgccaacgccggccagcccaacgccgagggcggcgccaacgccggccagcccaacgccgagggcggcgccaacgccggccagcccaacgccggcggcgccaacgccggccagcccaacgccgagggcggcgccaacgccggccagcccaacgccgagggcggcgccaacgccggccagcccaacgccgagggcggcgccaacgccagacagcccaacgccgagggcggcgccaacgccagacagcccaacgccgagggcggcgccaacgccggccagcccaacgccgagggcggcgccaacgccggccagcccaacgccgagggcggcgccaacgccggccagcccaacgccgagggcggcgccaacgccagacagcccaacgccgagggcggcgccaacgccggccagcccaacgccgagggcggcgccaacgccggccagcccaacgccgagggcggcgccaacgccagacagccccaggccgagggcggcggcgccaacgccagacagccccaggccgagggcggcggcgccaacgccagacagggcggcaacgagggcaacaagcaggccggcaagggccagggccagaacaaccagggcgccaacgcccccaacgagaagguggugaacgacuaccugcagaagaucagaagcagcgugaccaucgaguggacccccugcagcgugaccugcggcaacggcgugagaaucagaagaagagcccacgccgacaagaagaaggccgaggaccugaccauggacgaccuggagguggaggccugcgugauggacagaugcgccggcaucuucaacguggugagcaacagccugggccuggugauccugcuggugcuggcccuguucaacuga

SEQ ID NO: 4724 - RNA, 1278 nt, Artificial Sequence
  derived and/or modified CDS sequence (opt4) from Pk(SGEHIH1-im-Y09-17)__AFD97205.1__CSP
augagaaacuucauccugcuggccgugagcagcauccugcugguggaccugcugcccacccacuucgagcacaacguggaccugagcagagccaucaacgugaacggcgugagcuucaacaacguggacaccagcagccugggcgccgcccaggugagacagagcgccagcagaggcagaggccugggcgagaagcccaaggagggcgacgacaaggagaagaagaaggagaaggagaaggaggaggagcccaagaagcugaacgagaacaaccccaagaagcccaacgaggagggcgacggcgccaagcugaagcagcccaacgaggagggcgacggcgccaagcugaagcagcccaacgccgagggcggcgccaagcugaagcagcccaacgccgagggcggcgccaacgccggccagcccaacgccgagggcggcgccaacgccggccagcccaacgccgagggcggcgccaacgccggccagcccaacgccggcggcgccaacgccggccagcccaacgccgagggcggcgccaacgccggccagcccaacgccgagggcggcgccaacgccggccagcccaacgccgagggcggcgccaacgccagacagcccaacgccgagggcggcgccaacgccagacagcccaacgccgagggcggcgccaacgccggccagcccaacgccgagggcggcgccaacgccggccagcccaacgccgagggcggcgccaacgccggccagcccaacgccgagggcggcgccaacgccagacagcccaacgccgagggcggcgccaacgccggccagcccaacgccgagggcggcgccaacgccggccagcccaacgccgagggcggcgccaacgccagacagccccaggccgagggcggcggcgccaacgccagacagccccaggccgagggcggcggcgccaacgccagacagggcggcaacgagggcaacaagcaggccggcaagggccagggccagaacaaccagggcgccaacgcccccaacgagaagguggugaacgacuaccugcagaagaucagaagcagcgugaccaucgaguggacccccugcagcgugaccugcggcaacggcgugagaaucagaagaagagcccacgccgacaagaagaaggccgaggaccugaccauggacgaccuggagguggaggccugcgugauggacaagugcgccggcaucuucaacguggugagcaacagccugggccuggugauccugcuggugcuggcccuguucaacuga

SEQ ID NO: 4725 - RNA, 1278 nt, Artificial Sequence
  derived and/or modified CDS sequence (opt4) from Pk(SGEHIH1-im-Y09-25)__AFD97206.1__CSP
augaagaacuucauccugcuggccgugagcagcauccugcugguggaccugcugcccacccacuucgagcacaacguggaccugagcagagccaucaacgugaacggcgugagcuucaacaacguggacaccagcagccugggcgccgcccaggugagacagagcgccagcagaggcagaggccugggcgagaagcccaaggagggcgacgacaaggagaagaagaaggagaaggagaaggaggaggagcccaagaagcugaacgagaacaaccccaagaagcccaacgaggagggcgacggcgccaagcugaagcagcccaacgaggagggcgacggcgccaagcugaagcagcccaacgccgagggcggcgccaagcugaagcagcccaacgccgagggcggcgccaacgccggccagcccaacgccgagggcggcgccaacgccggccagcccaacgccgagggcggcgccaacgccggccagcccaacgccggcggcgccaacgccggccagcccaacgccgagggcggcgccaacgccggccagcccaacgccgagggcggcgccaacgccggccagcccaacgccgagggcggcgccaacgccagacagcccaacgccgagggcggcgccaacgccagacagcccaacgccgagggcggcgccaacgccggccagcccaacgccgagggcggcgccaacgccggccagcccaacgccgagggcggcgccaacgccggccagcccaacgccgagggcggcgccaacgccagacagcccaacgccgagggcggcgccaacgccggccagcccaacgccgagggcggcgccaacgccggccagcccaacgccgagggcggcgccaacgccagacagccccaggccgagggcggcggcgccaacgccagacagccccaggccgagggcggcggcgccaacgccagacagggcggcaacgagggcaacaagcaggccggcaagggccagggccagaacaaccagggcgccaacgcccccaacgagaagguggugaacgacuaccugcagaagaucagaagcagcgugaccaucgaguggacccccugcagcgugaccugcggcaacggcgugagaaucagaagaagagcccacgccgacaagaagaaggccgaggaccugaccauggacgaccuggagguggaggccugcgugauggacaagugcgccggcaucuucaacguggugagcaacagccugggccuggugauccugcuggugcuggcccuguucaacuga

SEQ ID NO: 4726 - RNA, 1278 nt, Artificial Sequence
  derived and/or modified CDS sequence (opt4) from Pk(SGEHIH2-im-Y09-11)__AFD97212.1__CSP
augaagaacuucauccugcuggccgugagcagcauccugcugguggaccugcugcccacccacuucgagcacaacguggaccugagcagagccaucaacgugaacggcgugagcuucaacaacguggacaccagcagccugggcgccgcccaggugagacagagcgccagcagaggcagaggccugggcgagaagcccaaggagggcgacgacaaggagaagaagaaggagaaggagaaggaggaggagcccaagaagcugaacgagaacaaccccaagaagcccaacgaggagggcgacggcgccaagcugaagcagcccaacgaggagggcgacggcgccaagcugaagcagcccaacgccgagggcggcgccaagcugaagcagcccaacgccgagggcggcgccaacgccggccagcccaacgccgagggcggcgccaacgccggccagcccaacgccgagggcggcgccaacgccggccagcccaacgccggcggcgccaacgccggccagcccaacgccgagggcggcgccaacgccggccagcccaacgccgagggcggcgccaacgccggccagcccaacgccgagggcggcgccaacgccagacagcccaacgccgagggcggcgccaacgccagacagcccaacgccgagggcggcgccaacgccggccagcccaacgccgagggcggcgccaacgccggccagcccaacgccgagggcggcgccaacgccggccagcccaacgccgagggcggcgccaacgccagacagcccaacgccgagggcggcgccaacgccggccagcccaacgccgagggcggcgccaacgccggccagcccaacgccgagggcggcgccaacgccagacagccccaggccgagggcggcggcgccaacgccagacagccccaggccgagggcggcggcgccaacgccagacagggcggcaacgagggcaacaagcaggccggcaagggccagggccagaacaaccagggcgccaacgcccccaacgagaagguggugaacgacuaccugcagaagaucagaagcagcgugaccaucgaguggacccccugcagcgugaccugcggcaacggcgugagaaucagaagaagagcccacgccgacaagaagagagccgaggaccugaccauggacgaccuggagguggaggccugcgugauggacaagugcgccggcaucuucaacguggugagcaacagccugggccuggugauccugcuggugcuggcccuguucaacuga

SEQ ID NO: 4727 - RNA, 1278 nt, Artificial Sequence
  derived and/or modified CDS sequence (opt4) from Pk(SGEHIH2-im-Y09-18)__AFD97214.1__CSP
augaagaacuucauccugcuggccgugagcagcauccugcugguggaccugcugcccacccacuucgagcacaacguggaccugaccagagccaucaacgugaacggcgugagcuucaacaacguggacaccagcagccugggcgccgcccaggugagacagagcgccagcagaggcagaggccugggcgagaagcccaaggagggcgacgacaaggagaagaagaaggagaaggagaaggaggaggagcccaagaagcugaacgagaacaaccccaagaagcccaacgaggagggcgacggcgccaagcugaagcagcccaacgaggagggcgacggcgccaagcugaagcagcccaacgccgagggcggcgccaagcugaagcagcccaacgccgagggcggcgccaacgccggccagcccaacgccgagggcggcgccaacgccggccagcccaacgccgagggcggcgccaacgccggccagcccaacgccggcggcgccaacgccggccagcccaacgccgagggcggcgccaacgccggccagcccaacgccgagggcggcgccaacgccggccagcccaacgccgagggcggcgccaacgccagacagcccaacgccgagggcggcgccaacgccagacagcccaacgccgagggcggcgccaacgccggccagcccaacgccgagggcggcgccaacgccggccagcccaacgccgagggcggcgccaacgccggccagcccaacgccgagggcggcgccaacgccagacagcccaacgccgagggcggcgccaacgccggccagcccaacgccgagggcggcgccaacgccggccagcccaacgccgagggcggcgccaacgccagacagccccaggccgagggcggcggcgccaacgccagacagccccaggccgagggcggcggcgccaacgccagacagggcggcaacgagggcaacaagcaggccggcaagggccagggccagaacaaccagggcgccaacgcccccaacgagaagguggugaacgacuaccugcagaagaucagaagcagcgugaccaucgaguggacccccugcagcgugaccugcggcaacggcgugagaaucagaagaagagcccacgccgacaagaagaaggccgaggaccugaccauggacgaccuggagguggaggccugcgugauggacaagugcgccggcaucuucaacguggugagcaacagccugggccuggugauccugcuggugcuggcccuguucaacuga

SEQ ID NO: 4728 - RNA, 1278 nt, Artificial Sequence
  derived and/or modified CDS sequence (opt4) from Pk(SGEHIH2-im-Y09-3)__AFD97210.1__CSP
augaagaacuucauccugcuggccgugagcagcauccugcugguggaccugcugcccacccacuucgagcacaacguggaccugagcagagccaucaacgugaacggcgugagcuucaacaacguggacaccagcagccugggcgccgcccaggugagacagagcgccagcagaggcagaggccugggcgagaagcccaaggagggcgacgacaaggagaagaagaaggagaaggagaaggaggaggagcccaagaagcugaacgagaacaaccccaagaagcccaacgaggagggcgacggcgccaagcugaagcagcccaacgaggagggcgacggcgccaagcugaagcagcccaacgccgagggcggcgccaagcugaagcagcccaacgccgagggcggcgccaacgccggccagcccaacgccgagggcggcgccaacgccggccagcccaacgccgagggcggcgccaacgccggccagcccaacgccggcggcgccaacgccggccagcccaacgccgagggcggcgccaacgccggccagcccaacgccgagggcggcgccaacgccggccagcccaacgccgagggcggcgccaacgccagacagcccaacgccgagggcggcgccaacgccagacagcccaacgccggcggcggcgccaacgccggccagcccaacgccgagggcggcgccaacgccggccagcccaacgccgagggcggcgccaacgccggccagcccaacgccgagggcggcgccaacgccagacagcccaacgccgagggcggcgccaacgccggccagcccaacgccgagggcggcgccaacgccggccagcccaacgccgagggcggcgccaacgccagacagccccaggccgagggcggcggcgccaacgccagacagccccaggccgagggcggcggcgccaacgccagacagggcggcaacgagggcaacaagcaggccggcaagggccagggccagaacaaccagggcgccaacgcccccaacgagaagguggugaacgacuaccugcagaagaucagaagcagcgugaccaucgaguggacccccugcagcgugaccugcggcaacggcgugagaaucagaagaagagcccacgccgacaagaagaaggccgaggaccugaccguggacgaccuggagguggaggccugcgugauggacaagugcgccggcaucuucaacguggugagcaacagccugggccuggugauccugcuggugcuggcccuguucaacuga

SEQ ID NO: 4729 - RNA, 1278 nt, Artificial Sequence
  derived and/or modified CDS sequence (opt4) from Pk(SGEHIH2-im-Y09-7)__AFD97211.1__CSP
augagaaacuucauccugcuggccgugagcagcauccugcugguggaccugcugcccacccacuucgagcacaacguggaccugagcagagccaucaacgugaacggcgugagcuucaacaacguggacaccagcagccugggcgccgcccaggugagacagagcgccagcagaggcagaggccugggcgagaagcccaaggagggcgacgacaaggagaagaagaaggagaaggagaaggaggaggagcccaagaagcugaacgagaacaaccccaagaagcccaacgaggagggcgacggcgccaagcugaagcagcccaacgaggagggcgacggcgccaagcugaagcagcccaacgccgagggcggcgccaagcugaagcagcccaacgccgagggcggcgccaacgccggccagcccaacgccgagggcggcgccaacgccggccagcccaacgccgagggcggcgccaacgccggccagcccaacgccggcggcgccaacgccggccagcccaacgccgagggcggcgccaacgccggccagcccaacgccgagggcggcgccaacgccggccagcccaacgccgagggcggcgccaacgccagacagcccaacgccgagggcggcgccaacgccagacagcccaacgccgagggcggcgccaacgccggccagcccaacgccgagggcggcgccaacgccggccagcccaacgccgagggcggcgccaacgccggccagcccaacgccgagggcggcgccaacgccagacagcccaacgccgagggcggcgccaacgccggccagcccaacgccgagggcggcgccaacgccggccagcccaacgccgagggcggcgccaacgccagacagccccaggccgagggcggcggcgccaacgccagacagccccaggccgagggcggcggcgccaacgccagacagggcggcaacgagggcaacaagcaggccggcaagggccagggccagaacaaccagggcgccaacgcccccaacgagaagguggugaacgacuaccugcagaagaucagaagcagcgugaccaucgaguggacccccugcagcgugaccugcggcaacggcgugagaaucagaagaagagcccacgccgacaagaagaaggccgaggaccugaccauggacgaccuggagguggaggccugcgugauggacaagugcgccggcaucuucaacguggugagcaacacccugggccuggugauccugcuggugcuggcccuguucaacuga

SEQ ID NO: 4730 - RNA, 1278 nt, Artificial Sequence
  derived and/or modified CDS sequence (opt4) from Pk(UMNGC3)__AHF20628.1__CSP
augaagaacuucauccugcuggccgugagcagcauccugcugguggaccugcugcccacccacuucgagcacaacguggaccugagcagagccaucaacgugaacggcgugagcuucaacaacguggacaccagcagccugggcgccgcccaggugagacagagcgccagcagaggcagaggccugggcgagaagcccaaggagggcgacgacaaggagaagaagaaggagaaggagaaggaggaggagcccaagaagcugaacgagaacaaccccaagaagcccaacgaggagggcgacggcgccaagcuggagcagcccaacgaggagggcgacggcgccaagcugaagcagcccaacgaggagggcgacggcgccaagcugaagcagcccaacgccgagggcggcgccaagcugaagcagcccaacgccgagggcggcgccaacgccggccagcccaacgccgagggcggcgccaacgccggccagcccaacgccgagggcggcgccaacgccggccagcccaacgccggcggcgccaacgccggccagcccaacgccgagggcggcgccaacgccggccagcccaacgccgagggcggcgccaacgccggccagcccaacgccgagggcggcgccaacgccggccagcccaacgccgagggcggcgccaacgccagacagcccaacgccgagggcggcgccaacgccggccagcccaacgccgagggcggcgccaacgccggccagcccaacgccgagggcggcgccaacgccggccagcccaacgccgagggcggcgccaacgccagacagcccaacgccgagggcggcgccaacgccggccagcccaacgccgagggcggcgccaacgccggccagcccaacgccgagggcggcgccaacgccagacagccccaggccgagggcggcggcgccaacgccagacagggcggcaacgagggcaacaagcaggccggcaagggccagggccagaacaaccagggcgccaacgcccccaacgagaagguggugaacgacuaccugcagaagaucagaagcagcgugaccaucgaguggacccccugcagcgugaccugcggcaacggcgugagaaucagaagaagagcccacgccgacaagaagaaggccgaggaccugaccaugggcgaccuggagguggaggccugcgugauggacaagugcgccggcguguucaacguggugagcaacagccugggccuggugauccugcuggugcuggcccuguucaacuga

SEQ ID NO: 4731 - RNA, 1275 nt, Artificial Sequence
  derived and/or modified CDS sequence (opt4) from Pk(prk-1)__ADX31295.1__CSP
augaagaacuucauccugcuggccgugagcagcauccugcugguggaccugcugcccacccacuucgagcacaacguggaccugagcagagccaucaacgugaacggcgugagcuucaacaacguggacaccagcagccugggcgccgcccaggugagacagagcgccagcagaggcagaggccugggcgagaagcccaaggagggcgacgacaaggagaagaagaaggagaaggagaaggaggaggagcccaagaagcugaacgagaacaaccccaagaagcccaacgaggagggcgacggcgccaagcugaagcagcccgacgaggagggcgacggcgccaagcugaagcagcccaacgaggagggcgacggcgccaagcugaagcagcccaacgccgagggcggcgccaagcugaagcagcccaacgccgagggcggcgccaacgccggccagcccaacgccgagggcggcgccaacgccggccagcccaacgccgagggcggcgccaacgccggccagcccaacgccggcggcgccaacgccggccagcccaacgccgagggcggcgccaacgccggccagcccaacgccgagggcggcgccaacgccggccagcccaacgccgagggcggcgccaacgccggccagcccaacgccgagggcggcgccaacgccagacagcccaacgccgagggcggcgccaacgccggccagcccaacgccgagggcggcgccaacgccggccagcccaacgccgagggcggcgccaacgccggccagcccaacgccgagggcggcgccaacgccagacagcccaacgccgagguggagcagacccaggacaacagaaugcagaagguggagcagaugcagaccaccgagugcagaagcggcaccaacgccagacagccccaggccgagggcggcggcgccaacgccagacagggcggcaacgagggcaacaagcaggccggcaagggccagggccagaacaaccagggcgccaacgcccccaacgagaagguggugaacgacuaccugcagaagaucagaagcagcgugaccaucgaguggacccccugcagcgugaccugcggcaacggcgugagaaucagaagaagagcccacgccgacaagaagaaggccgaggaccugaccauggacgaccuggagguggaggccugcgugauggacaagugcgccggcaucuucaacguggugagcaacagccugggccuggugauccugcuggugcuggcccuguucaacuga

SEQ ID NO: 4732 - RNA, 1251 nt, Artificial Sequence
  derived and/or modified CDS sequence (opt4) from Pk(UM0018C10)__AHF20648.1__CSP
augaagaacuucauccugcuggccgugagcagcauccugcugguggaccugcugcccacccacuucgagcacaacguggaccugagcagagccaucaacgugaacggcgugagcuucaacaacguggacaccagcagccugggcgccgcccaggugagacagagcgccagcagaggcagaggccugggcgagaagcccaaggagggcgacgacaaggagaagaagaaggagaaggagaaggaggaggagcccaagaagcugaacgagaacaagcccaagcagcccaacguggagggcgacggcgccaagcugaagcagcccaacgaggagggcgacggcgccaagcugaagcagcccaacgaggagggcgacggcgccaagcugaagcagcccaacgccgagggcggcgccaagcugaagcagcccaacgccgagggcggcgccaacgccggccagcccaacgccgagggcggcgccaacgccggccagcccaacgccgagggcggcgccaacgccggccagcccaacgccgagggcggcgccaacgccggccagcccaacgccgagggcggcgccaacgccggccagcccaacgccgagggcggcgccaacgccggccagcccaacgccgagggcggcgccaacgccggccagcccaacgccgagggcggcgccaacgccagacagcccaacgccgagggcggcgccaacgccagacagcccaacgccgagggcggcgccaacgccagacagcccaacgccgagggcggcgccaacgccggccagcccaacgccgagggcggcgccaacgccggccagcccaacgccgagggcggcgccaacgccagacagccccaggccgagggcggcggcgccaacgccagacagccccaggccgagggcggcggcgccaacgccagacagggcggcaacgagggcaacaagcaggccggcaagggccagggccagaacaaccagggcgccaacgcccccaacgagaagguggugaacgacuaccugcagaagaucagaagcagcgugaccaccgaguggacccccugcagcgugaccugcggcaacggcgugagaaucagaagaagagcccacgccgacaagaagaaggccgaggaccugaccauggacgaccuggagguggaggccugcgugauggacaagugcgccggcaucuucaacguggugagcaacagccugggccuggugauccugcuggugcuggcccuguucaacuga

SEQ ID NO: 4733 - RNA, 1251 nt, Artificial Sequence
  derived and/or modified CDS sequence (opt4) from Pk(UM0018C6)__AHF20646.1__CSP
augaagaacuucauccugcuggccgugagcagcauccugcugguggaccugcugcccacccacuucgagcacaacguggaccugagcagagccaucaacgugaacggcgugagcuucaacaacguggacaccagcagccugggcgccgcccaggugagacagagcgccagcagaggcagaggccugggcgagaagcccaaggagggcgacgacaaggagaagaagaaggagaaggagaaggaggaggagcccaagaagcugaacgagaacaagcccaagcagcccaacguggagggcgacggcgccaagcugaagcagcccaacgaggagggcgacggcgccaagcugaagcagcccaacgaggagggcgacggcgccaagcugaagcagcccaacgccgagggcggcgccaagcuggagcagcccaacgccgagggcggcgccaacgccggccagcccaacgccgagggcggcgccaacgccggccagcccaacgccgagggcggcgccaacgccggccagcccaacgccgagggcggcgccaacgccggccagcccaacgccgagggcggcgccaacgccggccagcccaacgccgagggcggcgccaacgccggccagcccaacgccgagggcggcgccaacgccggccagcccaacgccgagggcggcgccaacgccagacagcccaacgccgagggcggcgccaacgccagacagcccaacgccgagggcggcgccaacgccagacagcccaacgccgagggcggcgccaacgccggccagcccaacgccgagggcggcgccaacgccggccagcccaacgccgagggcggcgccaacgccagacagccccaggccgagggcggcggcgccaacgccagacagccccaggccgagggcggcggcgccaacgccagacagggcggcaacgagggcaacaagcaggccggcaagggccagggccagaacaaccagggcgccaacgcccccaacgagaagguggugaacgacuaccugcagaagaucagaagcagcgugaccaccgaguggacccccugcagcgugaccugcggcaacggcgugagaaucagaagaagagcccacgccgacaagaagaaggccgaggaccugaccauggacgaccuggagguggaggccugcgugauggacaagugcgccggcaucuucaacguggugagcaacagccugggccuggugauccugcuggugcuggcccuguucaacuga

SEQ ID NO: 4734 - RNA, 1242 nt, Artificial Sequence
  derived and/or modified CDS sequence (opt4) from Pk(SGEHIH1-im-Y09-95)__AFD97208.1__CSP
augaagaacuucauccugcuggccgugagcagcauccugcugguggaccugcugcccacccacuucgagcacaacguggaccugagcagagccaucaacgugaacggcgugagccugaacaacguggacaccagcagccugggcgccgcccaggugagacagagcgccagcagaggcagaggccugggcgagaagcccaaggagggcgacgacaaggagaagaagaaggagaaggagaaggaggaggagcccaagaagcugaacgagaacaaccccaagaagcccaacgaggagggcgacggcgccaagcugaagcagcccaacgccgagggcggcgccaagcugaagcagcccaacgccgagggcggcgccaacgccggccagcccaacgccgagggcggcgccaacgccggccagcccaacgccgagggcggcgccaacgccggccagcccaacgccggcggcgccaacgccggccagcccaacgccgagggcggcgccaacgccggccagcccaacgccgagggcggcgccaacgugggccagcccaacgccgagggcggcgccaacgccagacagcccaacgccgagggcggcgccaacgccagacagcccaacgccgagggcggcgccaacgccggccagcccaacgccgagggcggcgccaacgccggccagcccaacgccgagggcggcgccaacgccggccagcccaacgccgagggcggcgccaacgccagacagcccaacgccgagggcggcgccaacgccggccagcccaacgccgagggcggcgccaacgccggccagcccaacgccgagggcggcgccaacgccagacagccccaggccgagggcggcggcgccaacgccagacagccccaggccgagggcggcggcgccaacgccagacagggcggcaacgagggcaacaagagagccggcaagggccagggccagaacaaccagggcgccaacgcccccaacgagaagguggugaacgacuaccugcagaagaucagaagcagcgugaccaucgaguggacccccugcagcgugaccugcggcaacggcgugagaaucagaagaagagcccacgccgacaagaagaaggccgaggaccugaccauggacgaccuggagguggaggccugcgugauggacaagugcgccggcaucuucaacguggugagcaacagccugggccuggugauccugcuggugcuggcccuguucaacuga

SEQ ID NO: 4735 - RNA, 1221 nt, Artificial Sequence
  derived and/or modified CDS sequence (opt4) from Pk(KH100)__ADN94497.1__CSP
augaagaacuucauccugcuggccgugagcagcauccugcugguggaccugcugcccacccacuucgagcacaacguggaccugagcagagccaucaacgugaacggcgugagcuucaacaacguggacaccagcagccugggcgccgcccaggugagacagagcgccagcagaggcagaggccugggcgagaagcccaaggagggcgacgacaaggagaagaagaaggagaaggagaaggaggaggagcccaagaaccugaacgagaacaagcccaagcagcccaacgccgagggcgacggcgccaagcccaagcagcccaacgccgagggcgacggcgccaagcugaagcagcccaacgccgagggcgacggcgccaagcugaagcagcccaacgccgagggcgacggcggcaacgccagacagcccaacgccgagggcgacggcggcaacgccagacagcccaacgccgagggcgacggcggcaacgccagacagcccaacgccgagggcgacggcggcaacgccagacagcccaacgccgagggcgacggcggcaacgccagacagcccaacgccgagggcgacggcggcaacgccagacagcccaacgccgagggcgacggcggcaacgccagacagcccaacgccgagggcgacggcggcaacgccagacagcccaacgccgagggcgacggcggcaacgccagacagcccaacgccgagggcgacggcggcaacgccagacagcccaacgccgagggcgacggcggcaacgccagacagcccaacgccgagggcgacggcgccaacgccagacagcccaacgccgagggcgacggcgccaacgccagacagccccaggccgagggcggcggcggcaacgccagacagggcggcaacgagggcaacaagcaggccggcaagggccagggccagaacaaccagggcgccaacgcccccaacgagaagguggugaacgacuaccugcagaagaucagaagcagcgugaccaccgaguggacccccugcagcgugaccugcggcaacggcgugagaaucagaagaagagcccacgccgacaagaagaaggccgaggaccugaccauggacgaccuggagguggaggccugcgugauggacaagugcgccggcaucuucaacguggugagcaacagccugggccuggugauccugcuggugcuggcccuguucaacuga

SEQ ID NO: 4736 - RNA, 1221 nt, Artificial Sequence
  derived and/or modified CDS sequence (opt4) from Pk(KH294)__ADN94542.1__CSP
augaagaacuucauccugcuggccgugagcagcauccugcugguggaccugcugcccacccacuucgagcacaacguggaccugagcagagccaucaacgugaacggcgugagcuucaacaacguggacaccagcagccugggcgccgcccaggugagacagagcgccagcagaggcagaggccugggcgagaagcccaaggagggcgacgacaaggagaagaagaaggagaaggagaaggaggaggagcccaagaaccugaacgagaacaagcccaagcagcccaacgccgagggcgacggcgccaagcccaagcagcccaacgccgagggcgacggcgccaagcugaagcagcccaacgccgagggcgacggcgccaagcugaagcagcccaacgccgagggcgacggcggcaacgccagacagcccaacgccgagggcgacggcggcaacgccagacagcccaacgccgagggcgacggcggcaacgccagacagcccaacgccgagggcgacggcggcaacgccagacagcccaacgccgagggcgacggcggcaacgccagacagcccaacgccgagggcgacggcggcaacgccagacagcccaacgccgagggcgacggcggcaacgccagacagcccaacgccgagggcgacggcggcaacgccagacagcccaacgccgagggcgacggcggcaacgccagacagcccaacgccgagggcgacggcggcaacgccagacagcccaacgccgagggcgacggcggcaacgccagacagcccaacgccgagggcgacggcggcaacgccagacagcccaacgccgagggcgacggcgccaacgccagacagccccaggccgagggcggcggcggcaacgccagacagggcggcaacgagggcaacaagcaggccggcaagggccagggccagaacaaccagggcgccaacgcccccaacgagaagguggugaacgacuaccugcagaagaucagaagcagcgugaccaccgaguggacccccugcagcgugaccugcggcaacggcgugagaaucagaagaagagcccacgccgacaagaagaaggccgaggaccugaccauggacgaccuggagguggaggccugcgugauggacaagugcgccggcaucuucaacguggugagcaacagccugggccuggugauccugcuggugcuggcccuguucaacuga

SEQ ID NO: 4737 - RNA, 1218 nt, Artificial Sequence
  derived and/or modified CDS sequence (opt4) from Pk(UM0015C4)__AHF20661.1__CSP
augaagaacuucauccugcuggccgugagcagcauccugcugguggaccugcugcccacccacuucgagcacaacguggaccugagcagagccaucaacgugaacggcgugagcuucaacaacguggacaccagcagccugggcgccgcccaggugagacagagcgccagcagaggcagaggccugggcgagaagcccaaggagggcgacgacaaggagaagaagaaggagaaggagaaggaggaggagcccaagaagcuggacgagaacaagcccaagcagcccaacguggagggcgacggcgccaagcugaagcagcccaacgaggagggcgacggcgccaagcugaagcagcccaacgaggagggcgacggcgccaagcugaagcagcccaacgccgagggcggcgccaagcugaagcagcccaacgccgagggcggcgccaacgccggccagcccaacgccgagggcggcgccaacgccggccagcccaacgccgagggcggcgccaacgccggccagcccaacgccgagggcggcgccaacgccggccagcccaacgccgagggcggcgccaacgccggccagcccaacgccgagggcggcgccaacgccggccagcccaacgccgagggcggcgccaacgccagacagcccaacgccgagggcggcgccaacgccagacagcccaacgccgagggcggcgccaacgccagacagcccaacgccgagggcggcgccaacgccggccagcccaacgccgagggcggcgccaacgccggccagcccaacgccgagggcggcgccaacgccagacagccccaggccgagggcggcggcgccaacgccagacagccccaggccgagggcggcggcgccaacgccagacagggcggcaacgagggcaacaagcaggccggcaagggccagggccagaacaaccagggcgccaacgcccccaacgagaagguggugaacgacuaccugcagaagaucagaagcagcgugaccaccgaguggacccccugcagcgugaccugcggcaacggcgugagaaucagaagaagagcccacgccgacaagaagaaggccgaggaccugaccauggacgaccuggagguggaggccugcgugauggacaagugcgccggcaucuucagcguggugagcaacagccugggccuggugauccugcuggugcuggcccuguucaacuga

SEQ ID NO: 4738 - RNA, 1218 nt, Artificial Sequence
  derived and/or modified CDS sequence (opt4) from Pk(UM0015C7)__AHF20662.1__CSP
augaagaacuucauccugcuggccgugagcagcauccugcugguggaccugcugcccacccacuucgagcacaacguggaccugagcagagccaucaacgugaacggcgugagcuucaacaacguggacaccagcagccugggcgccgcccaggugagacagagcgccagcagaggcagaggccugggcgagaagcccaaggagggcgacgacaaggagaagaagaaggagaaggagaaggaggaggagcccaagaagcugaacgagaacaagcccaagcagcccaacguggagggcgacggcgccaagcugaagcagcccaacgaggagggcgacggcgccaagcugaagcagcccaacgaggagggcgacggcgccaagcugaagcagcccaacgccgagggcggcgccaagcugaagcagcccaacgccgagggcggcgccaacgccggccagcccaacgccgagggcggcgccaacgccggccagcccaacgccgagggcggcgccaacgccggccagcccaacgccgagggcggcgccaacgccggccagcccaacgccgagggcggcgccaacgccggccagcccaacgccgagggcggcgccaacgccggccagcccaacgccgagggcggcgccaacgccagacagcccaacgccgagggcggcgccaacgccagacagcccaacgccgagggcggcgccaacgccagacagcccaacgccgagggcggcgccaacgccggccagcccaacgccgagggcggcgccaacgccggccagcccaacgccgagggcggcgccaacgccagacagccccaggccgagggcggcggcgccaacgccagacagccccaggccgagggcggcggcgccaacgccagacagggcggcaacgagggcaacaagcaggccggcaagggccagggccagaacaaccagggcgccaacgcccccaacgagaagguggugaacgacuaccugcagaagaucagaagcagcgugaccaccgaguggacccccugcagcgugaccugcggcaacggcgugagaaucagaagaagagcccacgccgacaagaagaaggccgaggaccugaccauggacgaccuggagguggaggccugcgugauggacaagugcgccggcaucuucaacguggugagcaacagccugggccuggugauccugcuggugcuggcccuguucaacuga

SEQ ID NO: 4739 - RNA, 1218 nt, Artificial Sequence
  derived and/or modified CDS sequence (opt4) from Pk(UM009C4)__AHF20644.1__CSP
augaagaacuucauccugcuggccgugagcagcauccugcugguggaccugcugcccacccacuucgagcacaacguggaccugagcagagccaucaacgugaacggcgugagcuucaacaacguggacaccagcagccugggcgccgcccaggugagacagagcgccagcagaggcagaggccugggcgagaagcccaaggagggcgacgacaaggagaagaagaaggagaaggagaaggaggaggagcccaagaagcugaacgagaacaagcccaagcagcccaacguggagggcgacggcgccaagcugaagcagcccaacgaggagggcgacggcgccaagcugaagagacccaacgaggagggcgacggcgccaagcugaagcagcccaacgccgagggcggcgccaagcccaagcagcccaacgccgagggcggcgccaacgccggccagcccaacgccgagggcggcgccaacgccggccagcccaacgccgagggcggcgccaacgccggccagcccaacgccgagggcggcgccaacgccggccagcccaacgccgagggcggcgccaacgccggccagcccaacgccgagggcggcgccaacgccggccagcccaacgccgagggcggcgccaacgccagacagcccaacgccgagggcggcgccaacgccagacagcccaacgccgagggcggcgccaacgccagacagcccaacgccgagggcggcgccaacgccggccagcccaacgccgagggcggcgccaacgccggccagcccaacgccgagggcggcgccaacgccagacagccccaggccgagggcggcggcgccaacgccagaagaccccaggccgagggcggcggcgccaacgccagacagggcggcaacgagggcaacaagcaggccggcaagggccagggccagaacaaccagggcgccaacgcccccaacgagaagguggugaacgacuaccugcagaagaucagaagcagcgugaccaccgaguggacccccugcagcgugaccugcggcaacggcgugagaaucagaagaagagcccacgccgacaagaagaaggccgaggaccugaccauggacgaccuggagguggaggccugcgugauggacaagugcgccggcaucuucaacguggugagcaacagccugggccuggugauccugcuggcccuggcccuguucaacuga

SEQ ID NO: 4740 - RNA, 1212 nt, Artificial Sequence
  derived and/or modified CDS sequence (opt4) from Pk(TN027)__AFG25481.1__CSP
augaagaacuucauccugcuggccgugagcagcauccugcugguggaccugcugcccacccacuucgagcacaacguggaccugagcagagccaucaacgugaacggcgugagcuucaacaacguggacaccagcagccugggcgccgcccaggugagacagagcgccagcagaggcagaggccugggcgagaagcccaaggagggcgacgacaaggagaagaagaaggagaaggagaaggaggaggagcccaagaaccugaacgagaacaagcccaagcagcccaacgccgagggcgacggcgccaagcugaagcagcccaacgccgagggcgacggcgccaagcugaagcagcccaacgccgagggcgacggcgccaagcugaagcagccccaggccgagggcgacggcgccaacgccagacagccccaggccgagggcgacggcgccaacgccagacagccccaggccgagggcgacggcgccaacgccagacagccccaggccgagggcgacggcgccaacgccagacagccccaggccgagggcgacggcgccaacgccagacagccccaggccgagggcgacggcgccaacgccagacagccccaggccgagggcgacggcgccaacgccagacagccccaggccgagggcgacggcgccaacgccagacagccccaggccgagggcgacggcgccaacgccagacagccccaggccgagggcgacggcgccaacgccagacagccccaggccgagggcggcggcgccaacgccagacagccccaggccgagggcgacggcgccaacgccagacaggcccaggcccagggcgacggcggcaacgccagacagggcggcaacggcggcggcgcccccgccggcggcaacgagggcaacaagcaggccggcaagggccagggccagaacaaccagggcgccaacgcccccaacgagaagguggugaacgacuaccugcagaagaucagaagcagcgugaccaccgaguggacccccugcagcgugaccugcggcaacggcgugagaaucagaagaagagcccacgccgacaagaagaaggccgaggaccugaccauggacgaccuggagguggaggccugcgugauggacaagugcgccggcaucuucaacguggugagcaacagccugggccuggugauccugcuggugcuggcccuguucaacuga

SEQ ID NO: 4741 - RNA, 1188 nt, Artificial Sequence
  derived and/or modified CDS sequence (opt4) from Pk(UM0034C7)__AHF20657.1__CSP
augagaaacuucauccugcuggccgugagcagcauccugcugguggaccugcugcccacccacuucgagcacaacguggaccugagcagagccaucaacgugaacggcgugagcuucaacaacguggacaccagcagccugggcgccgcccaggugagacagagcgccagcagaggcagaggccugggcgagaagagaaaggagggcgccgacaaggagaagaagaaggagaaggaggaggagcccaagaagcccaacgagaacaagcugaagcagcccaaccccgaccagccccaggcccagggcaacggcgccaacgccggccagccccaggcccagggcgacggcgccaacgccggccagccccaggcccagggcgacggcgccaacgccggccagccccaggcccagggcgacggcgccaacgccggccagccccaggcccagggcgacggcgccaacgccggccagccccaggcccagggcgacggcgccaacgccggccagccccaggcccagggcgacggcgccaacgccggccagccccaggcccagggcgacggcgccaacgccggccagccccaggcccagggcgacggcgccaacgccggccagccccaggcccagggcgacggcgccaacgccggccagccccaggcccagggcgacggcgccaacgccggccagccccaggcccagggcgacggcgccaacgccggccagccccaggcccagggcgacggcgccaacgccggccagccccaggcccagggcgacagagccaacgccggccagccccaggcccagggcgacggcgccaacgugcccagacagggcagaaacggcggcggcgcccccgccggcggcaacgagggcaacaagcaggccggcaagggccagggccagaacaaccagggcgccaacgcccccaacgagaagguggugaacgacuaccugcacaagaucagaagcagcgugaccaccgaguggacccccugcagcgugaccugcggcaacggcgugagaaucagaagaaaggcccacgccggcaacaagaaggccgaggaccugaccauggacgaccuggagguggaggccugcgugauggacaagugcgccggcaucuucaacguggugagcaacagccugggccuggugauccugcuggugcuggcccuguucaacuga

SEQ ID NO: 4742 - RNA, 1185 nt, Artificial Sequence
  derived and/or modified CDS sequence (opt4) from Pk(KH225)__ADN94498.1__CSP
augaagaacuucauccugcuggccgugagcagcauccugcugguggaccugcugcccacccacuucgagcacaacguggaccugagcagagccaucaacgugaacggcgugagcuucaacaacguggacaccagcagccugggcgccgcccaggugagacagagcgccagcagaggcagaggccugggcgagaagcccaaggagggcgacgacaaggagaagaagaaggagaaggagaaggaggaggagcccaagaaccugaacgagaacaagcccaagcagcccaacgccgagggcgacggcgccaagcugaagcagcccaacgccgagggcgacggcgccaagcugaagcagcccaacgccgagggcgacggcggcaacgccagacagcccaacgccgagggcgacggcggcaacgccagacagcccaacgccgagggcgacggcggcaacgccagacagcccaacgccgagggcgacggcggcaacgccagacagcccaacgccgagggcgacggcggcaacgccagacagcccaacgccgagggcgacggcggcaacgccagacagcccaacgccgagggcgacggcggcaacgccagacagcccaacgccgagggcgacggcggcaacgccagacagcccaacgccgagggcgacggcggcaacgccagacagcccaacgccgagggcgacggcggcaacgccagacagcccaacgccgagggcgacggcggcaacgccagacagcccaacgccgagggcgacggcggcaacgccagacagcccaacgccgagggcgacggcgccaacgccagacagccccaggccgagggcggcggcggcaacgccagacagggcggcaacgagggcaacaagcaggccggcaagggccagggccagaacaaccagggcgccaacgcccccaacgagaagguggugaacgacuaccugcagaagaucagaagcagcgugaccaccgaguggacccccugcagcgugaccugcggcaacggcgugagaaucagaagaagagcccacgccgacaagaagaaggccgaggaccugaccauggacgaccuggagguggaggccugcgugauggacaagugcgccggcaucuucaacguggugagcaacagccugggccuggugauccugcuggugcuggcccuguucaacuga

SEQ ID NO: 4743 - RNA, 1179 nt, Artificial Sequence
  derived and/or modified CDS sequence (opt4) from Pk(UM001C7)__AHF20637.1__CSP
augaagaacuucauccugcuggccgugagcagcauccugcugguggaccugcugcccacccacuucgagcacaacguggaccugagcagagccaucaacgugaacggcgugagcuucaacaacguggacaccagcagccugggcgccgcccaggugagacagagcgccagcagaggcagaggccugggcgagaagcccaaggagggcgccgacaaggagaagaagaaggagaagggcaaggagaaggaggaggagcccaagaagcccaacgagaacaagcugaagcagcccaacgagggccagccccaggcccagggcgacggcgccaacgccggccagccccaggcccagggcgacggcgccaacgccggccagccccaggcccagggcgacggcgccaacgccggccagccccaggcccagggcgacggcgccaacgccggccagccccaggcccagggcgacggcgccaacgccggccagccccaggcccagggcgacggcgccaacgccggccagccccaggcccagggcgacggcgccaacgccggccagccccaggcccagggcgacggcgccaacggcgacggcgccaacgccggccagccccaggcccagggcgacggcgccaacgccggccagccccaggcccagggcgacggcgccaacgccggccagccccaggcccagggcgacggcgccaacgccggccagccccaggcccagggcgacggcgccaacgccggccagccccaggcccagggcgacagagccaacgccggccagccccaggcccagggcgacggcgccaacgugcccagacagggcagaaacggcggcggcgcccccgccggcggcaacgagggcaacaagcaggccggcaagggccagggccagaacaaccagggcgccaacgcccccaacgagaagguggugaacgacuaccugcacaagaucagaagcagcgugaccaccgaguggacccccugcagcgugaccugcggcaacggcgugagaaucagaagaaaggcccacgccggcaacaagaaggccgaggaccugaccauggacgaccuggagguggaggccugcgugauggacaagugcgccggcaucuucaacguggugagcaacagccugggccuggugauccugcuggugcuggcccuguucaacuga

SEQ ID NO: 4744 - RNA, 1140 nt, Artificial Sequence
  derived and/or modified CDS sequence (opt4) from Pk(SGEHIWM4-Y09-15)__AFD97227.1__CSP
augaagaacuucauccugcuggccgugagcagcauccugcugguggaccugcugcccaccuacuucgagcacaacguggaccugagcagagccgugaacgugaacggcgugagcuucaacagcguggacaccagcagccugggcgccgcccaggugagacagagcgccagcagaggcagaggccugggcgagaagcccaaggagggcgccgacaaggagaagaagaaggagaaggagaaggaggaggagcccaagaagcccaacgagaacaagcugaagcagccccagggcaacggcggcgccggccaggcccagcccgagggcaacggcggcgccggccaggcccagcccgagggcaacggcggcgccggccaggcccagcccgagggcaacggcggcgccggccaggcccagcccgagggcaacggcggcgccggccaggcccagcccgagggcaacggcggcgccggccaggcccagcccgagggcaacggcggcgccggccaggcccagcccgagggcaacggcggcgccggccaggcccagccccagggcaacggcggcgccggccaggcccagccccagggcaacggcggcgccggccaggcccagccccagggcaacggcggcgccggccaggcccagccccagggcaacggcggcgccggccaggcccagcccgagggcaacggcggcgccggccaggcccagccccagggcaacggcggcgccggccaggcccagcccgagggcaacagagaggcccccgcccagccccagggcaacggcggcgccggccaggcccagccccagaagaacgagggcggcaacgccggcgccagaaagggccagggccagaacagccagggcgccaacgcccccaacgagaagguggugaacgacuaccugcagaagaucagaagcagcgugaccaccgaguggacccccugcagcgugaccugcggcaacggcgugagaaucagaagaagagcccacgccgacaagaagaaggccggcgaccugaccauggacgaccuggagguggaggccugcgugauggacaagugcgccggcaucuucaacgccgugagcaacagccugggccuggugauccugcuggugcuggcccuguucaacuga

SEQ ID NO: 4745 - RNA, 1140 nt, Artificial Sequence
  derived and/or modified CDS sequence (opt4) from Pk(UM002C3)__AHF20638.1__CSP
augaagaacuucauccugcuggccgugagcagcauccugcugguggaccugcugcccaccuacuucgagcacaacguggaccugagcagagccaucaacgugaacggcgugagcuucaacaacguggacaccagcagccugggcgccgcccaggugagacagagcgccagcagaggcagaggccugggcgagaagcccaaggagggcgccgacaaggagaagaagaaggagaaggagaaggagaaggaggaggagcccaagaagcccaacgagaacaagcugaagcagcccgagggcaacggcggcgccggccccgcccagcccgagggcaacggcggcgccggccccgcccagcccgagggcaacggcggcgccggccccgcccagcccgagggcaacggcggcgccggccccgcccagcccgagggcaacggcggcgccggccccgcccagcccgagggcaacggcggcgccggccccgcccagcccgagggcaacggcggcgccggccccgcccagcccgagggcaacggcggcgccggccccgcccagcccgagggcaacggcggcgccggccccgcccagcccggcggccaggugcagcacaacagaaaggagaugggcggccaggugcagcacaacagaaaggagaugggcggccaggugcagcacaaccacaaggagaugggcggccaggugcagcacaaccacaaggagaugggcggcgccggccccgcccagccccagggcaacggcggcgccggccccgcccagccccagggcaacggcggcgccggccaggcccagccccagaagaacgagggcggcaacgccggcgccagaaagggccagggccagaacaaccagggcgccaacgcccccaacgagaagguggugaacgacuaccugcagaagaucagaagcagcgugaccaccgaguggacccccugcagcgugaccugcggcgacggcgugagaaucaagagaagagcccacgccgacaagaagaaggccgaggaccugaccauggacgaccuggagguggaggccugcgugauggacaagugcgccggcaucuucaacguggugagcaacagccugggccuggugauccugcuggugcuggcccuguucaacuga

SEQ ID NO: 4746 - RNA, 1128 nt, Artificial Sequence
  derived and/or modified CDS sequence (opt4) from Pk(UM0021C6)__AHF20666.1__CSP
augagaaacuucauccugcuggccgugagcagcauccugcugguggaccuguuccccacccacuucgagcacaacguggaccugagcagagccaucaacgugaacggcgugagcuucaacaacguggacaccagcagccugggcgccgcccaggugagacagagcgccagcagaggcagaggccugggcgagaagcccaaggagggcgccgacaaggagaagaagaaggagaagggcaaggagaaggaggaggagcccaagaagcccaacgagaacaagcugaagcagcccaacgagggccagccccaggcccagggcgacggcgccaacgccggccagccccaggcccagggcgacggcgccaacgccggccagccccaggcccagggcgacggcgccaacgccggccagccccaggcccagggcgacggcgccaacgccggccagccccaggcccagggcgacggcgccaacgccggccagccccaggcccagggcgacggcgccaacgccggccagccccaggcccagggcgacggcgccaacgccggccagccccaggcccagggcgacggcgccaacgccggccagccccaggcccagggcgacggcgccaacgccggccagccccaggcccagggcgacggcgccaacaccggccagccccaggcccagggcgacggcgccaacgccggccagccccaggcccagggcgacagagccaacgccggccagccccaggcccagggcgacggcgccaacgugcccagacagggcagaaacggcggcggcgcccccgccggcggcaacgagggcaacaagcaggccggcaagggccagggccagaacaaccagggcgccaacgcccccaacgagaagguggugaacgacuaccugcacaagaucagaagcagcgugaccaccgaguggacccccugcagcgugaccugcggcaacggcgugagaaucagaagaaaggcccacgccggcaacaagaaggccgaggaccugaccauggacgaccuggagguggaggccugcgugauggacaagugcgccggcaucuucaacguggugagcaacagccugggccuggugauccugcuggugcuggcccuguucaacuga

SEQ ID NO: 4747 - RNA, 1128 nt, Artificial Sequence
  derived and/or modified CDS sequence (opt4) from Pk(UM0050C2)__AHF20664.1__CSP
augaagaacuucauccugcuggccgugagcagcauccugcugguggaccugcugcccacccacuucgagcacaacguggaccugagcagagccaucaacgugaacggcgugagcuucaacaacguggacaccagcagccugggcgccgcccaggugagacagagcgccagcagaggcagaggccugggcgagaagcccaaggagggcgccgacaaggagaagaagaaggagaagggcaaggagaaggaggaggagcccaagaagcccaacgagaacaagcugaagcagcccaacgagggccagccccaggcccagggcgacggcgccaacgccggccagccccaggcccagggcgacggcgccaacgccggccagccccaggcccagggcgacggcgccaacgccggccagccccaggcccagggcgacggcgccaacgccggccagccccaggcccagggcgacggcgccaacgccggccagccccaggcccagggcgacggcgccaacgccggccagccccaggcccagggcgacggcgccaacgccggccagccccaggcccagggcgacggcgccaacgccggccagccccaggcccagggcgacggcgccaacgccggccagccccaggcccagggcgacggcgccaacgccggccagccccaggcccagggcgacggcgccaacgccggccagccccaggcccagggcgacagagccaacgccggccagccccaggcccagggcgacggcgccaacgugcccagacagggcagaaacggcggcggcgcccccgccggcggcaacgagggcaacaagcaggccggcaagggccagggccagaacaaccagggcgccaacgcccccaacgagaagguggugaacgacuaccugcacaagaucagaagcagcgugaccaccgaguggacccccugcagcgugaccugcggcaacggcgugagaaucagaagaaaggcccacgccggcaacaagaaggccgaggaccugaccauggacgaccuggagguggaggccugcgugauggacaagugcgccggcaucuucaacguggugagcaacagccugggccuggugauccugcuggugcuggcccuguucaacuga

SEQ ID NO: 4748 - RNA, 1128 nt, Artificial Sequence
  derived and/or modified CDS sequence (opt4) from Pk(UMMK569C20)__AHF20669.1__CSP
augaagaacuucauccugcuggccgugagcagcauccugcugguggaccugcugcccacccacuucgagcacaacguggaccugagcagagccaucaacgugaacggcgugagcuucaacaacguggacaccagcagccugggcgccgcccaggugagacagagcgccagcagaggcagaggccugggcgagaagcccaaggagggcgccgacaaggagaagaagaaggagaagggcaaggagaaggaggaggagcccaagaagcccaacgagaacaagcugaagcagcccaacgagggccagccccaggcccagggcgacggcgccaacgccggccagccccaggcccagggcgacggcgccaacgccggccagccccaggcccagggcgacggcgccaacgccggccagccccaggcccagggcgacggcgccaacgccggccagccccaggccagaggcgacggcgccaacgccggccagccccaggcccagggcgacggcgccaacgccggccagccccaggcccagggcgacggcgccaacgccggccagccccaggcccagggcgacggcgccaacgccggccagccccaggcccagggcgacggcgccaacgccggccagccccaggcccagggcgacggcgccaacgccggccagccccaggcccagggcgacggcgccaacgccggccagccccaggcccagggcgacagagccaacgccggccagccccaggcccagggcgacggcgccaacgugcccagacagggcagaaacggcggcggcgcccccgccggcggcaacgagggcaacaagcaggccggcaagggccagggccagaacaaccagggcgccaacgcccccaacgagaagguggugaacgacuaccugcacaagaucagaagcagcgugaccaccgaguggacccccugcagcgugaccugcggcaacggcgugagaaucagaagaaaggcccacgccggcaacaagaaggccgaggaccugaccauggacgaccuggagguggaggccugcgugauggacaagugcgccggcaucuucaacguggugagcaacagccugggccuggugauccugcuggugcuggcccuguucaacuga

SEQ ID NO: 4749 - RNA, 1116 nt, Artificial Sequence
  derived and/or modified CDS sequence (opt4) from Pk(KH433)__ADN94489.1__CSP
augagaaacuucauccugcuggccgugagcagcauccugcugguggaccugcugcccacccacuucgagcacaacguggaccugagcagagccaucaacgugaacggcgugagcuucaacaacguggacaccagcagccugggcgccgcccaggugagacagagcgccagcagaggcagaggccugggcgagaagagaaaggagggcgccgacaaggagaagaagaaggagaaggaggaggagcccaagaagcccaacgagaacaagcugaagcagcccaaccccggccagccccaggcccagggcgacggcgccaacgccggccagccccaggcccagggcgacggcgccaacgccggccagccccaggcccagggcgacggcgccaacgccggccagccccaggcccagggcgacggcgccaacgccggccagccccaggcccagggcgacggcgccaacgccggccagccccaggcccagggcgacggcgccaacgccggccagccccaggcccagggcgacggcgccaacgccggccagccccaggcccagggcgacggcgccaacgccggccagccccaggcccagggcgacggcgccaacgccggccagccccaggcccagggcgacggcgccaacgccggccagccccaggcccagggcgacggcgccaacgccggccagccccaggcccagggcgacagagccaacgccggccagccccaggcccagggcgacggcgccaacgugcccagacagggcagaaacggcggcggcgcccccgccggcggcaacgagggcaacaagcaggccggcaagggccagggccagaacaaccagggcgccaacgcccccaacgagaagguggugaacgacuaccugcacaagaucagaagcagcgugaccaccgaguggacccccugcagcgugaccugcggcaacggcgugagaaucagaagaaaggcccacgccggcaacaagaaggccgaggaccugaccauggacgaccuggagguggaggccugcgugauggacaagugcgccggcaucuucaacguggugagcaacagccugggccuggugauccugcuggugcuggcccuguucaacuga

SEQ ID NO: 4750 - RNA, 1116 nt, Artificial Sequence
  derived and/or modified CDS sequence (opt4) from Pk(UM0034C10)__AHF20658.1__CSP
augagaaacuucauccugcuggccgugagcagcauccugcugguggaccugcugcccacccacuucgagcacaacguggaccugagcagagccaucaacgugaacggcgugagcuucaacaacguggacaccagcagccugggcgccgcccaggugagacagagcgccagcagaggcagaggccugggcgagaagagaaaggagggcgccgacaaggagaagaagaaggagaaggaggaggagcccaagaagcccaacgagaacaagcugaagcagcccaaccccgaccagccccaggcccagggcgacggcgccaacgccggccagccccaggcccagggcgacggcgccaacgccggccagccccaggcccagggcgacggcgccaacgccggccagccccaggcccagggcgacggcgccaacgccggccagccccaggcccagggcgacggcgccaacgccggccagccccaggcccagggcgacggcgccaacgccggccagccccaggcccagggcgacggcgccaacgccggccagccccaggcccagggcgacggcgccaacgccggccagccccaggcccagggcgacggcgccaacgccggccagccccaggcccagggcgacggcgccaacgccggccagccccaggcccagggcgacggcgccaacgccggccagccccaggcccagggcgacagagccaacgccggccagccccaggcccagggcgacggcgccaacgugcccagacagggcagaaacggcggcggcgcccccgccggcggcaacgagggcaacaagcaggccggcaagggccagggccagaacaaccagggcgccaacgcccccaacgagaagguggugaacgacuaccugcacaagaucagaagcagcgugaccaccgaguggacccccugcagcgugaccugcggcaacggcgugagaaucagaagaagacagaacgccggcaacaagaaggccgaggaccugaccauggacgaccuggaggccgaggccugcgugauggacaagugcgccggcaucuucaacguggugagcaacagccugggccuggugauccugcuggugcuggcccuguucaacuga

SEQ ID NO: 4751 - RNA, 1116 nt, Artificial Sequence
  derived and/or modified CDS sequence (opt4) from Pk(UM0034C6)__AHF20656.1__CSP
augagaaacuucauccugcuggccgugagcagcauccugcugguggaccugcugcccacccacuucgagcacaacguggaccugagcagagccaucaacgugaacggcgugagcuucaacaacguggacaccagcagccugggcgccgcccaggugagacagagcgccagcagaggcagaggccugggcgagaagagaaaggagggcgccgacaaggagaagaagaaggagaaggaggaggagcccaagaagcccaacgagaacaagcugaagcagcccaaccccgaccagccccaggcccagggcgacggcgccaacgccggccagccccaggcccagggcgacggcgccaacgccggccagccccaggcccagggcgacggcgccaacgccggccagccccaggcccagggcgacggcgccaacgccggccagccccaggcccagggcgacggcgccaacgccggccagccccaggcccagggcgacggcgccaacgccggccagccccaggcccagggcgacggcgccaacgccggccagccccaggcccagggcgacggcgccaacgccggccagccccaggcccagggcgacggcgccaacgccggccagccccaggcccagggcgacggcgccaacgccggccagccccaggcccagggcgacggcgccaacgccggccagccccaggcccagggcgacagagccaacgccggccagccccaggcccagggcgacggcgccaacgugcccagacagggcagaaacggcggcggcgcccccgccggcggcaacgagggcaacaagcaggccggcaagggccagggccagaacaaccagggcgccaacgcccccaacgagaagguggugaacgacuaccugcacaagaucagaagcagcgugaccaccgaguggacccccugcagcgugaccugcggcaacggcgugagaaucagaagaaaggcccacgccggcaacaagaaggccgaggaccugaccauggacgaccuggagguggaggccugcgugauggacaagugcgccggcaucuucaacguggugagcaacagccugggccuggugauccugcuggugcuggcccuguucaacuga

SEQ ID NO: 4752 - RNA, 1107 nt, Artificial Sequence
  derived and/or modified CDS sequence (opt4) from Pk(SGEHIWM16-Y09-85)__AFD97232.1__CSP
augaagaacuucauccugcuggccgugagcagcauccugcugguggaccugcugcccaccuacuucgagcacaacguggaccugagcagagccaucaacgugaacggcgugagcuucaacagcguggacaccagcagccugggcgccgcccaggugagacagagcgccagcagaggcagaggccugggcgagaagcccaaggagggcgccgacaaggagaagaagaaggagaaggagaaggaggaggagcccaagaagcccaacgagaacaagcugaagcagccccagggcaacggcggcgccggccaggcccagcccgagggcaacggcggcgccggccaggcccagcccgagggcaacggcggcgccggccaggcccagcccgagggcaacggcggcgccggccaggcccagcccgagggcaacggcggcgccggccaggcccagcccgagggcaacggcggcgccggccaggcccagcccgagggcaacggcggcgccggccaggcccagcccgagggcaacggcggcgccggccaggcccagcccgagggcaacggcggcgccggccaggcccagcccgagggcaacggcggcgccggccaggcccagccccagggcaacggcggcgccggccaggcccagccccagggcaacggcggcgccggccaggcccagccccagggcaacggcggcgccggccaggcccagcccgagggcaacagagaggcccccgcccagccccagggcaacggcggcgccggccaggcccagccccagaagaacgagggcggcaacgccggcgccagaaagggccagggccagaacaaccagggcgccaacgcccccaacgagaagguggugaacgacuaccugcagaagaucagaagcagcgugaccaccgaguggacccccugcagcgugaccugcggcaacggcgugagaaucagaagaagagcccacgccgacaagaagaaggccgaggaccugaccauggacgaccuggagguggaggccugcgugauggacaagugcgccggcaucuucaacguggugagcaacagccugggccuggugauccugcuggugcuggcccuguucaacuga

SEQ ID NO: 4753 - RNA, 1107 nt, Artificial Sequence
  derived and/or modified CDS sequence (opt4) from Pk(SGEHIWM4-Y09-13)__AFD97225.1__CSP
augaagaacuucauccugcuggccgugagcagcauccugcugguggaccugcugcccaccuacuucgagcacaacguggaccugagcagagccaucaacgugaacggcgugagcuucaacagcguggacaccagcagccugggcgccgcccaggugagacagagcgccagcagaggcagaggccugggcgagaagcccaaggagggcgccgacaaggagaagaagaaggagaaggagaaggaggaggagcccaagaagcccaacgagaacaagcugaagcagccccagggcaacggcggcgccggccaggcccagcccgagggcaacggcggcgccggccaggcccagcccgagggcaacggcggcgccggccaggcccagcccgagggcaacggcggcgccggccaggcccagcccgagggcaacggcggcgccggccaggcccagcccgagggcaacggcggcgccggccaggcccagcccgagggcaacggcggcgccggccaggcccagcccgagggcaacggcggcgccggccaggcccagcccgagggcaacggcggcgccggccaggcccagcccgagggcaacggcggcgccggccaggcccagccccagggcaacggcggcgccggccaggcccagccccagggcaacggcggcgccggccaggcccagccccagggcaacggcggcgccggccaggcccagcccgagggcaacagagaggcccccgcccagccccagggcaacggcggcgccggccaggcccagccccagaagaacgagggcggcaacgccggcgccagaaagggccagggccagaacaaccagggcgccaacgcccccaacgagaagguggugaacgacuaccugcagaagaucagaagcagcgugaccaccgaguggacccccugcagcgugaccugcggcaacggcgugagaaucagaagaagagcccacgccgacaagaagaaggccgaggaccugaccguggacgaccuggagguggaggccugcgugauggacaagugcgccggcaucuucaacguggugagcaacagccugggccuggugauccugcuggugcuggcccuguucaacuga

SEQ ID NO: 4754 - RNA, 1104 nt, Artificial Sequence
  derived and/or modified CDS sequence (opt4) from Pk(KH58)__ADN94493.1__CSP
augaagaacuucauccugcuggccgugagcagcauccugcugguggaccugcugcccacccacuucgagcacaacguggaccugagcagagccaucaacaucaacggcgugagcuucaacaacguggacaccagcagccugggcgccgcccaggugagacagagcgccagcagaggcagaggccugggcgagaagcccaaggagggcgccgacaaggagaagaagaaggagaaggagaaggaggaggagcccaagaagcccaacgagaacaagcugaagcagcccaacgccgagggcgacggcgccaacgccagacagcccaacgccgagggcgacggcgccaacgccagacagcccaacgccgagggcgacggcgccaacgccagacagcccaacgccgagggcgacggcgccaacgccagacagcccaacgccgagggcgacggcgccaacgccagacagcccaacgccgagggcgacggcgccaacgccagacagcccaacgccgagggcgacggcgccaacgccagacagcccaacgccgagggcgacggcgccaacgccagacagcccaacgccgagggcgacggcgccaacgccagacagcccaacgccgagggcgacggcgccaacgccagacagcccaacgccgagggcggcggcgccaacgccagacagcccaacgccgagggcgacggcgccaacgccagacagccccaggcccagggcgacggcggcaacgccagacagggcggcaacggcggcggcgcccccgccggcggcaacgagggcaacaagcaggccggcaagggccagggccagaacaaccagggcgccaacgcccccaacgagaagguggugaacgacuaccugcagaagaucagaagcagcgugaccaccgaguggacccccugcagcgugaccugcggcaacggcgugagaaucagaagaagagcccacgccgacaagaagaaggccgaggaccugaccauggacgaccuggagguggaggccugcgugauggacaagugcgccggcaucuucaacguggugagcaacagccugggccuggugauccugcuggugcuggcccuguucaacuga

SEQ ID NO: 4755 - RNA, 1104 nt, Artificial Sequence
  derived and/or modified CDS sequence (opt4) from Pk(UM0029C8)__AHF20651.1__CSP
augaagaacuucauccugcuggccgugagcagcauccugcugguggaccugcugcccacccacuucgagcacaacguggaccugagcagagccaucaacgugaacggcgugagcuucaacaacguggacaccagcagccugggcgccgcccaggugagacagagcgccagcagaggcagaggccugggcgagaagcccaaggagggcgccgacaaggagaagaagaaggagaaggagaaggagaaggaggaggagcccaagaagcccaacgagaacaagcugaagcagcccgagcagcccgccgccggcgccggcggcgagcagcccgccgccggcgccggcggcgagcagcccgccgccggcgccggcggcgagcagcccgccgccggcgccggcggcgagcagcccgccgccggcgccagaggcgagcagcccgccgccggcgccggcggcgagcagcccgccgccggcgccagaggcgagcagcccgccgccggcgccggcggcgagcagcccgccgccggcgccggcggcgagcagcccgccgccggcgccggcggcgagcagcccgccgccggcggcgagcagcccgccgccggcgccggcggcgagcagcccgccgccggcgccagaggcgagcagcccgccgccggcgccggcggcgagcagcccgcccccgcccccagaagagagcagcccgccgccggcgccggcggcgagcagcccgcccccgcccccagaagagagcagcccgcccccggcgccggcgccggcgacggcgccagaggcggcaacgccggcgccggcaagggccagggccagaacaaccagggcgccaacgugcccaacgagaagguggugaacgacuaccugcacaagaucagaagcagcgugaccaccgaguggacccccugcagcgugaccugcggcaacggcgugagaaucagaagaaagggccacgccggcaacaagaaggccgaggaccugaccauggacgaccuggagguggaggccugcgugauggacaagugcgccggcaucuucaacguggugagcaacagccugggccuggugauccugcuggugcuggcccuguucaacuga

SEQ ID NO: 4756 - RNA, 1104 nt, Artificial Sequence
  derived and/or modified CDS sequence (opt4) from Pk(UM0032C8)__AHF20655.1__CSP
augaagaacuucauccugcuggccgugagcagcauccugcugguggaccugcugcccacccacuucgagcacaacguggaccugagcagagccaucaacgugaacggcgugagcuucaacaacguggacaccagcagccugggcgccgcccaggugagacagagcgccagcagaggcagaggccugggcgagaagcccaaggagggcgccgacaaggagaagaagaaggagaaggagaaggaggaggagcccaagaagcccaacgagaacaagcugaagcagcccaacgccgagggcgacggcgccaacgccagacagcccaacgccgagggcgacggcgccaacgccagacagcccaacgccgagggcgacggcgccaacgccagacagcccaacgccgagggcgacggcgccaacgccagacagcccaacgccgagggcgacggcgccaacgccagacagcccaacgccgagggcgacggcgccaacgccagacagcccaacgccgagggcaacggcgccaacgccagacagcccaacgccgagggcggcggcgccaacgccagacagcccaacgccgagggcgacggcgccaacgccagacagcccaacgccgagggcgacggcgccaacgccagacagcccaacgccgagggcggcggcgccaacgccagacagccccaggccgagggcgacggcgccaacgccagacagccccaggcccagggcgacggcggcaacgccagacagggcggcaacggcggcggcgcccccgccggcggcaacgagggcaacaagcaggccggcaagggccagggccagaacaaccagggcgccaacgcccccaacgagaagguggugaacgacuaccugcagaagaucagaagcagcgugaccaccgaguggacccccugcagcgugaccugcggcaacggcgugagaaucagaagaagagcccacgccgacaagaagaaggccgaggaccugaccauggacgaccuggagguggaggccugcgugauggacaagugcgccggcaucuucaacguggugagcaacagccugggcuucgugauccugcuggugcuggcccuguucaacuga

SEQ ID NO: 4757 - RNA, 1101 nt, Artificial Sequence
  derived and/or modified CDS sequence (opt4) from Pk(LT22)__ADN94538.1__CSP
augagaaacuucauccugcuggccgugagcagcauccugcugguggaccugcugcccacccacuucgagcacaacguggaccugagcagagccaucaacgugaacggcgugagcuucaacaacguggacaccagcagccugggcgccgcccaggugagacagagcgccagcagaggcagaggccugggcgagaagagaaaggagggcgccgacaaggagaagaagaaggagaaggaggaggagcccaagaagcccaacgagaacaagcugaagcagcccaacgccgagggcggcgccaacgccggccagcccaacgccgagggcggcgccaacgccggccagcccaacgccgagggcggcgccaacgccggccagcccaacgccgagggcggcgccaacgccggccagcccaacgccgagggcggcgccaacgccggccagcccaacgccgagggcggcgccaacgccggccagcccaacgccgagggcggcgccaacgccggccagcccaacgccgagggcggcgccaacgccggccagcccaacgccgagggcggcgccaacgccggccagcccaacgccgagggcggcgccaacgccggccagcccaacgccgagggcggcgccaacgccagacagcccaacgccgagggcggcgccaacgccggccagcccaacgccgagggcggcgccaacgccggccagcccaacgccgagggcggcgccaacgccagacagccccaggccgagggcggcggcgccaacgccagacagggcggcaacgagggcaacaagcaggccggcaagggccagggccagaacaaccagggcgccaacgcccccaacgagaagguggugaacgacuaccugcagaagaucagaagcagcgugaccaccgaguggacccccugcagcgugaccugcggcaacggcgugagaaucagaagaagagcccacgccgacaagaagaaggccgaggaccugaccauggacgaccuggagguggaggccugcgugauggacaagugcgccggcaucuucaacguggugagcaacagccugggccuggugauccugcuggugcuggcccuguucaacuga

SEQ ID NO: 4758 - RNA, 1101 nt, Artificial Sequence
  derived and/or modified CDS sequence (opt4) from Pk(LT26)__ADN94539.1__CSP
augagaaacuucauccugcuggccgugagcagcauccugcugguggaccugcugcccacccacuucgagcacaacguggaccugagcagagccaucaacgugaacggcgugagcuucaacaacguggacaccagcagccugggcgccgcccaggugagacagagcgccagcagaggcagaggccugggcgagaagagaaaggagggcgccgacaaggagaagaagaaggagaaggaggaggagcccaagaagcccaacgagaacaagcugaagcagcccaacgccgagggcggcgccaacgccggccagcccaacgccgagggcggcgccaacgccggccagcccaacgccgagggcggcgccaacgccggccagcccaacgccgagggcggcgccaacgccggccagcccaacgccgagggcggcgccaacgccggccagcccaacgccgagggcggcgccaacgccggccagcccaacgccgagggcggcgccaacgccggccagcccaacgccgagggcggcgccaacgccagacagcccaacgccgagggcggcgccaacgccggccagcccaacgccgagggcggcgccaacgccggccagcccaacgccgagggcggcgccaacgccggccagcccaacgccgagggcggcgccaacgccggccagcccaacgccgagggcggcgccaacgccggccagcccaacgccgagggcggcgccaacgccagacagccccaggccgagggcggcggcgccaacgccagacagggcggcaacgagggcaacaagcaggccggcaagggccagggccagaacaaccagggcgccaacgcccccaacgagaagguggugaacgacuaccugcagaagaucagaagcagcgugaccaccgaguggacccccugcagcgugaccugcggcaacggcgugagaaucagaagaagagcccacgccgacaagaagaaggccgaggaccugaccauggacgaccuggagguggaggccugcgugauggacaagugcgccggcaucuucaacguggugagcaacagccugggccuggugauccugcuggugcuggcccuguucaacuga

SEQ ID NO: 4759 - RNA, 1101 nt, Artificial Sequence
  derived and/or modified CDS sequence (opt4) from Pk(TB013)__AFG25472.1__CSP
augagaaacuucauccugcuggccgugagcagcauccugcugguggaccugcugcccacccacuucgagcacaacguggaccugagcagagccaucaacgugaacggcgugagcuucaacaacguggacaccagcagccugggcgccgcccaggugagacagagcgccggcagaggcagaggccugggcgagaagagaaaggagggcgccgacaaggagaagaagaaggagaaggaggaggagcccaagaagcccaacgagaacaagcugaagcagcccaacgccgagggcggcgccaacgccggccagcccaacgccgagggcggcgccaacgccggccagcccaacgccgagggcggcgccaacgccggccagcccaacgccgagggcggcgccaacgccggccagcccaacgccgagggcggcgccaacgccggccagcccaacgccgagggcggcgccaacgccggccagcccaacgccgagggcggcgccaacgccggccagcccaacgccgagggcggcgccaacgccggccagcccaacgccgagggcggcgccaacgccggccagcccaacgccgagggcggcgccaacgccagacagcccaacgccgagggcggcgccaacgccagacagcccaacgccgagggcggcgccaacgccggccagcccaacgccgagggcggcgccaacgccggccagcccaacgccgagggcggcgccaacgccagacagccccaggccgagggcggcggcgccaacgccagacagggcggcaacgagggcaacaagcaggccggcaagggccagggccagaacaaccagggcgccaacgcccccaacgagaagguggugaacgacuaccugcagaagaucagaagcagcgugaccaccgaguggacccccugcagcgugaccugcggcaacggcgugagaaucagaagaagagcccacgccgacaagaagaaggccgaggaccugaccauggacgaccuggagguggaggccugcgugauggacaagugcgccggcaucuucaacguggugagcaacagccugggccuggugauccugcuggugcuggcccuguucaacuga

SEQ ID NO: 4760 - RNA, 1101 nt, Artificial Sequence
  derived and/or modified CDS sequence (opt4) from Pk(TB049)__AFG25474.1__CSP
augagaaacuucauccugcuggccgugagcagcauccugcugguggaccugcugcccacccacuucgagcacaacguggaccugagcagagccaucaacgugaacggcgugagcuucaacaacguggacaccagcagccugggcgccgcccaggugagacagagcgccagcagaggcagaggccugggcgagaagagaaaggagggcgccgacaaggagaagaagaaggagaaggaggaggagcccaagaagcccaacgagaacaagcugaagcagcccaacgccgagggcggcgccaacgccggccagcccaacgccgagggcggcgccaacgccggccagcccaacgccgagggcggcgccaacgccggccagcccaacgccgagggcggcgccaacgccggccagcccaacgccgagggcggcgccaacgccggccagcccaacgccgagggcggcgccaacgccggccagcccaacgccgagggcggcgccaacgccggccagcccaacgccgagggcggcgccaacgccagacagcccaacgccgagggcggcgccaacgccggccagcccaacgccgagggcggcgccaacgccggccagcccaacgccgagggcggcgccaacgccagacagcccaacgccgagggcggcgccaacgccagacagcccaacgccgagggcggcgccaacgccggccagcccaacgccgagggcggcgccaacgccagacagccccaggccgagggcggcggcgccaacgccagacagggcggcaacgagggcaacaagcaggccggcaagggccagggccagaacaaccagggcgccaacgcccccaacgagaagguggugaacgacuaccugcagaagaucagaagcagcgugaccaccgaguggacccccugcagcgugaccugcggcaacggcgugagaaucagaagaagagcccacgccgacaagaagaaggccgaggaccugaccauggacgaccuggagguggaggccugcgugauggacaagugcgccggcaucuucaacguggugagcaacagccugggccuggugauccugcuggugcuggcccuguucaacuga

SEQ ID NO: 4761 - RNA, 1101 nt, Artificial Sequence
  derived and/or modified CDS sequence (opt4) from Pk(TN024)__AFG25479.1__CSP
augagaaacuucauccugcuggccgugagcagcauccugcugguggaccugcugcccacccacuucgagcacaacguggaccugagcagagccaucaacgugaacggcgugagcuucaacaacguggacaccagcagccugggcgccgcccaggugagacagagcgccagcagaggcagaggccugggcgagagaagaaaggagggcgccgacaaggagaagaagaaggagaaggaggaggagcccaagaagcccaacgagaacaagcugaagcagcccaacgccgagggcggcgccaacgccggccagcccaacgccgagggcggcgccaacgccggccagcccaacgccgagggcggcgccaacgccggccagcccaacgccgagggcggcgccaacgccggccagcccaacgccgagggcggcgccaacgccggccagcccaacgccgagggcggcgccaacgccggccagcccaacgccgagggcggcgccaacgccggccagcccaacgccgagggcggcgccaacgccagacagcccaacgccgagggcggcgccaacgccggccagcccaacgccgagggcggcgccaacgccggccagcccaacgccgagggcggcgccaacgccagacagcccaacgccgagggcggcgccaacgccagacagcccaacgccgagggcggcgccaacgccggccagcccaacgccgagggcggcgccaacgccagacagccccaggccgagggcggcggcgccaacgccagacagggcggcaacgagggcaacaagcaggccggcaagggccagggccagaacaaccagggcgccaacgcccccaacgagaagguggugaacgacuaccugcagaagaucagaagcagcgugaccaccgaguggacccccugcagcgugaccugcggcaacggcgugagaaucagaagaagagcccacgccgacaagaagaaggccgaggaccugaccauggacgaccuggagguggaggccugcgugauggacaagugcgccggcaucuucaacguggugagcaacagccugggccuggugauccugcuggugcuggcccuguucaacuga

SEQ ID NO: 4762 - RNA, 1095 nt, Artificial Sequence
  derived and/or modified CDS sequence (opt4) from Pk(KH369)__ADN94494.1__CSP
augaagaacuucauccugcuggccgugagcagcauccugcugguggaccuguuccccacccacuucgagcacaacguggaccugagcagagccaucaacgugaacggcgugagcuucaacaacguggacaccagcagccugggcgccgcccaggugagacagagcgccagcagaggcagaggccugggcgagaagcccaaggagggcgccgacaaggagaagaagaaggagaaggaggagcccaagaagcccaacgagaacaagcugaagcagccccaggccgagggcgacggcgccaacgccagacagccccaggccgagggcgacggcgccaacgccagacagccccaggccgagggcgacggcgccaacgccagacagccccaggccgagggcgacggcgccaacgccagacagccccaggccgagggcgacggcgccaacgccagacagccccaggccgagggcgacggcgccaacgccagacagccccaggccgagggcgacggcgccaacgccagacagccccaggccgagggcgacggcgccaacgccagacagccccaggccgagggcgacggcgccaacgccagacagccccaggccgagggcgacggcgccaacgccagacagccccaggccgagggcggcggcgccaacgccagacagccccaggccgagggcgacggcgccaacgccagacagccccaggcccagggcgacggcggcaacgccagacagggcggcaacggcggcggcgcccccgccggcggcaacgagggcaacaagcaggccggcaagggccagggccagaacaaccagggcgccaacgcccccaacgagaagguggugaacgacuaccugcagaagaucagaagcagcgugaccaccgaguggacccccugcagcgugaccugcggcaacggcgugagaaucagaagaagagcccacgccgacaagaagaaggccgaggaccugaccauggacgaccuggagguggaggccugcgugauggacaagugcgccggcaucuucaacguggugagcaacagccugggccuggugauccugcuggugcuggcccuguucaacuga

SEQ ID NO: 4763 - RNA, 1095 nt, Artificial Sequence
  derived and/or modified CDS sequence (opt4) from Pk(LT48)__ADN94507.1__CSP
augaagaacuucauccugcuggccgugagcagcauccugcugguggaccugcugcccacccacuucgagcacaacguggaccugagcagagccaucaacaucaacggcgugagcuucaacaacguggacaccagcagccugggcgccgcccaggugagacagagcgccagcagaggcagaggccugggcgagaagcccaaggagggcgccgacaaggagaagaagaaggagaaggaggagcccaagaagcccaacgagaacaagcugaagcagccccaggccgagggcgacggcgccaacgccagacagccccaggccgagggcgacggcgccaacgccagacagccccaggccgagggcgacggcgccaacgccagacagccccaggccgagggcgacggcgccaacgccagacagccccaggccgagggcgacggcgccaacgccagacagccccaggccgagggcgacggcgccaacgccagacagccccaggccgagggcgacggcgccaacgccagacagccccaggccgagggcgacggcgccaacgccagacagccccaggccgagggcgacggcgccaacgccagacagccccaggccgagggcgacggcgccaacgccagacagccccaggccgagggcggcggcgccaacgccagacagccccaggccgagggcgacggcgccaacgccagacagccccaggcccagggcgacggcggcaacgccagacagggcggcaacggcggcggcgcccccgccggcggcaacgagggcaacaagcaggccggcaagggccagggccagaacaaccagggcgccaacgcccccaacgagaagguggugaacgacuaccugcagaagaucagaagcagcgugaccaccgaguggacccccugcagcgugaccugcggcaacggcgugagaaucagaagaagagcccacgccgacaagaagaaggccgaggaccugaccauggacgaccuggagguggaggccugcgugauggacaagugcgccggcaucuucaacguggugagcaacagccugggccuggugauccugcuggugcuggcccuguucaacuga

SEQ ID NO: 4764 - RNA, 1092 nt, Artificial Sequence
  derived and/or modified CDS sequence (opt4) from Pk(LT22)__ADN94522.1__CSP
augagaaacuucauccugcuggccgugagcagcauccugcugguggaccugcugcccacccacuucgagcacaacguggaccugagcagagccaucaacgugaacggcgugagcuucaacaacguggacaccagcagccugggcgccgcccaggugagacagagcgccagcagaggcagaggccugggcgagaagagaaaggagggcgccgacaaggagaagaagaaggagaaggaggaggagcccaagaagcccaacgagaacaagcugaagcagcccgaccaggccggccccggcggcgagcaggccggccccggcggcgagcaggccggccccggcggcgagcaggccggccccagacccggcggcgagcaggccggccccggcggcgagcaggccggccccagacccggcggcgagcaggccggccccggcggcgagcaggccggccccagacccggcggcgagcaggccggccccggcggcgagcaggccggccccggcggcgagcaggccggccccagacccggcggcgagcaggccggccccggcggcgagcaggccggccccagacccggcggcgagcaggccggccccggcggcgagcaggccggccccagacccggcggcgagcaggccggccccggcggcgagcagcccgcccccagacccggcggcgagcagcccgcccccgcccccagaagagagcagcccgcccccgcccccggcggcgagcagcccgcccccggcgccggcgccggcgacggcgccagaggcggcaaccccggcgccggcaagggccagggccagaacaaccagggcgccaacgugcccaacgagaagguggugaacgacuaccugcacaagaucagaagcagcgugaccaccgaguggacccccugcagcgugaccugcggcaacggcgugagaaucagaagaagacagaacgccggcaacaagaaggccgaggaccugaccauggacgaccuggagguggaggccugcgugauggacaagugcgccggcaucuucaacguggugagcaacagccugggccuggugauccugcuggugcuggcccuguucaacuga

SEQ ID NO: 4765 - RNA, 1092 nt, Artificial Sequence
  derived and/or modified CDS sequence (opt4) from Pk(UM0020C1)__AHF20649.1__CSP
augaagaacuucauccugcuggccgugagcagcauccugcugguggaccugcugcccacccacuucgagcacaacguggaccugagcagagccaucaacgugaacggcgugagcuucaacaacguggacaccagcagccugggcgccagccaggugagacagagcgccagcagaggcagaggccugggcgagaagcccaaggagggcgccgacaaggagaagaagaaggagaagggcaaggagaaggaggaggagcccaagaagcccaacgagaacaagcugaagcagcccaacgagggccagccccaggcccagggcgacggcgccaacgccggccagccccaggcccagggcgacggcgccaacgccggccagccccaggcccagggcgacggcgccaacgccggccagccccaggcccagggcgacggcgccaacgccggccagccccaggcccagggcgacggcgccaacgccggccagccccaggcccagggcgacggcgccaacgccggccagccccaggcccagggcgacggcgccaacgccggccagccccaggcccagggcgacggcgccaacgccggccagccccaggcccagggcgacggcgccaacgccggccagccccaggcccagggcgacggcgccaacgccggccagccccaggcccagggcgacagagccaacgccggccagccccaggcccagggcgacggcgccaacgugcccagacagggcagaaacggcggcggcgcccccgccggcggcaacgagggcaacaagcaggccggcaagggccagggccagaacaaccagggcgccaacgcccccaacgagaagguggugaacgacuaccugcacaagaucagaagcagcgugaccaccgaguggacccccugcagcgugaccugcggcaacggcgugagaaucagaagaagacagaacgccggcaacaagaaggccgaggaccugaccauggacgaccuggagguggaggccugcgugauggacaagugcgccggcaucuucaacguggugagcaacagccugggccuggugauccugcuggugcuggcccuguucaacuga

SEQ ID NO: 4766 - RNA, 1092 nt, Artificial Sequence
  derived and/or modified CDS sequence (opt4) from Pk(UM0020C3)__AHF20650.1__CSP
augaagaacuucauccugcuggccgugagcagcauccugcugguggaccugcugcccacccacuucgagcacaacguggaccugagcagagccaucaacgugaacggcgugggcuucaacaacguggacaccagcagccugggcgccagccaggugagacagagcgccagcagaggcagaggccugggcgagaagcccaaggagggcgccgacaaggagaagaagaaggagaagggcaaggagaaggaggaggagcccaagaagcccaacgagaacaagcugaagcagcccaacgagggccagccccaggcccagggcgacggcgccaacgccggccagccccaggcccagggcgacggcgccaacgccggccagccccaggcccagggcgacggcgccaacgccggccagccccaggcccagggcgacggcgccaacgccggccagccccaggcccagggcgacggcgccaacgccggccagccccaggcccagggcgacggcgccaacgccggccagccccaggcccagggcgacggcgccaacgccggccagccccaggcccagggcgacggcgccaacgccggccagccccaggcccagggcgacggcgccaacgccggccagccccaggcccagggcgacggcgccaacgccggccagccccaggcccagggcgacagagccaacgccggccagccccaggcccagggcgacggcgccaacgugcccagacagggcagaaacggcggcggcgcccccgccggcggcaacgagggcaacaagcaggccggcaagggccagggccagaacaaccagggcgccaacgcccccaacgagaagguggugaacgacuaccugcacaagaucagaagcagcgugaccaccgaguggacccccugcagcgugaccugcggcaacggcgugagaaucagaagaaaggcccacgccggcaacaagaaggccgaggaccugaccauggacgaccuggagguggaggccugcgugauggacaagugcgccggcaucuucaacguggugagcaacagccugggccuggugauccugcuggugcuggcccuguucaacuga

SEQ ID NO: 4767 - RNA, 1092 nt, Artificial Sequence
  derived and/or modified CDS sequence (opt4) from Pk(UM0021C19)__AHF20668.1__CSP
augagaaacuucauccugcuggccgugagcagcauccugcugguggaccuguuccccacccacuucgagcacaacguggaccugagcagagccaucaacgugaacggcgugagcuucaacaacguggacaccagcagccugggcgccgcccaggugagacagagcgccagcagaggcagaggccugggcgagaagagaaaggagggcgccgacaaggagaagaagaaggagaaggaggaggagcccaagaagcccaacgagaacaagcugaagcagcccgaccaggccggccccggcggcgagcaggccggccccggcggcgagcaggccggccccggcggcgagcaggccggccccggcggcgagcaggccggccccagacccggcggcgagcaggccggccccggcggcgagcaggccggccccagacccggcggcgagcaggccggccccagacccggcggcgagcaggccggccccagacccggcggcgagcaggccggccccggcggcgagcaggccggccccggcggcgagcaggccggccccggcggcgagcaggccggccccagacccggcggcgagcaggccggccccggcggcgagcaggccggccccagacccggcggcgagcaggccggccccggcggcgagcagcccgcccccagacccggcggcgagcagcccgcccccgcccccagaagagagcagcccgcccccggccccggcggcgagcagcccgcccccggcgccggcgccggcgacggcgccagaggcggcaaccccggcgccggcaagggccagggccagaacaaccagggcgccaacgugcccaacgagaagguggugaacgacuaccugcacaagaucagaagcagcgugaccaccgaguggacccccugcagcgugaccugcggcaacggcgugagaaucagaagaagacagaacgccggcaacaagaaggccgaggaccugaccauggacgaccuggagguggaggccugcgugauggacaagugcgccggcaucuucaacguggugagcaacagccugggccuggugacccugcuggugcuggcccuguucaacuga

SEQ ID NO: 4768 - RNA, 1092 nt, Artificial Sequence
  derived and/or modified CDS sequence (opt4) from Pk(UMGAC7)__AHF20617.1__CSP
augaagaacuucauccugcuggccgugagcagcauccugcugguggaccugcugcccacccacuucgagcacaacguggaccugagcagagccaucaacgugaacggcgugagcuucaacaacguggacaccagcagccugggcgccgcccaggugagacagagcgccagcagaggcagaggccugggcgagaagcccaaggagggcgccgacaaggagaagaagaaggagaagggcaaggagaaggaggaggagcccaagaagcccaacgagaacaagcugaagcagcccaacgagggccagccccaggcccagggcgacggcgccaacgccggccagccccaggcccagggcgacggcgccaacgccggccagccccaggcccagggcgacggcgccaacgccggccagccccaggcccagggcgacggcgccaacgccggccagccccaggcccagggcgacggcgccaacgccggccagccccaggcccagggcgacggcgccaacgccggccagccccaggcccagggcgacggcgccaacgccggccagccccaggcccagggcgacggcgccaacgccggccagccccaggcccagggcgacggcgccaacgccggccagccccaggcccagggcgacggcgccaacgccggccagccccaggcccagggcgacagagccaacgccggccagccccaggcccagggcgacggcgccaacgugcccagacagggcagaaacggcggcggcgcccccgccggcggcaacgagggcaacaagcaggccggcaagggccagggccagaacaaccagggcgccaacgcccccaacgagaagguggugaacgacuaccugcacaagaucagaagcagcgugaccaccgaguggacccccugcagcgugaccugcggcaacggcgugagaaucagaagaaaggcccacgccggcaacaagaaggccgaggaccugaccauggacgaccuggagguggaggccugcgugauggacaagugcgccggcaucuucaacguggugagcaacagccugggccuggugauccugcuggugcccgcccuguucaacuga

SEQ ID NO: 4769 - RNA, 1092 nt, Artificial Sequence
  derived and/or modified CDS sequence (opt4) from Pk(UMMK566C6)__AHF20670.1__CSP
augaagaacuucauccugcuggccgugagcagcauccugcugguggaccugcugcccacccacuucgagcacaacguggaccugagcagagccaucaacgugaacggcgugagcuucaacaacguggacaccagcagccugggcgccgcccaggugagacagagcgccagcagaggcagaggccugggcgagaagcccaaggagggcgccgacaaggagaagaagaaggagaagggcaaggagaaggagggcgagcccaagaagcccaacgagaacaagcugaagcagcccaacgagggccagccccaggcccagggcgacggcgccaacgccggccagccccaggcccagggcgacggcgccaacgccggccagccccaggcccagggcgacggcgccaacgccggccagccccaggcccagggcgacggcgccaacgccggccagccccaggcccagggcgacggcgccaacgccggccagccccaggcccagggcgacggcgccaacgccggccagccccaggcccagggcgacggcgccaacgccggccagccccaggcccagggcgacggcgccaacgccggccagccccaggcccagggcgacggcgccaacgccggccagccccaggcccagggcgacggcgccaacgccggccagccccaggcccagggcgacagagccaacgccggccagccccaggcccagggcgacggcgccaacgugcccagacagggcagaaacggcggcggcgcccccgccggcggcaacgagggcaacaagcaggccggcaagggccagggccagaacaaccagggcgccaacgcccccaacgagaagguggugaacgacuaccugcacaagaucagaagcagcgugaccaccgaguggacccccugcagcgugaccugcggcaacggcgugagaaucagaagaaaggcccacgccggcaacaagaaggccgaggaccugaccauggacgaccuggagguggaggccugcgugauggacaagugcgccggcaucuucaacguggugagcaacagccugggccuggugauccugcuggugcuggcccuguucaacuga

SEQ ID NO: 4770 - RNA, 1089 nt, Artificial Sequence
  derived and/or modified CDS sequence (opt4) from Pk(UMGAC1)__AHF20615.1__CSP
augaagaacuucauccugcuggccgugagcagcauccugcugguggaccugcugcccacccacuucgagcacaacguggaccugagcagagccaucaacgugaacggcgugagcuucaacaacguggacaccagcagccugggcgccgcccaggugagacagagcgccagcagaggcagaggccugggcgagaagcccaaggagggcgccgacaaggagaagaagaaggagaagggcaaggagaaggaggagcccaagaagcccaacgagaacaagcugaagcagcccaacgagggccagccccaggcccagggcgacggcgccaacgccggccagccccaggcccagggcgacggcgccaacgccggccagccccaggcccagggcgacggcgccaacgccggccagccccaggcccagggcgacggcgccaacgccggccagccccaggcccagggcgacggcgccaacgccggccagcccagagcccagggcgacggcgccaacgccggccagccccaggcccagggcgacggcgccaacgccggccagccccaggcccagggcgacggcgccaacgccggccagccccaggcccagggcgacggcgccaacgccggccagccccaggcccagggcgacggcgccaacgccggccagccccaggcccagggcgacagagccaacgccggccagccccaggcccagggcgacggcgccaacgugcccagacagggcagaaacggcggcggcgcccccgccggcggcaacgagggcaacaagcaggccggcaagggccagggccagaacaaccagggcgccaacgcccccaacgagaagguggugaacgacuaccugcacaagaucagaagcagcgugaccaccgaguggacccccugcagcgugaccugcggcaacggcgugagaaucagaagaaaggcccacgccggcaacaagaaggccgaggaccugaccauggacgaccuggagguggaggccugcgugauggacaagugcgccggcaucuucaacguggugagcaacagccugggccuggugauccugcuggugcuggcccuguucaacuga

SEQ ID NO: 4771 - RNA, 1086 nt, Artificial Sequence
  derived and/or modified CDS sequence (opt4) from Pk(NB032)__AFG25470.1__CSP
augaagaacuucauccugcuggccgugagcagcauccugcugguggaccuguuccccacccacuucgagcacaacguggaccugagcagagccaucaacgugaacggcgugagcuucaacaacguggacaccagcagccugggcgccgcccaggugagacagagcgccagcagaggcagaggccugggcgagaagcccaaggagggcgccgacaaggagaagaagaaggagaaggagaaggagaaggagaaggaggaggagcccaagaagcccaacgagaacaagcugaagcagcccgagggcaaccaggacggcagagcccagcccgagggcaaccaggacggcagagcccagcccgagggcaaccaggacggcagagcccagcccgagggcaaccaggacggcagagcccagcccgagggcaaccaggacggcagagcccagcccgagggcaaccaggacggcagagcccagcccgagggcaaccaggacggcagagcccagcccgagggcaaccaggacggcagagcccagcccgagggcaaccaggacggcagagcccagcccgagggcaacagagaggcccccgcccagccccagggcaacggcggcgccggccaggcccagcccgagggcaacagagaggcccccgcccagccccagggcaacggcggcgccggccaggcccagcccgagggcaacagagaggcccccgcccagccccagggcaacggcggcgccggccaggcccagccccagaagaacgagggcggcaacgccggcgccagaaagggccagggccagaacaaccagggcgccaacgcccccaacgagaagguggugaacgacuaccugcacaagaucagaagcagcgugaccaccgaguggacccccugcagcgugaccugcggcaacggcgugagaaucagaagaaaggcccacgccgacaagaagaaggccgaggaccugaccauggacgaccuggagguggaggccugcgugauggacaagugcgccggcaucuucaacguggugagcaacagccugggccuggugauccugcuggugcuggcccuguucaacuga

SEQ ID NO: 4772 - RNA, 1083 nt, Artificial Sequence
  derived and/or modified CDS sequence (opt4) from Pk(UM002C4)__AHF20639.1__CSP
augaagaacuucauccugcuggccgugagcagcauccugcugguggaccugcugcccaccuacuucgagcacaacguggaccugagcagagccaucaacgugaacggcgugagcuucaacaacguggacaccagcagccugggcgccgcccaggugagacagagcgccagcagaggcagaggccugggcgagaagcccaaggagggcgccgacaaggagaagaagaaggagaaggagaaggagaaggaggaggagcccaagaagcccaacgagaacaagcugaagcagcccgagggcaacggcggcgccggccccgcccagcccgagggcaacggcggcgccggccccgcccagcccgagggcaacggcggcgccggccccgcccagcccgagggcaacggcggcgccggccccgcccagcccgagggcaacggcggcgccggccccgcccagcccgagggcaacggcggcgccggccccgcccagcccgagggcaacggcggcgccggccccgcccagcccgagggcaacggcggcgccggccccgcccagcccgagggcaacggcggcgccggccccgcccagcccgagggcaacggcggcgccggccccgcccagccccagggcaacggcggcgccggccccgcccagccccagggcaacggcggcgccggccccgcccagccccagggcaacggcggcgccggccccgcccagccccagggcaacggcggcgccggccaggcccagccccagaagaacgagggcggcaacgccggcgccagaaagggccagggccagaacaaccagggcgccaacgcccccaacgagaagguggugaacgacuaccugcagaagaucagaagcagcgugaccaccgaguggacccccugcagcgugaccugcggcaacggcgugagaaucaagagaagagcccacgccgacaagaagaaggccgaggaccugaccauggacgaccuggagguggaggccugcgugauggacaagugcgccggcaucuucaacguggugagcaacagccugggccuggugauccugcuggugcuggcccuguucaacuga

SEQ ID NO: 4773 - RNA, 1080 nt, Artificial Sequence
  derived and/or modified CDS sequence (opt4) from Pk(CDK162)__ADN94495.1__CSP
augagaaacuucauccugcuggccgugagcagcauccugcugguggaccugcugcccacccacuucgagcacaacguggaccugagcagagccaucaacgugaacggcgugagcuucaacaacguggacaccagcagccugggcgccgcccaggugagacagagcgccagcagaggcagaggccugggcgagaagagaaaggagggcgccgacaaggagaagaagaaggagaaggaggaggagcccaagaagcccaacgagaacaagcugaagcagcccaaccccgaccagccccaggcccagggcgacggcgccaacgccggccagccccaggcccagggcgacggcgccaacgccggccagccccaggcccagggcgacggcgccaacgccggccagccccaggcccagggcgacggcgccaacgccggccagccccaggcccagggcgacggcgccaacgccggccagccccaggcccagggcgacggcgccaacgccggccagccccaggcccagggcgacggcgccaacgccggccagccccaggcccagggcgacggcgccaacgccggccagccccaggcccagggcgacggcgccaacgccggccagccccaggcccagggcgacggcgccaacgccggccagccccaggcccagggcgacagagccaacgccggccagccccaggcccagggcgacggcgccaacgugcccagacagggcagaaacggcggcggcgcccccgccggcggcaacgagggcaacaagcaggccggcaagggccagggccagaacaaccagggcgccaacgcccccaacgagaagguggugaacgacuaccugcacaagaucagaagcagcgugaccaccgaguggacccccugcagcgugaccugcggcaacggcgugagaaucagaagaagacagaacgccggcaacaagaaggccgaggaccugaccauggacgaccuggagguggaggccugcgugauggacaagugcgccggcaucuucaacguggugagcaacagccugggccuggugauccugcuggugcuggcccuguucaacuga

SEQ ID NO: 4774 - RNA, 1080 nt, Artificial Sequence
  derived and/or modified CDS sequence (opt4) from Pk(KN010)__AFG25463.1__CSP
augagaaacuucauccugcuggccgugagcagcauccugcugguggaccugcugcccacccacuucgagcacaacguggaccugagcagagccaucaacgugaacggcgugagcuucaacaacguggacaccagcagccugggcgccgcccaggugagacagagcgccagcagaggcagaggccugggcgagaagagaaaggagggcgccgacaaggagaagaagaaggagaaggaggaggagcccaagaagcccaacgagaacaagcugaagcagcccaaccccgaccagccccaggcccagggcgacggcgccaacgccggccagccccaggcccagggcgacggcgccaacgccggccagccccaggcccagggcgacggcgccaacgccggccagccccaggcccagggcgacggcgccaacgccggccagccccaggcccagggcgacggcgccaacaccggccagccccaggcccagggcgacggcgccaacgccggccagccccaggcccagggcgacggcgccaacgccggccagccccaggcccagggcgacggcgccaacgccggccagccccaggcccagggcgacggcgccaacgccggccagccccaggcccagggcgacggcgccaacgccggccagccccaggcccagggcgacagagccaacgccggccagccccaggcccagggcgacggcgccaacgugcccagacagggcagaaacggcggcggcgcccccgccggcggcaacgagggcaacaagcaggccggcaagggccagggccagaacaaccagggcgccaacgcccccaacgagaagguggugaacgacuaccugcacaagaucagaagcagcgugaccgccgaguggacccccugcagcgugaccugcggcaacggcgugagaaucagaagaaaggcccacgccggcaacaagaaggccgaggaccugaccauggacgaccuggagguggaggccugcgugauggacaagugcgccggcaucuucaacguggugagcaacagccugggccuggugauccugcuggugcuggcccuguucaacuga

SEQ ID NO: 4775 - RNA, 1080 nt, Artificial Sequence
  derived and/or modified CDS sequence (opt4) from Pk(KN013)__AFG25464.1__CSP
augagaaacuucauccugcuggccgugagcagcauccugcugguggaccugcugcccacccacuucgagcacaacguggaccugagcagagccaucaacgugaacggcgugagcuucaacaacguggacaccagcagccugggcgccgcccaggugagacagagcgccagcagaggcagaggccugggcgagaagagaaaggagggcgccgacaaggagaagaagaaggagaaggaggaggagcccaagaagcccaacgagaacaagcugaagcagcccaaccccggccagccccaggcccagggcgacggcgccaacgccggccagccccaggcccagggcgacggcgccaacgccggccagccccaggcccagggcgacggcgccaacgccggccagccccaggcccagggcgacggcgccaacgccggccagccccaggcccagggcgacggcgccaacgccggccagccccaggcccagggcgacggcgccaacgccggccagccccaggcccagggcgacggcgccaacgccggccagccccaggcccagggcgacggcgccaacgccggccagccccaggcccagggcgacggcgccaacgccggccagccccaggcccagggcgacggcgccaacgccggccagccccaggcccagggcgacagagccaacgccggccagccccaggcccagggcgacggcgccaacgugcccagacagggcagaaacggcggcggcgcccccgccggcggcaacggcggcaacaagcaggccggcaagggccagggccagaacaaccagggcgccaacgcccccaacgagaagguggugaacgacuaccugcacaagaucagaagcagcgugaccaccgaguggacccccugcagcgugaccugcggcaacggcgugagaaucagaagaaaggcccacgccggcaacaagaaggccgaggaccugaccauggacgaccuggagguggaggccugcgugauggacaagugcgccggcaucuucaacguggugagcaacagccugggccuggugauccugcuggugcuggcccuguucaacuga

SEQ ID NO: 4776 - RNA, 1080 nt, Artificial Sequence
  derived and/or modified CDS sequence (opt4) from Pk(LT57)__ADN94508.1__CSP
augaagaacuucauccugcuggccgugagcagcauccugcugguggaccuguuccccacccacuucgagcacaacguggaccugagcagagccaucaacgugaacggcgugagcuucaacaacguggacaccagcagccugggcgccgcccaggugagacagagcgccagcagaggcagaggccugggcgagaagcccaaggagggcgccgacaaggagaagaagaaggagaaggagaaggagaaggaggaggagcccaagaagcccaacgagaacaagcugaagcagcccgagggcaaccaggacggcagagcccagcccgagggcaaccaggacggcagagcccagcccgagggcaaccaggacggcagagcccagcccgagggcaaccaggacggcagagcccagcccgagggcaaccaggacggcagagcccagcccgagggcaaccaggacggcagagcccagcccgagggcaaccaggacggcagagcccagcccgagggcaaccaggacggcagagcccagcccgagggcaaccaggacggcagagcccagcccgagggcaacagagaggcccccgcccagccccagggcaacggcggcgccggccaggcccagcccgagggcaacagagaggcccccgcccagccccagggcaacggcggcgccggccaggcccagcccgagggcaacagagaggcccccgcccagccccagggcaacggcggcgccggccaggcccagccccagaagaacgagggcggcaacgccggcgccagaaagggccagggccagaacaaccagggcgccaacgcccccaacgagaagguggugaacgacuaccugcacaagaucagaagcagcgugaccaccgaguggacccccugcagcgugaccugcggcaacggcgugagaaucagaagaaaggcccacgccgacaagaagaaggccgaggaccugaccauggacgaccuggagguggaggccugcgugauggacaagugcgccggcaucuucaacguggugagcaacagccugggccuggugauccugcuggugcuggcccuguucaacuga

SEQ ID NO: 4777 - RNA, 1080 nt, Artificial Sequence
  derived and/or modified CDS sequence (opt4) from Pk(NB046)__AFG25471.1__CSP
augagaaacuucauccugcuggccgugagcagcauccugcugguggaccugcugcccacccacuucgagcacaacguggaccugagcagagccaucaacgugaacggcgugagcuucaacaacguggacaccagcagccugggcgccgcccaggugagacagagcgccagcagaggcagaggccugggcgagaagagaaaggagggcgccgacaaggagaagaagaaggagaaggaggaggagcccaagaagcccaacgagaacaagcugaagcagcccaaccccgaccagccccaggcccagggcgacggcgccaacgccggccagccccaggcccagggcgacggcgccaacgccggccagccccaggcccagggcgacggcgccaacgccggccagccccaggcccagggcgacggcgccaacgccggccagccccaggcccagggcgacggcgccaacgccggccagccccaggcccagggcgacggcgccaacgccggccagccccaggcccagggcgacggcgccaacgccggccagccccaggcccagggcgacggcgccaacgccggccagccccaggcccagggcgacggcgccaacgccggccagccccaggcccagggcgacggcgccaacgccggccagccccaggcccagggcgacagagccaacgccggccagccccaggcccagggcgacggcgccaacgugcccagacagggcagaaacggcggcggcgcccccgccggcggcaacgagggcaacaagcaggccggcaagggccagggccagaacaaccagggcgccaacgcccccaacgagaagguggugaacgacuaccugcacaagaucagaagcagcgugaccaccgaguggacccccugcagcgugaccugcggcaacggcgugagaaucagaagaaaggcccacgccggcaacaagaaggccgaggaccugaccauggacgaccuggagguggaggccugcgugauggacaagugcgccggcaucuucaacguggugagcaacagccugggccuggugauccugcuggugcuggcccuguucaacuga

SEQ ID NO: 4778 - RNA, 1080 nt, Artificial Sequence
  derived and/or modified CDS sequence (opt4) from Pk(TN023)__AFG25478.1__CSP
augagaaacuucauccugcuggccgugagcagcauccugcugguggaccugcugcccacccacuucgagcacaacguggaccugagcagagccaucaacgugaacggcgugagcuucaacaacguggacaucagcagccugggcgccgcccaggugagacagagcgccagcagaggcagaggccugggcgagaagagaaaggagggcgccgacaaggagaagaagaaggagaaggaggaggagcccaagaagcccaacgagaacaagcugaagcagcccaaccccgaccagccccaggcccagggcgacggcgccaacgccggccagccccaggcccagggcgacggcgccaacgccggccagccccaggcccagggcgacggcgccaacgccggccagccccaggcccagggcgacggcgccaacgccggccagccccaggcccagggcgacggcgccaacgccggccagccccaggcccagggcgacggcgccaacgccggccagccccaggcccagggcgacggcgccaacgccggccagccccaggcccagggcgacggcgccaacgccggccagccccaggcccagggcgacggcgccaacgccggccagccccaggcccagggcgacggcgccaacgccggccagccccaggcccagggcgacagagccaacgccggccagccccaggcccagggcgacggcgccaacgugcccagacagggcagaaacggcggcggcgcccccgccggcggcaacgagggcaacaagcaggccggcaagggccagggccagaacaaccagggcgccaacgcccccaacgagaagguggugaacgacuaccugcacaagaucagaagcagcgugaccaccgaguggacccccugcagcgugaccugcggcaacggcgugagaaucagaagaaaggcccacgccggcaacaagaaggccgaggaccugaccauggacgaccuggagguggaggccugcgugauggacaagugcgccggcaucuucaacguggugagcaacagccugggccuggugauccugcuggugcuggcccuguucaacuga

SEQ ID NO: 4779 - RNA, 1080 nt, Artificial Sequence
  derived and/or modified CDS sequence (opt4) from Pk(UM0016C2)__AHF20663.1__CSP
augaagaacuucauccugcuggccgugagcagcauccugcugguggaccugcugcccacccacuucgagcacaacguggaccugagcagagccaucaacgugaacggcgugagcuucaacaacguggacaccagcagccugggcgccgcccaggugagacagagcgccagcagaggcagaggccugggcgagaagcccaaggagggcgccgacaaggagaagaagaaggagaaggagaaggagaaggaggaggagcccaagaagcccaacgagaacaagcugaagcagcccgagggcaaccaggacggcagagcccagcccgagggcaaccaggacggcagagcccagcccgagggcaaccaggacggcagagcccagcccgagggcaaccaggacggcagagcccagcccgagggcaaccaggacggcagagcccagcccgagggcaaccaggacggcagagcccagcccgagggcaaccaggacggcagagcccagcccgagggcaaccaggacggcagagcccagcccgagggcaaccaggacggcagagcccagcccgagggcaacagagaggcccccgcccagccccagggcaacggcggcgccggccaggcccagcccgagggcaacagagaggcccccgcccagccccagggcaacggcggcgccggccaggcccagcccgagggcaacagagaggcccccgcccagccccagggcaacggcggcgccggccaggcccagccccagaagaacgagggcggcaacgccggcgccagaaagggccagggccagaacaaccagggcgccaacgcccccaacgagaagguggugaacgacuaccugcagaagaucagaagcagcgugaccaccgaguggacccccugcagcgugaccugcggcaacggcgugagaaucagaagaagagcccacgccgacaagaagaaggccgaggaccugaccauggacgaccuggagguggaggccugcgugauggacaagugcgccggcaucuucaacguggugagcaacagccugggccuggugauccugcuggugcuggcccuguucaacuga

SEQ ID NO: 4780 - RNA, 1077 nt, Artificial Sequence
  derived and/or modified CDS sequence (opt4) from Pk(LT48)__ADN94519.1__CSP
augagaaacuucauccugcuggccgugagcagcauccugcugguggaccugcugcccacccacuucgagcacaacguggaccugagcagagccaucaacgugaacggcgugagcuucaacaacguggacaccagcagccugggcgccgcccaggugagacagagcgccagcagaggcagaggccugggcgagaagagaaaggagggcgccgacaaggagaagaagaaggagaaggaggaggagcccaagaagcccaacgagaacaagcugaagcagcccaaccccgaccagccccaggcccagggcgacggcgccaacgccggccagccccaggcccagggcgacggcgccaacgccggccagccccaggcccagggcgacggcgccaacgccggccagccccaggcccagggcgacggcgccaacgccggccagccccaggcccagggcgacggcgccaacgccggccagccccaggcccagggcgacggcgccaacgccggccagccccaggcccagggcgacggcgccaacgccggccagccccaggcccagggcgacggcgccaacgccggccagccccaggcccagggcgacggcgccaacgccggccagccccaggcccagggcgacggcgccaacgccggccagccccaggcccagggcgacagaggcaugcaggacaaccacaagcacaaggagaugggccagauguaccacgacaaggaggagaccggcgaggugcaccagcaggaggagaugagaggcaucaacaagcaggagaaggccagagacaagaccaucagaguggagugccccaaggagaagguggugaacgacuaccugcacaagaucagaagcagcgugaccaccgaguggacccccugcagcgugaccugcggcaacggcgugagaaucagaagaaaggcccacgccggcaacaagaaggccgaggaccugaccauggacgaccuggagguggaggccugcgugauggacaagugcgccggcaucuucaacguggugagcaacagccugggccuggugauccugcuggugcuggcccuguucaacuga

SEQ ID NO: 4781 - RNA, 1077 nt, Artificial Sequence
  derived and/or modified CDS sequence (opt4) from Pk(SGEHIWM4-Y09-9)__AFD97223.1__CSP
augaagaacuucauccugcuggccgugagcagcauccugcugguggaccugcugcccaccuacuucgagcacaacguggaccugagcagagccaucaacgugaacggcgugagcuucaacagcguggacaccagcagccugggcgccgcccaggugagacagagcgccagcagaggcagaggccugggcgagaagcccaaggagggcgccgacaaggagaagaagaaggagaaggagaaggaggaggagcccaagaagcccaacgagaacaagcugaagcagccccagggcaacggcggcgccggccaggcccagcccgagggcaacggcggcgccggccaggcccagcccgagggcaacggcggcgccggccaggcccagcccgagggcaacggcggcgccggccaggcccagcccgagggcaacggcggcgccggccaggcccagcccgagggcaacggcggcgccggccaggcccagcccgagggcaacggcggcgccggccaggcccagcccgagggcaacggcggcgccggccaggcccagcccgagggcaacggcggcgccggccaggcccagcccgagggcaacggcggcgccggccaggcccagcccgagggcaacggcggcgccggccaggcccagcccgagggcaacggcggcgccggccaggcccagcccgagggcaacggcggcgccggccaggcccagccccagggcaacggcggcgccggccaggcccagccccagaagaacgagggcggcaacgccggcgccagaaagggccagggccagaacaaccagggcgccaacgcccccaacgagaagguggugaacgacuaccugcagaagaucagaagcagcgugaccaccgaguggacccccugcagcgugaccugcggcaacggcgugagaaucagaagaagagcccacgccgacaagaagaaggccgaggaccugaccauggacgaccuggagguggaggccugcgugauggacaagugcgccggcaucuucaacguggugagcaacagccugggccuggugauccugcuggugcuggcccuguucaacuga

SEQ ID NO: 4782 - RNA, 1071 nt, Artificial Sequence
  derived and/or modified CDS sequence (opt4) from Pk(LT15)__ADN94525.1__CSP
augagaaacuucauccugcuggccgugagcagcauccugcugguggaccugcugcccacccacuucgagcacaacguggaccugagcagagccaucaacgugaacggcgugagcuucaacaacguggacaccagcagccugggcgccgcccaggugagacagagcgccagcagaggcagaggccugggcgagaagagaaaggagggcgccgacaaggagaagaagaaggagaaggaggaggagcccaagaagcccaacgagaacaagcugaagcagcccgagcaggccgcccccggcgccggcggcgagcagcccgcccccggcgccggcggcgagcagcccgcccccggcgccggcggcgagcagcccgcccccggcgccggcggcgagagacccgcccccggcgccggcggcgagcagcccgcccccggcgccggcggcgagcagcccgcccccggcgccggcggcgagagacccgcccccggcgccggcggcgagcagcccgcccccggcgccggcggcgagcagcccgcccccggcgccggcggcgagcagcccgcccccggcgccggcggcgagcagcccgcccccggcgccggcggcgagagacccgcccccggcgccggcggcgagagacccgcccccggcgccggcggcgagcagcccgcccccggcgccggcggcgagcagcccgcccccgcccccagaagagagcagcccgcccccggccccggcgccggcgacggcgccagaggcggcaacgccggcgccggcaagggccagggccagaacaaccagggcgccaacgugcccaacgagaagguggugaacgacuaccugcacaagaucagaagcagcgugaccaccgaguggacccccugcagcgugaccugcggcaacggcgugagaaucagaagaagacagaacgccggcaacaagaaggccgaggaccugaccauggacgaccuggagguggaggccugcgugauggacaagugcgccggcaucuucaacguggugagcaacagccugggccuggugauccugcuggugcuggcccuguucaacuga

SEQ ID NO: 4783 - RNA, 1071 nt, Artificial Sequence
  derived and/or modified CDS sequence (opt4) from Pk(LT57)__ADN94503.1__CSP
augaagaacuucauccugcuggccgugagcagcauccugcugguggaccuguuccccacccacuucgagcacaacguggaccugagcagagccaucaacgugaacggcgugagcuucaacaacguggacaccagcagccugggcgccgcccaggugagacagagcgccagcagaggcagaggccugggcgagaagcccaaggagggcgccgacaaggagaagaagaaggagaaggagaaggaggagcccaagaagcccaacgagaacaagcugaagcagcccgagggcaaccaggacggcagagcccagcccgagggcaaccaggacggcagagcccagcccgagggcaaccaggacggcagagcccagcccgagggcaaccaggacggcagagcccagcccgagggcaaccaggacggcagagcccagcccgagggcaaccaggacggcagagcccagcccgagggcaaccaggacggcagagcccagcccgagggcaaccaggacggcagagcccagcccgagggcaaccaggacggcagagcccagcccgagggcaacagagaggcccccgcccagccccagggcaacggcggcgccggccaggcccagcccgagggcaacagagaggcccccgcccagccccagggcaacggcggcgccggccaggcccagcccgagggcaacagagaggcccccgcccagccccagggcaacggcggcgccggccaggcccagccccagaagaacgagggcggcaacgccggcgccagaaagggccagggccagaacaaccagggcgccaacgcccccaacgagaagguggugaacgacuaccugcagaagaucagaagcagcgugaccaccgaguggacccccugcagcgugaccugcggcaacggcgugagaaucagaagaagagcccacgccgacaagaagaaggccgaggaccugaccauggacgaccuggagguggaggccugcgugauggacaagugcgccggcaucuucaacgccgugagcaacagccugggccuggugauccugcuggugcuggcccuguucaacuga

SEQ ID NO: 4784 - RNA, 1068 nt, Artificial Sequence
  derived and/or modified CDS sequence (opt4) from Pk(UMHIC2)__AHF20634.1__CSP
augaagaacuucauccugcuggccgugagcagcauccugcugguggaccugcugcccacccacuucgagcacaacguggaccugagcagagccaucaacgugaacggcgugagcuucaacaacguggacaccagcagccugggcgccgcccaggugagacagagcgccagcagaggcagaggccugggcgagaagcccaaggagggcgccgacaaggagaagaagaaggagaaggagaaggaggaggagcccaagaagcccaacgagaacaagcugaagcagcccgagggcaacagagaggcccccggccagcccgagggcaacagagaggcccccggccagcccgagggcaacagagaggcccccggccagcccgagggcaacagagaggcccccggccagcccgagggcaacagagaggcccccggccagcccgagggcaacagagaggcccccggccagcccgagggcaacagagaggcccccggccagcccgagggcaacagagaggcccccggccagcccgagggcaacagagaggcccccggccagcccgagggcaacagagaggcccccggccagcccgagggcaacagagaggcccccgcccagcccgagggcaacagagaggcccccggccagcccgagggcaacagagaggcccccgcccagcccgagggcaacagagaggcccccgcccagccccagggcaacggcggcgccggccaggcccagccccagaagaacgagggcggcaacgccggcgccagaaagggccagggccagaacaaccagggcgccaacgcccccaacgagaagguggugaacgacuaccugcagaagaucagaagcagcgugaccaccgaguggacccccugcagcgugaccugcggcaacggcgugagaaucaagagaaaggcccacgccgacaagaagaaggccgaggaccugaccauggacgaccuggagguggaggccugcgugauggacaagugcgccggcaucuucaacguggugagcaacagccugggccuggugauccugcuggugcuggcccuguucaacuga

SEQ ID NO: 4785 - RNA, 1068 nt, Artificial Sequence
  derived and/or modified CDS sequence (opt4) from Pk(UMHIC6)__AHF20635.1__CSP
augaagaacuucauccugcuggccgugagcagcauccugcugguggaccugcugcccacccacuucgagcacaacguggaccugagcagagccaucaacgugaacggcgugagcuucaacaacguggacaccagcagccugggcgccgcccaggugagacagagcgccagcagaggcagaggccugggcgagaagcccaaggagggcgccgacaaggagaagaagaaggagaaggagaaggaggaggagcccaagaagcccaacgagaacaagcugaagcagcccgagggcaacagagaggcccccggccagcccgagggcaacagagaggcccccggccagcccgagggcaacagagaggcccccggccagcccgagggcaacagagaggcccccggccagcccgagggcaacagagaggcccccggccagcccgagggcaacagagaggcccccggccagcccgagggcaacagagaggcccccggccagcccgagggcaacagagaggcccccggccagcccgagggcaacagagaggcccccggccagcccgagggcaacagagaggcccccggccagcccgagggcaacagagaggcccccggccagcccgagggcaacagagaggcccccggccagcccgagggcaacagagaggcccccgcccagcccgagggcaacagagaggcccccgcccagccccagggcaacggcggcgccggccaggcccagccccagaagaacgagggcggcaacgccggcgccagaaagggccagggccagaacaaccagggcgccaacgcccccaacgagaagguggugaacgacuaccugcagaagaucagaagcagcgugaccaccgaguggacccccugcagcgugaccugcggcaacggcgugagaaucaagagaaaggcccacgccgacaagaagaaggccgaggaccugaccauggacgaccuggagguggaggccugcgugauggacaagugcgccggcaucuucaacguggugagcaacagccugggccuggugauccugcuggugcuggcccuguucaacuga

SEQ ID NO: 4786 - RNA, 1068 nt, Artificial Sequence
  derived and/or modified CDS sequence (opt4) from Pk(UMJUC1)__AHF20630.1__CSP
augaagaacuucauccugcuggccgugagcagcauccugcugguggaccugcugcccacccacuucgagcacaacguggaccugagcagagccaucaacgugaacggcgugagccugaacaacguggacaccagcagccugggcgccgcccaggugagacagagcgccagcagaggcagaggccugggcgagaagcccaaggagggcgccgacaaggagaagaagaaggagaaggagaaggaggaggagcccaagaagcccaacgagaacaagcugaagcagcccgagggcaacagagaggcccccggccagcccgagggcaacagagaggcccccggccagcccgagggcaacagagaggcccccggccagcccgagggcaacagagaggcccccggccagcccgagggcaacagagaggcccccggccagcccgagggcaacagagaggcccccggccagcccgagggcaacagagaggcccccggccagcccgagggcaacagagaggcccccggccagcccgagggcaacagagaggcccccggccagcccgagggcaacagagaggcccccggccagcccgagggcgacagagaggcccccgcccagcccgagggcaacagagaggcccccggccagcccgagggcaacagagaggugcccgcccagcccgagggcaacagagaggcccccgcccagccccagggcaacggcggcgccggccaggcccagccccagaagaacgagggcggcaacgccggcgccagaaagggccagggccagaacaaccagggcgccaacgcccccaacgagaagguggugaacgacuaccugcagaagaucagaagcagcgugaccaccgaguggacccccugcagcgugaccugcggcaacggcgugagaaucaagagaaaggcccacgccgacaagaagaaggccgaggaccugaccauggacgaccuggagguggaggccugcgugauggacaagugcgccggcaucuucaacguggugagcaacagccugggccuggugauccugcuggugcuggcccuguucaacuga

SEQ ID NO: 4787 - RNA, 1062 nt, Artificial Sequence
  derived and/or modified CDS sequence (opt4) from Pk(TN026)__AFG25480.1__CSP
augaagaacuucauccugcuggccgugagcagcauccugcugguggaccugcugcccacccacuucgagcacaacguggaccugagcagagccaucaacgugaacggcgugagcuucaacaacguggacaccagcagccugggcgccgcccaggugagacagagcgccagcagaggcagaggccugggcgagaagcccaaggagggcgccgacaaggagaagaagaaggagaaggagaaggagaaggagaaggaggaggagcccaagaagcccaacgagaacaagcugaagcagcccgagcagcccgccgccggcgccggcggcgagcagcccgccgccggcgccggcggcgagcagcccgccgccggcgccggcggcgagcagcccgccgccggcgccggcggcgagcagcccgccgccggcgccggcggcgagcagcccgccgccggcgccggcggcgagcagcccgccgccggcgccagaggcgagcagcccgccgccggcgccggcggcgagcagcccgccgccggcgccggcggcgagcagcccgccgccggcgccagaggcgagcagcccgccgccggcgccggcggcgagcagcccgccgccggcgccagaggcgagcagcccgccgccggcgccggcggcgagcagcccgccgccggcgccggcggcgagcagcccgcccccgcccccagaagagagcagcccgcccccggcgccggcgccggcgacggcgccagaggcggcaacgccggcgccggcaagggccagggccagaacaaccagggcgccaacgugcccaacgagaagguggugaacgacuaccugcacaagaucagaagcagcgugaccaccgaguggacccccugcagcgugaccugcggcaacggcgugagaaucagaggcaagggccacgccggcaacaagaaggccgaggaccugaccauggacgaccuggagguggaggccugcgugauggacaagugcgccggcaucuucaacguggugagcaacagccugggccuggugauccugcuggugcuggcccuguucaacuga

SEQ ID NO: 4788 - RNA, 1056 nt, Artificial Sequence
  derived and/or modified CDS sequence (opt4) from Pk(F08B49-1)__AHH02601.1__CSP
augaagaacuucauccugcuggccgugagcagcauccugcugguggaccugcugcccacccacuucgagcacaacguggaccugagcagagccaucaacgugaacggcgugagcuucaacaacguggacaccagcagccugggcgccgcccaggugagacagagcgccagcagaggcagaggccugggcgagaagcccaaggagggcgccgacaaggagaagaagaaggagaaggagaaggagaaggaggaggagcccaagaagcccaacgagaacaagcugaagcagcccgagcagcccgccgccggcgccggcggcgagcagcccgccgccggcgccggcggcgagcagcccgccgccggcgccggcggcgagcagcccgccgccggcgccagaggcgagcagcccgccgccggcgccggcggcgagcagcccgccgccggcgccggcggcgagcagcccgccgccggcgccggcggcgagcagcccgccgccggcgccggcggcgagcagcccgccgccggcgccggcggcgagcagcccgccgccggcgccagaggcgagcagcccgccgccggcgccggcggcgagcagcccgccgccggcgccggcggcgagcagcccgccgccggcgccagaggcgagcagcccgccgccggcgccggcggcgagcagcccgcccccgcccccagaagagagcagcccgcccccggcgccggcgccggcgacggcgccagaggcggcaacgccggcgccggcaagggccagggccagaacaaccagggcgccaacgugcccaacgagaagguggugaacgacuaccugcacaagaucagaagcagcgugaccaccgaguggacccccugcagcgugaccugcggcaacggcgugagaaucagaagaaagggccacgccggcaacaagaaggccgaggaccugaccauggacgaccuggagguggaggccugcgugauggacaagugcgccggcaucuucaacguggugagcaacagccugggccuggugauccugcuggugcuggcccuguucaacuga

SEQ ID NO: 4789 - RNA, 1056 nt, Artificial Sequence
  derived and/or modified CDS sequence (opt4) from Pk(F08B69-1)__AHH02602.1__CSP
augaagaacuucauccugcuggccgugagcagcauccugcugguggaccugcugcccacccacuucgagcacaacguggaccugagcagagccaucaacgugaacggcgugagcuucaacaacguggacaccagcagccugggcgccgcccaggugagacagagcgccagcagaggcagaggccugggcgagaagcccaaggagggcgccgacaaggagaagaagaaggagaaggagaaggagaaggaggaggagcccaagaagcccaacgagaacaagcugaagcagcccgagcagcccgccgccggcgccggcggcgagcagcccgccgccggcgccggcggcgagcagcccgccgccggcgccggcggcgagcagcccgccgccggcgccagaggcgagcagcccgccgccggcgccggcggcgagcagcccgccgccggcgccggcggcgagcagcccgccgccggcgccggcggcgagcagcccgccgccggcgccggcggcgagcagcccgccgccggcgccggcggcgagcagcccgccgccggcgccagaggcgagcagcccgccgccggcgccggcggcgagcagcccgccgccggcgccggcggcgagcagcccgccgccggcgccagaggcgagcagcccgccgccggcgccggcggcgagcagcccgcccccgcccccagaagagagcagcccgcccccggcgccggcgccggcgacggcgccagaggcggcaacgccggcgccggcaagggccagggccagaacaaccagggcgccaacgugcccaacgagaagguggugaacgacuaccugcacaagaucagaagcagcgugaccaccgaguggacccccugcagcgugaccugcggcaacggcgugagaaucagaagaaagggccacgccggcaacaagaaggccgaggaccugaccauggacgaccuggacguggaggccugcgugauggacaagugcgccggcaucuucaacguggugagcaacagccugggccuggugauccugcuggugcuggcccuguucaacuga

SEQ ID NO: 4790 - RNA, 1056 nt, Artificial Sequence
  derived and/or modified CDS sequence (opt4) from Pk(LT51)__ADN94540.1__CSP
augaagaacuucauccugcuggccgugagcagcauccugcugguggaccugcugcccacccacuucgagcacaacguggaccugagcagagccaucaacgugaacggcgugagcuucaacaacguggacaccagcagccugggcgccgcccaggugagacagagcgccagcagaggcagaggccugggcgagaagcccaaggagggcgccgacaaggagaagaagaaggagaaggagaaggagaaggaggaggagcccaagaagcccaacgagaacaagcugaagcagcccgagcagcccgccgccggcgccggcggcgagcagcccgccgccggcgccggcggcgagcagcccgccgccggcgccggcggcgagcagcccgccgccggcgccggcggcgagcagcccgccgccggcgccggcggcgagcagcccgccgccggcgccggcggcgagcagcccgccgccggcgccagaggcgagcagcccgccgccggcgccggcggcgagcagcccgccgccggcgccggcggcgagcagcccgccgccggcgccagaggcgagcagcccgccgccggcgccggcggcgagcagcccgccgccggcgccggcggcgagcagcccgcccccgcccccagaagagagcagcccgccgccggcgccggcggcgagcagcccgcccccgcccccagaagagagcagcccgcccccggcgccggcgccggcgacggcgccagaggcggcaacgccggcgccggcaagggccagggccagaacaaccagggcgccaacgugcccaacgagaagguggugaacgacuaccugcacaagaucagaagcagcgugaccaccgaguggacccccugcagcgugaccugcggcaacggcgugagaaucagaagaaagggccacgccggcaacaagaaggccgaggaccugaccauggacgaccuggagguggaggccugcgugauggacaagugcgccggcaucuucaacguggugagcaacagccugggccuggugauccugcuggugcuggcccuguucaacuga

SEQ ID NO: 4791 - RNA, 1056 nt, Artificial Sequence
  derived and/or modified CDS sequence (opt4) from Pk(UM0029C9)__AHF20652.1__CSP
augaagaacuucauccugcuggccgugagcagcauccugcugguggaccugcugcccacccacuucgagcacaacguggaccugagcagagccaucaacgugaacggcgugagcuucaacaacguggacaccagcagccugggcgccgcccaggugagacagagcgccagcagaggcagaggccugggcgagaagcccaaggagggcgccgacaaggagaagaagaaggagaaggagaaggagaaggaggaggagcccaagaagcccaacgagaacaagcugaagcagcccgagcagcccgccgccggcgccggcggcgagcagcccgccgccggcgccggcggcgagcagcccgccgccggcgccggcggcgagcagcccgccgccggcgccggcggcgagcagcccgccgccggcgccagaggcgagcagcccgccgccggcgccggcggcgagcagcccgccgccggcgccagaggcgagcagcccgccgccggcgccggcggcgagcagcccgccgccggcgccggcggcgagcagcccgccgccggcgccggcggcgagcagcccgccgccggcgccagaggcgagcagcccgccgccggcgccggcggcgagcagcccgcccccgcccccagaagagagcagcccgccgccggcgccggcggcgagcagcccgcccccgcccccagaagagagcagcccgcccccggcgccggcgccggcgacggcgccagagagggcaacgccggcgccggcaagggccagggccagaacaaccagggcgccaacgugcccaacgagaagguggugaacgacuaccugcacaagaucagaagcagcgugaccaccgaguggacccccugcagcgugaccugcggcaacggcgugagaaucagaagaaagggccacgccggcaacaagaaggccgaggaccugaccauggacgaccuggagguggaggccugcgugauggacaagugcgccggcaucuucaacguggugagcaacagccugggccuggugauccugcuggugcuggcccuguucaacuga

SEQ ID NO: 4792 - RNA, 1056 nt, Artificial Sequence
  derived and/or modified CDS sequence (opt4) from Pk(UM0050C7)__AHF20665.1__CSP
augaagaacuucauccugcuggccgugagcagcauccugcugguggaccugcugcccacccacuucgagcacaacguggaccugagcagagccaucaacgugaacggcgugagcuucaacaacguggacaccagcagccccggcgccgcccaggugagacagagcgccagcagaggcagaggccugggcgagaagcccaaggagggcgccgacaaggagaagaagaaggagaaggagaaggagaaggaggaggagcccaagaagcccaacgagaacaagcugaagcagcccgagcagcccgccgccggcgccggcggcgagcagcccgccgccggcgccggcggcgagcagcccgccgccggcgccggcggcgagcagcccgccgccggcgccggcggcgagcagcccgccgccggcgccagaggcgagcagcccgccgccggcgccggcggcgagcagcccgccgccggcgccagaggcgagcagcccgccgccggcgccggcggcgagcagcccgccgccggcgccggcggcgagcagcccgccgccggcgccggcggcgagcagcccgccgccggcgccggcggcgagcagcccgccgccggcgccggcggcgagcagcccgcccccgcccccagaagagagcagcccgccgccggcgccggcggcgagcagcccgcccccgcccccagaagagagcagcccgcccccggcgccggcgccggcgacggcgccagaggcggcaacgccggcgccggcaagggccagggccagaacaaccagggcgccaacgugcccaacgagaagguggugaacgacuaccugagaaagaucagaagcagcgugaccaccgaguggacccccugcagcgugaccugcggcaacggcgugagaaucagaagaaagggccacgccggcaacaagaaggccgaggaccugaccauggacgaccuggagguggaggccugcgugauggacaagugcgccggcaucuucaacguggugagcaacagccugggccuggugauccugcuggugcuggcccuguucaacuga

SEQ ID NO: 4793 - RNA, 1056 nt, Artificial Sequence
  derived and/or modified CDS sequence (opt4) from Pk(UMHEC1)__AHF20620.1__CSP
augaagaacuucauccugcuggccgugagcagcauccugcugguggaccugcugcccacccacuucgagcacaacguggaccugagcagagccaucaacgugaacggcgugagcuucaacaacguggacaccagcagccugggcgccgcccaggugagacagagcgccagcagaggcagaggccugggcgagaagcccaaggagggcgccgacaaggagaagaagaaggagaaggagaaggagaaggaggaggagcccaagaagcccaacgagaacaagcugaagcagcccgagcagcccgccgccggcgccggcggcgagcagcccgccgccggcgccggcggcgagcagcccgccgccggcgccggcggcgagcagcccgccgccggcgccggcggcgagcagcccgccgccggcgccggcggcgagcagcccgccgccggcgccagaggcgagcagcccgccgccggcgccggcggcgagcagcccgccgccggcgccggcggcgagcagcccgccgccggcgccggcggcgagcagcccgccgccggcgccagaggcgagcagcccgccgccggcgccggcggcgagcagcccgccgccggcgccggcggcgagcagcccgcccccgcccccagaagagagcagcccgccgccggcgccggcggcgagcagcccgcccccgcccccagaagagagcagcccgcccccggcgccggcgccggcgacggcgccagaggcggcaacgccggcgccggcaagggccagggccagaacaaccagggcgccaacgugcccaacgagaagguggugaacgacuaccugcacaagaucagaagcagcgugaccaccgaguggacccccugcagcgugaccugcggcaacggcgugagaaucagaagaaagggccacgccggcaacaagaaggccgaggaccugaccauggacgaccuggagguggaggccugcgugauggacaagugcgccggcaucuucaacguggugagcaacagccugggccuggugauccugcuggugcuggcccuguucaacuga

SEQ ID NO: 4794 - RNA, 1056 nt, Artificial Sequence
  derived and/or modified CDS sequence (opt4) from Pk(UMMAC4)__AHF20621.1__CSP
augaagaacuucauccugcuggccgugagcagcauccugcugguggaccugcugcccacccacuucgagcacaacguggaccugagcagagccaucaacgugaacggcgugagcuucaacaacguggacaccagcagccugggcgccgcccaggugagacagagcgccagcagaggcagaggccugggcgagaagcccaaggagggcgccgacaaggagaagaagaagggcaaggagaaggagaaggaggaggagcccaagaagcccaacgagaacaagcugaagcagcccgagcagcccgccgccggcgccggcggcgagcagcccgccgccggcgccggcggcgagcagcccgccgccggcgccggcggcgagcagcccgccgccggcgccggcggcgagcagcccgccgccggcgccggcggcgagcagcccgccgccggcgccagaggcgagcagcccgccgccggcgccggcggcgagcagcccgccgccggcgccggcggcgagcagcccgccgccggcgccggcggcgagcagcccgccgccggcgccagaggcgagcagcccgccgccggcgccggcggcgagcagcccgccgccggcgccggcggcgagcagcccgcccccgcccccagaagagagcagcccgccgccggcgccggcggcgagcagcccgcccccgcccccagaagagagcagcccgcccccggcgccggcgccggcgacggcgccagaggcggcaacgccggcgccggcaagggccagggccagaacaaccagggcgccaacgugcccaacgagaagguggugaacgacuaccugcacaagaucagaagcagcgugaccaccgaguggacccccugcagcgugaccugcggcaacggcgugagaaucagaagaaagggccacgccggcaacaagaaggccgaggaccugaccauggacgaccuggagguggaggccugcgugauggacaagugcgccggcaucuucaacguggugagcaacagccugggccuggugauccugcuggugcuggcccuguucaacuga

SEQ ID NO: 4795 - RNA, 1056 nt, Artificial Sequence
  derived and/or modified CDS sequence (opt4) from Pk(UMMEC8)__AHF20623.1__CSP
augaagaacuucauccugcuggccgugagcagcauccugcugguggaccugcugcccacccacuucgagcacaacguggaccugagcagagccaucaacgugaacggcgugagcuucaacaacguggacaccagcagccugggcgccgcccaggugagacagagcgccagcagaggcagaggccugggcgagaagcccaaggagggcgccgacaaggagaagaagaaggagaaggagaaggagaaggaggaggagcccaagaagcccaacgagaacaagcugaagcagcccgagcagcccgccgccggcgccggcggcgagcagcccgccgccggcgccggcggcgagcagcccgccgccggcgccggcggcgagcagcccgccgccggcgccggcggcgagcagcccgccgccggcgccggcggcgagcagcccgccgccggcgccagaggcgagcagcccgccgccggcgccggcggcgagcagcccgccgccggcgccggcggcgagcagcccgccgccggcgccggcggcgagcagcccgccgccggcgccagaggcgagcagcccgccgccggcgccggcggcgagcagcccgccgccggcgccggcggcgagcagcccgcccccgcccccagaagagagcagcccgccgccggcgccggcggcgagcagcccgcccccgcccccagaagagagcagcccgcccccggcgccggcgccggcgacggcgccagaggcggcaacgccggcgccggcaagggccagggccagaacaaccagggcgccaacgugcccaacgagaagguggugaacgacuaccugcacaagaccagaagcagcgugaccaccgaguggacccccugcagcgugaccugcggcaacggcgugagaaucagaagaaagggccacgccggcaacaagaaggccgaggaccugaccauggacgaccuggagguggaggccugcgugauggacaagugcgccggcaucuucaacguggugagcaacagccugggccuggugauccugcuggugcuggcccuguucaacuga

SEQ ID NO: 4796 - RNA, 1050 nt, Artificial Sequence
  derived and/or modified CDS sequence (opt4) from Pk(MPG45)__ACD86467.1__CSP
augaagaacuucauccugcuggccgugagcagcauccugcugguggaccugcugcccacccacuucgagcacaacguggaccugagcagagccaucaaccugaacggcgugagcuucaacaacguggacaccagcagccugggcgccgcccaggugagacagagcgccagcagaggcagaggccugggcgagaagcccaaggagggcgccgacaaggagaagaagaaggagaaggacaaggaggaggagcccaagaagcccaacgagaacaagcugaagcagcccaacgccggccagccccaggcccagggcgacggcgccaacgccggccagccccaggcccagggcgacggcgccaacgccggccagccccaggcccagggcgacggcgccaacgccggccagccccaggcccagggcgacggcgccaacgccggccagccccaggcccagggcgacggcgccaacgccggccagccccaggcccagggcgacggcgccaacgccggccagccccaggcccagggcgacggcgccaacgccggccagccccaggcccagggcgacggcgccaacgccggccagccccaggcccagggcgacggcgccaacgccggccagccccaggcccagggcgacagagccaacgccggccagccccaggcccagggcgacggcgccaacgugcccagacagggcagaaacggcggcggcgcccccgccggcggcaacgagggcaacaagcaggccggcaagggccagggccagaacaaccagggcgccaacgcccccaacgagaagguggugaacgacuaccugcagaagaucagaagcagcgugaccaccgaguggacccccugcagcgugaccugcggcaacggcgugagaaucagaagaagagcccacgccgacaagaagaaggccgaggaccugaccauggacgaccuggagguggaggccugcgugauggacaagugcgccggcaucuucaacguggugagcaacagccugggccuggugauccugcuggugcuggcccuguucaacuga

SEQ ID NO: 4797 - RNA, 1044 nt, Artificial Sequence
  derived and/or modified CDS sequence (opt4) from Pk(KH462)__ADN94491.1__CSP
augagaaacuucauccugcuggccgugagcagcauccugcugguggaccugcugcccacccacuucgagcacaacguggaccugagcagagccaucaacgugaacggcgugagcuucaacaacguggacaccagcagccugggcgccgcccaggugagacagagcgccagcagaggcagaggccugggcgagaagagaaaggagggcgccgacaaggagaagaagaaggagaaggaggaggagcccaagaagcccaacgagaacaagcugaagcagcccgagcaggccgcccccggcgccggcggcgagcagcccgcccccggcgccggcggcgagagacccgcccccggcgccggcggcgagcagcccgcccccggcgccggcggcgagcagcccgcccccggcgccggcggcgagcagcccgcccccggcgccggcggcgagcagcccgcccccggcgccggcggcgagagacccgcccccggcgccggcggcgagcagcccgcccccggcgccggcggcgagagacccgcccccggcgccggcggcgagcagcccgcccccggcgccggcggcgagagacccgcccccggcgccggcggcgagcagcccgcccccggcgccggcggcgagcagcccgcccccggcgccggcggcgagcagcccgcccccgcccccagaagagagcagcccgcccccgcccccggcgccggcgacggcgccagaggcggcaacgccggcgccggcaagggccagggccagaacaaccagggcgccaacgugcccaacgagaagguggugaacgacuaccugcacaagaucagaagcagcgugaccaccgaguggacccccugcagcgugaccugcggcaacggcgugagaaucagaagaaaggcccacgccgacaagaagaaggccgaggaccugaccauggacgaccuggagguggaggccugcgugauggacaagugcgccggcaucuucaacguggugagcaacagccugggccuggugauccugcuggugcuggcccuguucaacuga

SEQ ID NO: 4798 - RNA, 1044 nt, Artificial Sequence
  derived and/or modified CDS sequence (opt4) from Pk(LT3)__ADN94521.1__CSP
augagaaacuucauccugcuggccgugagcagcauccugcugguggaccugcugcccacccacuucgagcacaacguggaccugagcagagccaucaacgugaacggcgugagcuucaacaacguggacaccagcagccugggcgccgcccaggugagacagagcgccagcagaggcagaggccugggcgagaagagaaaggagggcgccgacaaggagaagaagaaggagaaggaggaggagcccaagaagcccaacgagaacaagcugaagcagcccgagcaggccgcccccggcgccggcggcgagcagcccgcccccggcgccggcggcgagcagcccgcccccggcgccggcggcgagagacccgcccccggcgccggcggcgagcagcccgcccccggcgccggcggcgagcagcccgcccccggcgccggcggcgagagacccgcccccggcgccggcggcgagcagcccgcccccggcgccggcggcgagcagcccgcccccggcgccggcggcgagcagcccgcccccggcgccggcggcgagcagcccgcccccggcgccggcggcgagcugcccgcccccggcgccggcggcgagagacccgcccccggcgccggcggcgagcagcccgcccccggcgccggcggcgagcagcccgcccccgcccccagaagagagcagcccgcccccggccccggcgccggcgacggcgccagaggcggcaacgccggcgccggcaagggccagggccagaacaaccagggcgccaacgugcccaacgagaagguggugaacgacuaccugcacaagaucagaagcagcgugaccaccgaguggacccccugcagcgugaccugcggcaacggcgugagaaucagaagaagacagaacgccggcaacaagaaggccgaggaccugaccauggacgaccuggagguggaggccugcgugauggacaagugcgccggcaucuucaacguggugagcaacagccugggccuggugauccugcuggugcuggcccuguucaacuga

SEQ ID NO: 4799 - RNA, 1044 nt, Artificial Sequence
  derived and/or modified CDS sequence (opt4) from Pk(LT33)__ADN94529.1__CSP
augagaaacuucauccugcuggccgugagcagcauccugcugguggaccugcugcccacccacuucgagcacaacguggaccugagcagagccaucaacgugaacggcgugagcuucaacaacguggacaccagcagccugggcgccgcccaggugagacagagcgccagcagaggcagaggccugggcgagaagagaaaggagggcgccgacaaggagaagaagaaggagaaggaggaggagcccaagaagcccaacgagaacaagcugaagcagcccgagcaggccgcccccggcgccggcggcgagcagcccgcccccggcgccggcggcgagagacccgcccccggcgccggcggcgagcagcccgcccccggcgccggcggcgagcagcccgcccccggcgccggcggcgagcagcccgcccccggcgccggcggcgagcagcccgcccccggcgccggcggcgagagacccgcccccggcgccggcggcgagcagcccgcccccggcgccggcggcgagcagcccgcccccggcgccggcggcgagcagcccgcccccggcgccggcggcgagagacccgcccccggcgccggcggcgagcagcccgcccccggcgccggcggcgagagacccgcccccggcgccggcggcgagcagcccgcccccgcccccagaagagagcagcccgcccccggccccggcgccggcgacggcgccagaggcggcaacgccggcgccggcaagggccagggccagaacaaccagggcgccaacgugcccaacgagaagguggugaacgacuaccugcacaagaucagaagcagcgugaccaccgaguggacccccugcagcgugaccugcggcaacggcgugagaaucagaagaagacagaacgccggcaacaagaaggccgaggaccugaccauggacgaccuggagguggaggccugcgugauggacaagugcgccggcaucuucaacguggugagcaacagccugggccuggugauccugcuggugcuggcccuguucaacuga

SEQ ID NO: 4800 - RNA, 1044 nt, Artificial Sequence
  derived and/or modified CDS sequence (opt4) from Pk(LT33)__ADN94527.1__CSP
augaagaacuucauccugcuggccgugagcagcauccugcugguggaccugcugcccacccacuucgagcacaacguggaccugagcagagccaucaacgugaacggcgugagcuucaacaacguggacaccagcagccugggcgccgcccaggugagacagagcgccagcagaggcagaggccugggcgagaagagaaaggagggcgccgacaaggagaagaagaaggagaaggaggaggagcccaagaagcccaacgagaacaagcugaagcagcccgagcaggccgcccccggcgccggcggcgagcagcccgcccccggcgccggcggcgagagacccgcccccggcgccggcggcgagcagcccgcccccggcgccggcggcgagcagcccgcccccggcgccggcggcgagcagcccgcccccggcgccggcggcgagcagcccgcccccggcgccggcggcgagagacccgcccccggcgccggcggcgagcagcccgcccccggcgccggcggcgagcagcccgcccccggcgccggcggcgagcagcccgcccccggcgccggcggcgagagacccgcccccggcgccggcggcgagcagcccgcccccggcgccggcggcgagagacccgcccccggcgccggcggcgagcagcccgcccccgcccccagaagagagcagcccgcccccggccccggcgccggcgacggcgccagaggcggcaacgccggcgccggcaagggccagggccagaacaaccagggcgccaacgugcccaacgagaagguggugaacgacuaccugcacaagaucagaagcagcgugaccaccgaguggacccccugcagcgugaccugcggcaacggcgugagaaucagaagaagacagaacgccggcaacaagaaggccgaggaccugaccauggacgaccuggagguggaggccugcgugauggacaagugcgccggcaucuucaacguggugagcaacagccugggccuggugauccugcuggugcuggcccuguucaacuga

SEQ ID NO: 4801 - RNA, 1044 nt, Artificial Sequence
  derived and/or modified CDS sequence (opt4) from Pk(TN029)__AFG25482.1__CSP
augagaaacuucauccugcuggccgugagcagcauccugcugguggaccugcugcccacccacuucgagcacaacguggaccugagcagagccaucaacgugaacggcgugagcuucaacaacguggacaccagcagccugggcgccgcccaggugagacagagcgccagcagaggcagaggccugggcgagaagagaaaggagggcgccgacaaggagaagaagaaggagaaggaggaggagcccaagaagcccaacgagaacaagcugaagcagcccgagcaggccgcccccggcgccggcggcgagcagcccgcccccggcgccggcggcgagcagcccgcccccggcgccggcggcgagagacccgcccccggcgccggcggcgagcagcccgcccccggcgccggcggcgagcagcccgcccccggcgccggcggcgagagacccgcccccggcgccggcggcgagcagcccgcccccggcgccggcggcgagcagcccgcccccggcgccggcggcgagcagcccgcccccggcgccggcggcgagcagcccgcccccggcgccggcggcgagagacccgcccccggcgccggcggcgagagacccgcccccggcgccggcggcgagcagcccgcccccggcgccggcggcgagcagcccgcccccgcccccagaagagagcagcccgcccccggccccggcgccggcgacggcgccagaggcggcaacgccggcgccggcaagggccagggccagaacaaccagggcgccaacgugcccaacgagaagguggugaacgacuaccugcacaagaucagaagcagcgugaccaccgaguggacccccugcagcgugaccugcggcaacggcgugagaaucagaagaagacagaacgccggcaacaagaaggccgaggaccugaccauggacgaccuggagguggaggccugcgugauggacaagugcgccggcaucuucaacguggugagcaacagccugggccuggugauccugcuggugcuggcccuguucaacuga

SEQ ID NO: 4802 - RNA, 1041 nt, Artificial Sequence
  derived and/or modified CDS sequence (opt4) from Pk(LT53)__ADN94501.1__CSP
augaagaacuucauccugcuggccgugagcagcauccugcugguggaccugcugcccacccacuucgagcacaacguggaccugagcagagccaucaacgugaacggcgugagcuucaacaacguggacaccagcagccugggcgccgcccaggugagacagagcgccagcagaggcagaggccugggcgagaagcccaaggagggcgacgacaaggagaagaagaaggagaaggagaaggaggaggagcccaagaaccugaacgagaacaagcccaagcagcccaacgccgagggcgacggcgccaagcccaagcagcccaacgccgagggcgacggcgccaagcugaagcagcccaacgccgagggcgacggcgccaagcugaagcagcccaacgccgagggcgacggcggcaacgccagacagcccaacgccgagggcgacggcggcaacgccagacagcccaacgccgagggcgacggcggcaacgccagacagcccaacgccgagggcgacggcggcaacgccagacagcccaacgccgagggcgacggcggcaacgccagacagcccaacgccgagggcgacggcggcaacgccagacagcccaacgccgagggcgacggcggcaacgccagacagcccaacgccgagggcgacggcgccaacgccagacagccccaggccgagggcggcggcggcaacgccagacagggcggcaacgagggcaacaagcaggccggcaagggccagggccagaacaaccagggcgccaacgcccccaacgagaagguggugaacgacuaccugcagaagaucagaagcagcgugaccaccgaguggacccccugcagcgugaccugcggcaacggcgugagaaucagaagaagagcccacgccgacaagaagaaggccgaggaccugaccauggacgaccuggagguggaggccugcgugauggacaagugcgccggcaucuucaacguggugagcaacagccugggccuggugauccugcuggugcuggcccuguucaacuga

SEQ ID NO: 4803 - RNA, 1041 nt, Artificial Sequence
  derived and/or modified CDS sequence (opt4) from Pk(UMOTC3)__AHF20624.1__CSP
augaagaacuucauccugcuggccgugagcagcauccugcugguggaccugcugcccacccacuucgagcacaacguggaccugagcagagccaucaacgugaacggcgugagcuucaacaacguggacaccagcagccugggcgccgcccaggugagacagagcgccagcagaggcagaggccugggcgagaagcccaaggagggcgccgacaaggagaagaagaaggagaaggagaaggaggaggagcccaagaagcccaacgagaacaagcugaagcagcccgagggcaacagagaggcccccggccagcccgagggcaacagagaggcccccggccagcccgagggcaacagagaggcccccggccagcccgagggcaacagagaggcccccggccagcccgagggcaacagagaggcccccggccagcccgagggcaacagagaggcccccggccagcccgagggcaacagagaggcccccggccagcccgagggcaacagagaggcccccggccagcccgagggcaacagagaggcccccgcccagcccgagggcaacagagaggcccccggccagcccgagggcaacagagaggcccccgcccagccccagggcaacggcggcgccggccaggcccagcccgaggagaacagagaggcccccgcccagccccagggcaacggcggcgccggccaggcccagccccagaagaacgagggcggcaacgccggcgccagaaagggccagggccagaacaaccagggcgccaacgugcccaacgagaagguggugaacgacuaccugcacaagaucagaagcagcgugaccaccgaguggacccccugcagcgugaccugcggcaacggcgugagaaucagaagaaagggccacgccggcaacaagaaggccgaggaccugaccauggacgaccuggagguggaggccugcgugauggacaagugcgccggcaucuucaacguggugagcaacagccugggccuggugauccugcuggugcccgcccuguucaacuga

SEQ ID NO: 4804 - RNA, 1038 nt, Artificial Sequence
  derived and/or modified CDS sequence (opt4) from Pk(UMSY2C2)__AHF20625.1__CSP
augaagaacuucauccugcuggccgugagcagcauccugcugguggaccugcugcccacccacuucgagcacaacguggaccugagcagagccaucaacgugaacggcgugagcuucaacaacguggacaccagcagccugggcgccgcccaggugagacagagcgccagcagaggcagaggccugggcgagaagcccaaggagggcgccgacaaggagaagaagaaggagaaggagaaggaggaggagcccaagaagcccaacgagaacaagcugaagcagcccgagggcaacagagaggcccccggccagcccgagggcaacagagaggcccccggccagcccgagggcaacagagaggcccccggccagcccgagggcaacagagaggcccccggccagcccgagggcaacagagaggcccccggccagcccgagggcaacagagaggcccccggccagcccgagggcaacagagaggcccccggccagcccgagggcaacagagaggcccccggccagcccgagggcaacagagaggcccccggccagcccgagggcaacagagaggcccccgcccagcccgagggcaacagagaggcccccggccagcccgagggcaacagagaggcccccgcccagcccgagggcaacagagaggcccccgcccagccccagggcaacggcggcgccggccaggcccagccccagaagaacgagggcggcaacgccggcgccagaaagggccagggccagaacaaccagggcgccaacgcccccaacgagaagguggugaacgacuaccugcagaagaucagaagcagcgugaccaccgaguggacccccugcagcgugaccugcggcaacggcgugagaaucaagagaaaggcccacgccgacaagaagaaggccgaggaccugaccauggacgaccuggagguggaggccugcgugauggacaagugcgccggcaucuucaacguggugagcaacagccugggccuggugauccugcuggugcuggcccuguucaacuga

SEQ ID NO: 4805 - RNA, 1029 nt, Artificial Sequence
  derived and/or modified CDS sequence (opt4) from Pk(KN045)__AFG25467.1__CSP
augaagaacuucauccugcuggccgugagcagcauccugcugguggaccugcugcccacccacuucgagcacaacguggaccugagcagagccaucaacgugaacggcgugagcuucaacaacguggacaccagcagccugggcgccgcccaggugagacagagcgccagcagaggcagaggccugggcgagaagcccaaggagggcgccgacaaggagaagaagaaggagaaggagaaggagaaggaggaggagcccaagaagcccaacgagaacaagcugaagcagcccgagcagcccgccgccggcgccggcggcgagcagcccgccgccggcgccggcggcgagcagcccgccgccggcgccggcggcgagcagcccgccgccggcgccggcggcgagcagcccgccgccggcgccggcggcgagcagcccgccgccggcgccagaggcgagcagcccgccgccggcgccggcggcgagcagcccgccgccggcgccggcggcgagcagcccgccgccggcgccagaggcgagcagcccgccgccggcgccggcggcgagcagcccgccgccggcgccggcggcgagcagcccgcccccgcccccagaagagagcagcccgccgccggcgccggcggcgagcagcccgcccccgcccccagaagagagcagcccgcccccggcgccggcgccggcgacggcgccagaggcggcaacgccggcgccggcaagggccagggccagaacaaccagggcgccaacgugcccaacgagaagguggugaacgacuaccugcacaagaucagaagcagcgugaccaccgaguggacccccugcagcgugaccugcggcaacggcgugagaaucagaagaaagggccacgccggcaacaagaaggccgaggaccugaccauggacgaccuggagguggaggccugcgugauggacaagugcgccggcaucuucaacguggugagcaacagccugggccuggugauccugcuggugcuggcccuguucaacuga

SEQ ID NO: 4806 - RNA, 1029 nt, Artificial Sequence
  derived and/or modified CDS sequence (opt4) from Pk(LT48)__ADN94515.1__CSP
augaagaacuucauccugcuggccgugagcagcauccugcugguggaccugcugcccacccacuucgagcacaacguggaccugagcagagccaucaacgugaacggcgugagcuucaacaacguggacaccagcagccugggcgccgcccaggugagacagagcgccagcagaggcagaggccugggcgagaagcccaaggagggcgccgacaaggagaagaagaaggagaaggagaaggagaaggaggaggagcccaagaagcccaacgagaacaagcugaagcagcccgagcagcccgccgccggcgccggcggcgagcagcccgccgccggcgccggcggcgagcagcccgccgccggcgccggcggcgagcagcccgccgccggcgccggcggcgagcagcccgccgccggcgccggcggcgagcagcccgccgccggcgccggcggcgagcagcccgccgccggcgccggcggcgagcagcccgccgccggcgccggcggcgagcagcccgccgccggcgccagaggcgagcagcccgccgccggcgccggcggcgagcagcccgccgccggcgccggcggcgagcagcccgcccccgcccccagaagagagcagcccgccgccggcgccggcggcgagcagcccgcccccgcccccagaagagagcagcccgcccccggcgccggcgccggcgacggcgccagaggcggcaacgccggcgccggcaagggccagggccagaacaaccagggcgccaacgugcccaacgagaagguggugaacgacuaccugcacaagaucagaagcagcgugaccaccgaguggacccccugcagcgugaccugcggcaacggcgugagaaucagaagaaagggccacgccggcaacaagaaggccgaggaccugaccauggacgaccuggagguggaggccugcgugauggacaagugcgccggcaucuucaacguggugagcaacagccugggccuggugauccugcuggugcuggcccuguucaacuga

SEQ ID NO: 4807 - RNA, 1029 nt, Artificial Sequence
  derived and/or modified CDS sequence (opt4) from Pk(TB073)__AFG25476.1__CSP
augagaaacuucuucuuccuggccgugagcagcauccugcugguggaccugcugcccacccacuucgagcacaacguggaccugagcagagccaucaacgugaacggcgugagcuucaacaacguggacaccagcagccugggcgccgcccaggugagacagagcgccagcagaggcagaggccugggcgagaagagaaaggagggcgccgacaaggagaagaagaaggagaaggaggaggagcccaagaagcccaacgagaacaagcugaagcagcccgagcaggccagagccggcggcgagcagcccgccgccggcggcgagcagcccgccgccggcggcgagcagcccgccgccggcggcgagcagcccgccgccggcggcgagcagcccgccgccggcggcgagcagcccgccgccggcggcgagcagcccgccgccggcggcgagcagcccgccgccggcggcgagcagcccgccgccggcggcgagagacccgccgccggcggcgagcagcccgccgccggcggcgagagacccgccgccggcggcgagcagcccgccgccggcggcgagcagcccgcccccgcccccagaagagagcagcccgccgccggcggcgagcagcccgcccccgcccccagaagagagcagcccgccgccggcggcgagcagcccgcccccggcgccggcgccggcgacggcgccagaggcggcaacgccggcgccggcaagggccagggccagaacaaccagggcgccaacgugcccaacgagaagguggugaacgacuaccugcacaagaccagaagcagcgugaccaccgaguggacccccugcagcgugaccugcggcaacggcgugagaaucagaagaaaggcccacgccgacaagaagaaggccgagaaccugaccauggacgaccuggagguggaggccugcgugauggacaagugcgccggcaucuucaacguggugagcaacagccugggccuggugauccugcuggugcuggcccuguucaacuga

SEQ ID NO: 4808 - RNA, 1026 nt, Artificial Sequence
  derived and/or modified CDS sequence (opt4) from Pk(SGEHIWM26-Y09-60)__AFD97238.1__CSP
augaagaacuucauccugcuggccgugagcagcauccugcugguggaccugcugcccacccacuucgagcacaacguggaccugagcagagccaucaacgugaacggcgugagcuucaacaacguggacaccagcagccugggcgccgccagagugagacagagcgccagcagaggcagaggccugggcgagaagcccaaggagggcgccgacaaggagaagaagaaggagaaggagaaggagaaggaggagcccaagaagcccaacgagaacaagcugaagcagcccgagcagcccgccgccggcgccggcggcgagcagcccgccgccggcgccggcggcgagcagcccgccgccggcgccggcggcgagcagcccgccgccggcgccggcggcgagcagcccgccgccggcgccggcggcgagcagcccgccgccggcgccggcggcgagcagcccgccgccggcgccggcggcgagcagcccgccgccggcgccggcggcgagcagcccgccgccggcgccggcggcgagcagcccgccgccggcgccggcggcgagcagcccgccgccggcgccggcggcgagcagcccgcccccgcccccagaagagagcagcccgccgccggcgccggcggcgagcagcccgcccccgcccccagaagagagcagcccgcccccggcgccggcgccggcgacggcgccagaggcggcaacgccggcgccggcaagggccagggccagaacaaccagggcgccaacgugcccaacgagaagguggugaacgacuaccugcacaagaucagaagcagcgugaccaccgaguggacccccugcagcgugaccugcggcaacggcgugagaaucagaagaagacagaacgccggcaacaagaaggccgaggaccugaccauggacgaccuggagguggaggccugcgugauggacaagugcgccggcaucuucaacguggugagcaacagccugggccuggugauccugcuggugcuggcccuguucaacuga

SEQ ID NO: 4809 - RNA, 1026 nt, Artificial Sequence
  derived and/or modified CDS sequence (opt4) from Pk(SGEHIWM35-Y09-74)__AFD97243.1__CSP
augaagaacuucauccugcuggccgugagcagcauccugcugguggaccugcugcccacccacuucgagcacaacguggaccugagcagagccaucaacgugaacggcgugagcuucaacaacguggacaccagcagccugggcgccgcccaggugagacagagcgccagcagaggcagaggccugggcgagaagcccaaggagggcgccgacaaggagaagaagaaggagaaggagaaggagaaggaggagcccaagaagcccaacgagaacaagcugaagcagcccgagcagcccgccgccggcgccggcggcgagcagcccgccgccggcgccggcggcgagcagcccgccgccggcgccggcggcgagcagcccgccgccggcgccggcggcgagcagcccgccgccggcgccggcggcgagcagcccgccgccggcgccggcggcgagcagcccgccgccggcgccggcggcgagcagcccgccgccggcgccggcggcgagcagcccgccgccggcgccggcggcgagcagcccgccgccggcgccggcggcgagcagcccgccgccggcgccggcggcgagcagcccgcccccgcccccagaagagagcagcccgccgccggcgccggcggcgagcagcccgcccccgcccccagaagagagcagcccgcccccggcgccggcgccggcgacggcgccagaggcggcaacgccggcgccggcaagggccagggccagaacaaccagggcgccaacgugcccaacgagaagguggugaacgacuaccugcacaagaucagaagcagcgugaccaccgaguggacccccugcagcgugaccugcggcaacggcgugagaaucagaagaagacagaacgccggcaacaagaaggccgaggaccugaccauggacgaccuggagguggaggccugcgugauggacaagugcgccggcaucuucaacguggugagcaacagccugggccuggugauccugcuggugcuggcccuguucaacuga

SEQ ID NO: 4810 - RNA, 1023 nt, Artificial Sequence
  derived and/or modified CDS sequence (opt4) from Pk(UM0014C4)__AHF20645.1__CSP
augaagaacuucauccugcuggccgugagcagcauccugcugguggaccugcugcccacccacuucgagcacaacguggaccugagcagagccaucaacgugaacggcgugagcuucaacaacguggacaccagcagccugggcgccgcccaggugagacagagcgccagcagaggcagaggccugggcgagaagcccaaggagggcgccgacaaggagaagaagaaggagaaggagaaggaggaggagcccaagaagcccaacgagaacaagcugaagcagcccgagcaggccagacccggcgccggcggcgagcagcccgcccccggcgccggcggcgagcagcccgcccccggcgccggcggcgagcagcccgcccccggcgccggcggcgagcagcccgcccccggcgccggcggcgagcagcccgcccccggcgccggcggcgagcagcccgcccccggcgccggcggcgagcagcccgcccccggcgccggcggcgagcagcccgcccccggcgccggcggcggccagcccgcccccggcgccggcggcgagcagcccgcccccggcgccggcggcgagcagcccgcccccgcccccagaagagagcagcccgcccccggccccggcggcgagcagcccgcccccgcccccagaagagagcagcccgcccccggcgccggcgccggcgacggcgccagaggcggcaacgccggcgccggcaagggccagggccagaacaaccagggcgccaacgugcccaacgagaagguggugaacgacuaccugcacaagaucagaagcagcgugaccaccgaguggacccccugcagcgugaccugcggcaacggcgugagaaucagaagaaagggccacgccggcaacaagaaggccgaggaccugaccauggacgaccuggagguggaggccugcgugauggacaagugcgccggcaucuucaacguggugagcaacagccugggccuggugauccugcuggugcuggcccuguucaacuga

SEQ ID NO: 4811 - RNA, 1020 nt, Artificial Sequence
  derived and/or modified CDS sequence (opt4) from Pk(LT57)__ADN94510.1__CSP
augaagaacuucauccugcuggccgugagcagcauccugcugguggaccugcugcccacccacuucgagcacaacguggaccugagcagagccaucaacgugaacggcgugagcuucaacaacguggacaccagcagccugggcgccgcccaggugagacagagcgccagcagaggcagaggccugggcgagaagagaaaggagggcgccgacaaggagaagaagaaggagaaggaggagcccaagaagcccaacgagaacaagcugaagcagcccgagcaggccagagccggcggcgagcagcccgccgccggcggcgagcagcccgccgccggcggcgagcagcccgccgccggcggcgagcagcccgccgccggcggcgagcagcccgccgccggcggcgagcagcccgccgccggcggcgagcagcccgccgccggcggcgagcagcccgccgccggcggcgagagacccgccgccggcggcgagcagcccgccgccggcggcgagcagcccgccgccggcggcgagcagcccgccgccggcggcgagagacccgccgccggcggcgagagacccgccgccggcggcgagcagcccgccgccggcggcgagcagcccgcccccgcccccagaagagagcagcccgccgccggcggcgagcagcccgcccccggcgccggcgccggcgacggcgccagaggcggcaacgccggcgccggcaagggccagggccagaacaaccagggcgccaacgugcccaacgagaagguggugaacgacuaccugcacaagaucagaagcagcgugaccaccgaguggacccccugcagcgugaccugcggcaacggcgugagaaucagaagaaaggcccacgccgacaagaagaaggccgagaaccugaccauggacgaccuggagguggaggccugcgugauggacaagugcgccggcaucuucaacguggugagcaacagccugggccuggugauccugcuggugcuggcccuguucaacuga

SEQ ID NO: 4812 - RNA, 1020 nt, Artificial Sequence
  derived and/or modified CDS sequence (opt4) from Pk(SGEHIWM17-Y09-4)__AFD97233.1__CSP
augaagaacuucauccugcuggccgugagcagcauccugcugguggaccugcugcccacccacuucgagcacaacguggaccugagcagagccaucaacgugaacggcgugagcuucaacaacgccgacaccagcagccugggcgccgcccaggugagacagagcgccagcagaggcagaggccugggcgagaagcccaaggagggcgccgacaaggagaagaagaaggagaaggaggaggagcccaagaagcccaacgagaacaagcugaagcagcccgacgccgugcccggcggcgaggagcccgcccccggcagagagcagcccgcccccggcagagaggagcccgcccccggcagagagcagcccgcccccggcagagaggagcccgcccccggcagagagcagcccgcccccggcagagaggagcccgcccccggcagagagcagcccgcccccggcagagagcagcccgcccccggcagagaggagcccgcccccggcagagagcagcccgcccccggcagagaggagcccgcccccggcagagagcagcccgcccccggcagagagcagcccgcccccggcagagagcagcccgcccccggcggcgagcagcccgcccccggcagagagcagcccgcccccggcggcgagcagcccgcccccgcccccggcgccggcgccggcgacggcgccagaggcggcaacgccggcgccggcaagggccagggccagaacaaccagggcgccaacgugcccaacgagaagguggugaacgacuaccugcacaagaucagaagcagcgugaccaccgaguggacccccugcagcgugaccugcggcaacggcgugagaaucagaagaaagggccacgccggcaacaagaaggccgaggaccugaccauggacgaccuggagguggaggccugcgugauggacaagugcgccggcaucuucaacguggugagcaacagccugggccuggugauccugcuggugcuggcccuguucaacuga

SEQ ID NO: 4813 - RNA, 1020 nt, Artificial Sequence
  derived and/or modified CDS sequence (opt4) from Pk(SGEHIWM26-Y09-123)__AFD97240.1__CSP
augaagaacuucauccugcuggccgugagcagcauccugcugguggaccugcugcccacccacuucgagcacaacguggaccugagcagagccaucaacgugaacggcgugagcuucaacaacguggacaccagcagccugggcgccgcccaggugagacagagcgccagcagaggcagaggccugggcgagaagcccaaggagggcgccgacaaggagaagaagaaggagaaggaggaggagcccaagaagcccaacgagaacaagcugaagcagcccgacgccgugcccggcggcgaggagcccgcccccggcagagagcagcccgcccccggcagagaggagcccgcccccggcagagagcagcccgcccccggcagagaggagcccgcccccggcagagagcagcccgcccccggcagagaggagcccgcccccggcagagagcagcccgcccccggcagagagcagcccgcccccggcagagaggagcccgcccccggcagagagcagcccgcccccggcagagaggagcccgcccccggcagagagcagcccgcccccggcagagagcagcccgcccccggcagagagcagcccgcccccggcggcgagcagcccgcccccggcagagagcagcccgcccccggcggcgagcagcccgcccccgcccccggcgccggcgccggcgacggcgccagaggcggcaacgccggcgccggcaagggccagggccagaacaaccagggcgccaacgugcccaacgagaagguggugaacgacuaccugcacaagaucagaagcagcgugaccaccgaguggacccccugcagcgugaccugcggcaacggcgugagaaucagaagaaagggccacgccggcaacaagaaggccgaggaccugaccauggacgaccuggagguggaggccugcgugauggacaagugcgccggcaucuucaacguggugagcaacagccugggccuggugauccugcuggugcuggcccuguucaacuga

SEQ ID NO: 4814 - RNA, 1020 nt, Artificial Sequence
  derived and/or modified CDS sequence (opt4) from Pk(TN003)__AFG25477.1__CSP
augaagaacuucauccugcuggccgugagcagcauccugcugguggaccuguuccccacccacuucgagcacaacguggaccugagcagagccaucaacgugaacggcgugagcuucaacaacguggacaccagcagccugggcgccgcccaggugagacagagcgccagcagaggcagaggccugggcgagaagcccaaggagggcgccgacaaggagaagaagaaggagaaggaggagaagcccaagaagcccaacgagaacaagcugaagcagcccgccgccggcggcgagcagcccgccgccggcggcgagcagcccgccgccggcggcgagcagcccgccgccggcggcgagcagcccgccgccggcggcgagcagcccgccgccggcggcgagcagcccgccgccggcggcgagagacccgccgccggcggcgagcagcccgccgccggcggcgagcagcccgccgccggcggcgagagacccgccgccggcggcgagcagcccgccgccggcggcgagagacccgccgccggcggcgagcagcccgccgccggcggcgagcagcccgccgccggcggcgagcagcccgcccccgcccccagaagagagcagcccguggccggcggcgagcagcccgcccccgcccccagaagagagcagcccgcccccggcgccggcgccggcgacggcgccagaggcggcaacgccggcgccggcaagggccagggccagaacaaccagggcgccaacgugcccaacgagaagguggugaacgacuaccugcacaagaucagaagcagcgugaccaccgaguggacccccugcagcgugaccugcggcaacggcgugagaaucagaagaagacagaacgccggcaacaagaaggccgaggaccugaccauggacgaccuggagguggaggccugcgugauggacaagugcgccggcaucuucaacguggugagcaacagccugggccuggugauccugcuggugcuggcccuguucaacuga

SEQ ID NO: 4815 - RNA, 1017 nt, Artificial Sequence
  derived and/or modified CDS sequence (opt4) from Pk(LT53)__ADN94524.1__CSP
augagaaacuucauccugcuggccgugagcagcauccugcugguggaccugcugcccacccacuucgagcacaacguggaccugagcagagccaucaacgugaacggcgugagcuucaacaacguggacaccagcagccugggcgccgcccaggugagacagagcgccagcagaggcagaggccugggcgagaagagaaaggagggcgccgacaaggagaagaagaaggagaaggaggaggagcccaagaagcccaacgagaacaagcugaagcagcccgagcaggagagacccggcggcgagcagcccgcccccggccccggcggcgagcagcccgcccccggccccggcggcgagcagcccgcccccagacccggcggcgagcagcccgcccccggccccggcggcgagcagcccgcccccggccccggcggcgagcagcccgcccccggccccggcggcgagcagcccgcccccagacccggcggcgagcagcccgcccccggccccggcggcgagcagcccgcccccagacccggcggcgagcagcccgcccccggccccggcggcgagcagcccgcccccagacccggcggcgagcagcccgcccccggccccggcggcgagcagcccgcccccgcccccagaagagagcagcccgcccccgcccccggcgccggcgccggcgacggcgccagaggcggcaacgccggcgccggcaagggccagggccagaacaaccagggcgccaacgugcccaacgagaagguggugaacgacuaccugcacaagaucagaagcagcgugaccaccgaguggacccccugcagcgugaccugcggcaacggcgugagaaucagaagaagacagaacgccggcaacaagaaggccgaggaccugaccauggacgaccuggagguggaggccugcgugauggacaagugcgccggcaucuucaacguggugagcaacagccugggccuggugauccugcuggugcuggcccuguucaacuga

SEQ ID NO: 4816 - RNA, 1014 nt, Artificial Sequence
  derived and/or modified CDS sequence (opt4) from Pk(KH229)__ADN94485.1__CSP
augagaaacuucauccugcuggccgugagcagcauccugcugguggaccugcugcccacccacuucgagcacaacguggaccugagcagagccaucaacgugaacggcgugagcuucaacaacguggacaccagcagccugggcgccgcccaggugagacagagcgccagcagaggcagaggccugggcgagaagcccaaggagggcgccgacaaggagaagaagaaggagaaggaggagaagcccaagaagcccaacgagaacaagcugaagcagcccggcggcgagcagcccgccgccggcggcgagcagcccgccgccggcggcgagcagcccgccgccggcggcgagcagcccgccgccggcggcgagagacccgccgccggcggcgagcagcccgccgccggcggcgagcagcccgccgccggcggcgagcagcccgccgccggcggcgagcagcccgccgccggcggcgagagacccgccgccggcggcgagcagcccgccgccggcggcgagcagcccgccgccggcggcgagcagcccgccgccggcggcgagagacccgccgccggcggcgagcagcccgcccccgcccccagaagagagcagcccgccgccggcggcgagcagcccgcccccgcccccagaagagagcagcccgcccccggcgccggcgccggcgacggcgccagaggcggcaacgccggcgccggcaagggccagggccagaacaaccagggcgccaacgugcccaacgagaagguggugaacgacuaccugcacaagaucagaagcagcgugaccaccgaguggacccccugcagcgugaccugcggcaacggcgugagaaucagaagaagacagaacgccggcaacaagaaggccgaggaccugaccauggacgaccuggagguggaggccugcgugauggacaagugcgccggcaucuucaacguggugagcaacagccugggccuggugauccugcuggugcuggcccuguucaacuga

SEQ ID NO: 4817 - RNA, 1014 nt, Artificial Sequence
  derived and/or modified CDS sequence (opt4) from Pk(KH468)__ADN94487.1__CSP
augaagaacuucauccugcuggccgugagcagcauccugcugguggaccuguuccccacccacuucgagcacaacguggaccugagcagagccaucaacgugaacggcgugagcuucaacaacguggacaccagcagccugggcgccgcccaggugagacagagcgccagcagaggcagaggccugggcgagaagcccaaggagggcgccgacaaggagaagaagaaggagaaggaggagaagcccaagaagcccaacgagaacaagcugaagcagcccggcggcgagcagcccgccgccggcggcgagcagcccgccgccggcggcgagcagcccgccgccggcggcgagcagcccgccgccggcggcgagagacccgccgccggcggcgagcagcccgccgccggcggcgagcagcccgccgccggcggcgagcagcccgccgccggcggcgagcagcccgccgccggcggcgagagacccgccgccggcggcgagcagcccgccgccggcggcgagcagcccgccgccggcggcgagagacccgccgccggcggcgagcagcccgccgccggcggcgagcagcccgcccccgcccccagaagagagcagcccgccgccggcggcgagcagcccgcccccgcccccagaagagagcagcccgcccccggcgccggcgccggcgacggcgccagaggcggcaaccccggcgccggcaagggccagggccagaacaaccagggcgccaacgugcccaacgagaagguggugaacgacuaccugcacaagaucagaagcagcgugaccaccgaguggacccccugcagcgugaccugcggcaacggcgugagaaucagaagaagacagaacgccggcaacaagaaggccgaggaccugaccauggacgaccuggagguggaggccugcgugauggacaagugcgccggcaucuucaacguggugagcaacagccugggccuggugauccugcuggugcuggcccuguucaacuga

SEQ ID NO: 4818 - RNA, 1014 nt, Artificial Sequence
  derived and/or modified CDS sequence (opt4) from Pk(LT33)__ADN94523.1__CSP
augagaaacuucauccugcuggccgugagcagcauccugcugguggaccugcugcccacccacuucgagcacaacguggaccugagcagagccaucaacgugaacggcgugagcuucaacaacguggacaccagcagccugggcgccgcccaggugagacagagcgccagcagaggcagaggccugggcgagaagagaaaggagggcgccgacaaggagaagaagaaggagaaggaggaggagcccaagaagcccaacgagaacaagcugaagcagcccggcggcgagcagcccgccgccggcggcgagcagcccgccgccggcggcgagcagcccgccgccggcggcgagcagcccgccgccggcggcgagagacccgccgccggcggcgagcagcccgccgccggcggcgagcagcccgccgccggcggcgagcagcccgccgccggcggcgagcagcccgccgccggcggcgagagacccgccgccggcggcgagcagcccgccgccggcggcgagcagcccgccgccggcggcgagagacccgccgccggcggcgagcagcccgccgccggcggcgagcagcccgcccccgcccccagaagagagcagcccgccgccggcggcgagcagcccgcccccgcccccagaagagagcagcccgcccccggcgccggcgccggcgacggcgccagaggcggcaaccccggcgccggcaagggccagggccagaacaaccagggcgccaacgugcccaacgagaagguggugaacgacuaccugcacaagaucagaagcagcgugaccaccgaguggacccccugcagcgugaccugcggcaacggcgugagaaucagaagaagacagaacgccggcaacaagaaggccgaggaccugaccauggacgaccuggagguggaggccugcgugauggacaagugcgccggcaucuucaacguggugagcaacagccugggccuggugauccugcuggugcuggcccuguucaacuga

SEQ ID NO: 4819 - RNA, 1014 nt, Artificial Sequence
  derived and/or modified CDS sequence (opt4) from Pk(LT64)__ADN94520.1__CSP
augaagaacuucauccugcuggccgugagcagcauccugcugguggaccuguuccccacccacuucgagcacaacguggaccugagcagagccaucaacgugaacggcgugagcuucaacaacguggacaccagcagccugggcgccgcccaggugagacagagcgccagcagaggcagaggccugggcgagaagcccaaggagggcgccgacaaggagaagaagaaggagaaggaggagaagcccaagaagcccaacgagaacaagcugaagcagcccggcggcgagcagcccgccgccggcggcgagcagcccgccgccggcggcgagcagcccgccgccggcggcgagcagcccgccgccggcggcgagcagcccgccgccggcggcgagcagcccgccgccggcggcgagagacccgccgccggcggcgagcagcccgccgccggcggcgagcagcccgccgccggcggcgagagacccgccgccggcggcgagcagcccgccgccggcggcgagagacccgccgccggcggcgagcagcccgccgccggcggcgagcagcccgccgccggcggcgagcagcccgcccccgcccccagaagagagcagcccgccgccggcggcgagcagcccgcccccgcccccagaagagagcagcccgcccccggcgccggcgccggcgacggcgccagaggcggcaacgccggcgccggcaagggccagggccagaacaaccagggcgccaacgugcccaacgagaagguggugaacgacuaccugcacaagaucagaagcagcgugaccaccgaguggacccccugcagcgugaccugcggcaacggcgugagaaucagaagaagacagaacgccggcaacaagaaggccgaggaccugaccauggacgaccuggagguggaggccugcgugauggacaagugcgccggcaucuucaacguggugagcaacagccugggccuggugauccugcuggugcuggcccuguucaacuga

SEQ ID NO: 4820 - RNA, 1014 nt, Artificial Sequence
  derived and/or modified CDS sequence (opt4) from Pk(TB016)__AFG25473.1__CSP
augaagaacuucauccugcuggccgugagcagcauccugcugguggaccuguuccccacccacuucgagcacaacguggaccugagcagagccaucaacgugaacggcgugagcuucaacaacguggacaccagcagccugggcgccgcccaggugagacagagcgccagcagaggcagaggccugggcgagaagcccaaggagggcgccgacaaggagaagaagaaggagaaggaggagaagcccaagaagcccaacgagaacaagcugaagcagcccggcggcgagcagcccgccgccggcggcgagcagcccgccgccggcggcgagcagcccgccgccggcggcgagcagcccgccgccggcggcgagagacccgccgccggcggcgagcagcccgccgccggcggcgagcagcccgccgccggcggcgagcagcccgccgccggcggcgagcagcccgccgccggcggcgagagacccgccgccggcggcgagcagcccgccgccggcggcgagcagcccgccgccggcggcgagagacccgccgccggcggcgagcagcccgccgccggcggcgagcagcccgcccccgcccccagaagagagcagcccgccgccggcggcgagcagcccgcccccgcccccagaagagagcagcccgcccccggcgccggcgccggcgacggcgccagaggcggcaacgccggcgccggcaagggccagggccagaacaaccagggcgccaacgugcccaacgagaagguggugaacgacuaccugcacaagaucagaagcagcgugaccaccgaguggacccccugcagcgugaccugcggcaacggcgugagaaucagaagaagacagaacgccggcaacaagaaggccgaggaccugaccauggacgaccuggagguggaggccugcgugauggacaagugcgccggcaucuucaacguggugagcaacagccugggccuggugauccugcuggugcuggcccuguucaacuga

SEQ ID NO: 4821 - RNA, 1014 nt, Artificial Sequence
  derived and/or modified CDS sequence (opt4) from Pk(UM0021C10)__AHF20667.1__CSP
augaagaacuucauccugcuggccgugagcagcauccugcugguggaccuguuccccacccacuucgagcacaacguggaccugagcagagccaucaacgugaacggcgugagcuucaacaacguggacaccagcagccugggcgccgcccaggugagacagagcgccagcagaggcagaggccugggcgagaagcccaaggagggcgccgacaaggagaagaagaaggagaaggaggagaagcccaagaagcccaacgagaacaagcugaagcagcccggcggcgagcagagcgccgccggcggcgagcagcccgccgccggcggcgagcagcccgccgccggcggcgagcagcccgccgccggcggcgagcagcccgccgccggcggcgagcagcccgccgccggcggcgagagacccgccgccggcggcgagcagcccgccgccggcggcgagcagcccgccgccggcggcgagagacccgccgccggcggcgagcagcccgccgccggcggcgagagacccgccgccggcggcgagcagcccgccgccggcggcgagcagcccgccgccggcggcgagcagcccgcccccgcccccagaagagagcagcccgccgccggcggcgagcagcccgcccccgcccccagaagagagcagcccgcccccggcgccggcgccggcgacggcgccagaggcggcaacgccggcgccggcaagggccagggccagaacaaccagggcgccaacgugcccaacgagaagguggugaacgacuaccugcacaagaucagaagcagcgugaccaccgaguggacccccugcagcgugaccugcggcaacggcgugagaaucagaagaagacagaacgccggcaacaagaaggccgaggaccugaccauggacgaccuggagguggaggccugcgugauggacaagugcgccggcaucuucaacguggugagcaacagccugggccuggugauccugcuggugcuggcccuguucaacuga

SEQ ID NO: 4822 - RNA, 1011 nt, Artificial Sequence
  derived and/or modified CDS sequence (opt4) from Pk(UMRAC2)__AHF20618.1__CSP
augaagaacuucauccugcuggccgugagcagcauccugcugguggaccugcugcccacccacuucgagcacaacguggaccugagcagagccaucaacgugaacggcgugagcuucaacaacguggacaccagcagccugggcgccgcccaggugagacagagcgccagcagaggcagaggccugggcgagaagcccaaggagggcgccgacaaggagaagaagaaggagaaggagaaggaggaggagcccaagaagcccaacgagaacaagcugaagcagcccgagggcaacagagaggcccccggccagcccgagggcaacagagaggcccccggccagcccgagggcaacagagaggcccccggccagcccgagggcaacagagaggcccccggccagcccgagggcaacagagaggcccccggccagcccgagggcaacagagaggcccccggccagcccgagggcaacagagaggcccccggccagcccgagggcaacagagaggcccccgcccagcccgagggcaacagagaggcccccggccagcccgagggcaacagagaggcccccgcccagccccagggcaacggcggcgccggccaggcccagcccgagggcaacagagaggcccccgcccagccccagggcaacggcggcgccggccaggcccagccccagaagaacgagggcggcaacgccggcgccagaaagggccagggccagaacaaccagggcgccaacgugcccaacgagaagguggugaacgacuaccugcacaagaucagaagcagcgugaccaccgaguggacccccugcagcgugaccugcggcaacggcgugagaaucagaagaaagggccacgccggcaacaagaaggccgaggaccugaccauggacgaccuggagguggaggccugcgugauggacaagugcgccggcaucuucaacguggugagcaacagccugggccuggugauccugcuggugcuggcccuguucaacuga

SEQ ID NO: 4823 - RNA, 1008 nt, Artificial Sequence
  derived and/or modified CDS sequence (opt4) from Pk(UMANC1)__AHF20619.1__CSP
augaagaacuucauccugcuggccgugagcagcauccugcugguggaccugcugcccacccacuucgagcacaacguggaccugagcagagccaucaacgugaacggcgugagcuucaacaacguggacaccagcagccugggcgccgcccaggugagacagagcgccagcagaggcagaggccugggcgagaagcccaaggagggcgccgacaaggagaagaagaaggagaaggagaaggaggaggagcccaagaagcccaacgagaacaagcugaagcagcccgagggcaacagagaggcccccggccagcccgagggcaacagagaggcccccggccagcccgagggcaacagagaggcccccggccagcccgagggcaacagagaggcccccggccagcccgagggcaacagagaggcccccggccagcccgagggcaacagagaggcccccggccagcccgagggcaacagagaggcccccggccagcccgagggcaacagagaggcccccggccagcccgagggcaacagagaggcccccggccagcccgagggcaacagagaggcccccggccagcccgagggcaacagagaggcccccgcccagcccgagggcaacagagaggcccccgcccagccccagggcaacggcggcgccggccaggcccagccccagaagaacgagggcggcaacgccggcgccagaaagggccagggccagaacaaccagggcgccaacgcccccaacgagaagguggugaacgacuaccugcagaagaucagaagcagcgugaccaccgaguggacccccugcagcgugaccugcggcaacggcgugagaaucaagagaaaggcccacgccgacaagaagaaggccgaggaccugaccauggacgaccuggagguggaggccugcgugauggacaagugcgccggcaucuucaacguggugagcaacagccugggccuggugauccugcuggugcuggcccuguucaacuga

SEQ ID NO: 4824 - RNA, 1002 nt, Artificial Sequence
  derived and/or modified CDS sequence (opt4) from Pk(LT48)__ADN94505.1__CSP
augagaaacuucauccugcuggccgugagcagcauccugcugguggaccugcugcccacccacuucgagcacaacguggaccugagcagagccaucaacgugaacggcgugagcuucaacaacguggacaccagcagccugggcgccgcccaggugagacagagcgccagcagaggcagaggccugggcgagaagagaaaggagggcgccgacaaggagaagaagaaggagaaggaggaggagcccaagaagcccaacgagaacaagcugaagcagcccaacgccgagggcggcgccaacgccggccagcccaacgccgagggcggcgccaacgccggccagcccaacgccgagggcggcgccaacgccggccagcccaacgccgagggcggcgccaacgccggccagcccaacgccgagggcggcgccaacgccggccagcccaacgccgagggcggcgccaacgccggccagcccaacgccgagggcggcgccaacgccggccagcccaacgccgagggcggcgccaacgccggccagcccaacgccgagggcggcgccaacgccggccagcccaacgccgagggcggcgccaacgccggccagcccaacgccgagggcggcgccaacgccagacagccccaggccgagggcggcggcgccaacgccagacagggcggcaacgagggcaacaagcaggccggcaagggccagggccagaacaaccagggcgccaacgcccccaacgagaagguggugaacgacuaccugcagaagaucagaagcagcgugaccaccgaguggacccccugcagcgugaccugcggcaacggcgugagaaucagaagaagagcccacgccgacaagaagaaggccgaggaccugaccauggacgaccuggagguggaggccugcgugauggacaagugcgccggcaucuucaacguggugagcaacagccugggccuggugauccugcuggugcuggcccuguucaacuga

SEQ ID NO: 4825 - RNA, 993 nt, Artificial Sequence
  derived and/or modified CDS sequence (opt4) from Pk(KH176)__ADN94486.1__CSP
augaagaacuucauccugcuggccgugagcagcauccugcugguggaccuguuccccacccacuucgagcacaacguggaccugagcagagccaucaacgugaacggcgugagcuucaacaacguggacaccagcagccugggcgccgcccaggugagacagagcgccagcagaggcagaggccugggcgagaagcccaaggagggcgccgacaaggagaagaagaaggagaaggaggagaagcccaagaagcccaacgagaacaagcugaagcagcccggcggcgagcagcccgccgccggcggcgagcagcccgccgccggcggcgagcagcccgccgccggcggcgagcagcccgccgccggcggcgagcagcccgccgccggcggcgagagacccgccgccggcggcgagcagcccgccgccggcggcgagcagcccgccgccggcggcgagagacccgccgccggcggcgagcagcccgccgccggcggcgagagacccgccgccggcggcgagcagcccgccgccggcggcgagcagcccgccgccggcggcgagcagcccgcccccgcccccagaagagagcagcccgccgccggcggcgagcagcccgcccccgcccccagaagagagcagcccgcccccggcgccggcgccggcgacggcgccagaggcggcaacgccggcgccggcaagggccagggccagaacaaccagggcgccaacgugcccaacgagaagguggugaacgacuaccugcacaagaucagaagcagcgugaccaccgaguggacccccugcagcgugaccugcggcaacggcgugagaaucagaagaagacagaacgccggcaacaagaaggccgaggaccugaccauggacgaccuggagguggaggccugcgugauggacaagugcgccggcaucuucaacguggugagcaacagccugggccuggugauccugcuggugcuggcccuguucaacuga

SEQ ID NO: 4826 - RNA, 993 nt, Artificial Sequence
  derived and/or modified CDS sequence (opt4) from Pk(LT36)__ADN94511.1__CSP
augagaaacuucauccugcuggccgugagcagcauccugcugguggaccugcugcccacccacuucgagcacaacguggaccugagcagagccaucaacgugaacggcgugagcuucaacaacguggacaccagcagccugggcgccgcccaggugagacagagcgccagcagaggcagaggccugggcgagaagagaaaggagggcgccgacaaggagaagaagaaggagaaggaggagaagcccaagaagcccaacgagaacaagcugaagcagcccggcggcgagcagcccgccgccggcggcgagcagcccgccgccggcggcgagcagcccgccgccggcggcgagcagcccgccgccggcggcgagcagcccgccgccggcggcgagcagcccgccgccggcggcgagcagcccgccgccggcggcgagcagcccgccgccggcggcgagcagcccgccgccggcggcgagcagcccgccgccggcggcgagcagcccgccgccggcggcgagcagcccgcccccgcccccagaagagagcagcccgccgccggcggcgagcagcccgccgccggcggcgagcagcccgcccccgcccccagaagagagcagcccgcccccggcggcgagcagcccgcccccggcgccggcgccggcgacggcgccagaggcggcaaccccggcgccggcaagggccagggccagaacaaccagggcgccaacgugcccaacgagaagguggugaacgacuaccugcacaagaucagaagcagcgugaccaccgaguggacccccugcagcgugaccugcggcaacggcgugagaaucagaagaaaggcccacgccgacaagaagaaggccgagaaccugaccauggacgaccuggagguggaggccugcgugauggacaagugcgccggcaucuucaacguggugagcaacagccugggccuggugauccugcuggugcuggcccuguucaacuga

SEQ ID NO: 4827 - RNA, 993 nt, Artificial Sequence
  derived and/or modified CDS sequence (opt4) from Pk(TB066)__AFG25475.1__CSP
augaagacccuguuccugcuggccgugagcagcauccugcugguggaccuguuccccacccacuucgagcacaacguggaccugagcagagccaucaacgugaacggcgugagcuucaacaacguggacaccagcagccugggcgccgcccaggugagacagagcgccagcagaggcagaggccugggcgagaagagaaaggagggcgccgacaaggagaagaagaaggagaaggaggagaagcccaagaagcccaacgagaacaagcugaagcagcccggcggcgagcagcccgccgccggcggcgagcagcccgccgccggcggcgagcagcccgccgccggcggcgagcagcccgccgccggcggcgagcagcccgccgccggcggcgagcagcccgccgccggcggcgagcagcccgccgccggcggcgagcagcccgccgccggcggcgagcagcccgccgccggcggcgagcagcccgccgccggcggcgagcagcccgccgccggcggcgagcagcccgcccccgcccccagaagagagcagcccgccgccggcggcgagcagcccgccgccggcggcgagcagcccgcccccgcccccagaagagagcagcccgccgccggcggcgagcagcccgcccccggcgccggcgccggcgacggcgccagaggcggcaaccccggcgccggcaagggccagggccagaacaaccagggcgccaacgugcccaacgagaagguggugaacgacuaccugcacaagaucagaagcagcgugaccaccgaguggacccccugcagcgugaccugcggcaacggcgugagaaucagaagaaaggcccacgccgacaagaagaaggccgagaaccugaccauggacgaccuggagguggaggccugcgugauggacaagugcgccggcaucuucaacguggugagcaacagccugggccuggugauccugcuggugcuggcccuguucaacuga

SEQ ID NO: 4828 - RNA, 993 nt, Artificial Sequence
  derived and/or modified CDS sequence (opt4) from Pk(UM006C6)__AHF20642.1__CSP
augaagaacuucauccugcuggccgugagcagcauccugcugguggaccugcugcccacccacuucgagcacaacguggaccugagcagagccaucaacgugaacggcgugagcuucaacaacguggacaccagcagccugggcgccgcccaggugagacagagcgccagcagaggcagaggccugggcgagaagcccaaggagggcgccgacaaggagaagaagaaggagaaggaggaggagcccaagaagcccaacggcaacaagcugaagcagcccgcccccggcggcgagcagcccgcccccggcggcgagcagcccgcccccggcggcgagcagcccgcccccggcggcgagcagcccgcccccggcggcgagcagcccgcccccggcggcgagcagcccgcccccggcggcgagcagcccgcccccggcggcgagcagcccgcccccggcggcgagcagcccgcccccggcggcgagcagcccgcccccggcggcgagcagcccgcccccggcggcgagcagcccgcccccggcggcgagcagcccgcccccgcccccagaagagagcagcccgcccccggcggcgagcagcccgcccccggcggcgagcagcccgcccccagaagagagcagcccgcccccggcgccggcgccggcgacggcgccagaggcggcaacgccggcgccggcaagggccagggccagaacaaccagggcgccagcgugcccaacgagaagguggugaacgacuaccugcacaagaucagaagcagcgugaccaccgaguggacccccugcagcgugaccugcggcaacggcgugagaaucagaagaaaggcccacgccgacaagaagaaggccgaggaccugaccauggacgaccuggagguggaggccugcgugauggacaagugcgccggcaucuucaacguggugagcaacagccugggccuggugauccugcuggugcuggcccuguucaacuga

SEQ ID NO: 4829 - RNA, 984 nt, Artificial Sequence
  derived and/or modified CDS sequence (opt4) from Pk(UM004C4)__AHF20641.1__CSP
augaagaacuucauccugcuggccgugagcagcauccugcugguggaccugcugcccacccacuucgagcacaacguggaccugagcagagccaucaacgugaacggcgugagcuucaacaacguggacaccagcagccugggcgccgcccaggugagacagagcgccagcagaggcagaggccugggcgagaagcccaaggagggcgccgacaaggagaagaagaaggagaagggcaaggagaaggaggaggagcccaagaagcccaacgagaacaagcugaagcagcccaacgagggccagccccaggcccagggcgacggcgccaacgccggccagccccaggcccagggcgacggcgccaacgccggccagccccaggcccagggcgacggcgccaacgccggccagccccaggcccagggcgacggcgccaacgccggccagccccaggcccagggcgacggcgccaacgccggccagccccaggcccagggcgacggcgccaacgccggccagccccaggcccagggcgacggcgccaacgccggccagccccaggcccagggcgacagagccaacgccggccagccccaggcccagggcgacggcgccaacgugcccagacagggcagaaacggcggcggcgcccccgccggcggcaacgagggcaacaagcaggccggcaagggccagggccagaacaaccagggcgccaacgcccccaacgagaagguggugaacgacuaccugcacaagaucagaagcagcgugaccaccgaguggacccccugcagcgugaccugcggcaacggcgugagaaucagaagaaaggcccacgccggcaacaagaaggccgaggaccugaccguggacgaccuggagguggaggccugcgugauggacaagugcgccggcaucuucaacguggugagcaacagccugggccuggugauccugcuggugcuggcccuguucaacuga

SEQ ID NO: 4830 - RNA, 978 nt, Artificial Sequence
  derived and/or modified CDS sequence (opt4) from Pk(UMHAC5)__AHF20632.1__CSP
augaagaacuucauccugcuggccgugagcagcauccugcugguggaccugcugcccacccacuucgagcacaacguggaccugagcagagccaucaacgugaacggcgugagcuucaacaacguggacaccagcagccugggcgccgcccaggugagacagagcgccagcagaggcagaggccugggcgagaagcccaaggagggcgccgacaaggagaagaagaaggagaaggagaaggaggaggagcccaagaagcccaacgagaacaagcugaagcagcccgagggcaacagagaggcccccggccagcccgagggcaacagagaggcccccggccagcccgagggcaacagagaggcccccggccagcccgagggcaacagagaggcccccggccagcccgagggcaacagagaggcccccggccagcccgagggcaacagagaggcccccggccagcccgagggcaacagagaggcccccggccagcccgagggcaacagagaggcccccgcccagcccgagggcaacagagaggcccccggccagcccgagggcaacagagaggcccccgcccagcccgagggcaacagagagacccccgcccagccccagggcaacggcggcgccggccaggcccagccccagaagaacgagggcggcaacgccggcgccagaaagggccagggccagaacaaccagggcgccaacgcccccaacgagaagguggugaacgacuaccugcagaagaucagaagcagcgugaccaccgaguggacccccugcagcgugaccugcggcaacggcgugagaaucaagagaaaggcccacgccgacaagaagaaggccgaggaccugaccauggacgaccuggagguggaggccugcgugauggacaagugcgccggcaucuucaacguggugagcaacagccugggccuggugauccugcuggugcuggcccuguucaacuga

SEQ ID NO: 4831 - RNA, 978 nt, Artificial Sequence
  derived and/or modified CDS sequence (opt4) from Pk(UMSYC3)__AHF20626.1__CSP
augaagaacuucauccugcuggccgugagcagcauccugcugguggaccugcugcccacccacuucgagcacaacguggaccugagcagagccaucaacgugaacggcgugagcuucaacaacguggacaccagcagccugggcgccgcccaggugagacagagcgccagcagaggcagaggccugggcgagaagcccaaggagggcgccgacaaggagaagaagaaggagaaggagaaggaggaggagcccaagaagcccaacgagaacaagcugaagcagcccgagggcaacagagaggcccccggccagcccgagggcaacagagaggcccccggccagcccgagggcaacagagaggcccccggccagcccgagggcaacagagaggcccccggccagcccgagggcaacagagaggcccccggccagcccgagggcaacagagaggcccccggccagcccgagggcaacagagaggcccccggccagcccgagggcaacagagaggcccccgcccagcccgagggcaacagagaggcccccggccagcccgagggcaacagagaggcccccgcccagcccgagggcaacagagaggcccccgcccagccccagggcaacggcggcgccggccaggcccagccccagaagaacgagggcggcaacgccggcgccagaaagggccagggccagaacaaccagggcgccaacgcccccaacgagaagguggugaacgacuaccugcagaagaucagaagcagcgugaccaccgaguggacccccugcagcgugaccugcggcaacggcgugagaaucaagagaaaggcccacgccgacaagaagaaggccgaggaccugaccauggacgaccuggagguggaggccugcgugauggacaagugcgccggcaucuucaacguggugagcaacagccugggccuggugauccugcuggugcuggcccuguucaacuga

SEQ ID NO: 4832 - RNA, 966 nt, Artificial Sequence
  derived and/or modified CDS sequence (opt4) from Pk(LT33)__ADN94509.1__CSP
augaagaacuucauccugcuggccgugagcagcauccugcugguggaccugcugcccacccacuucgagcacaacguggaccugagcagagccaucaacgugaacggcgugagcuucaacaacguggacaccagcagccugggcgccgcccaggugagacagagcgccagcagaggcagaggccugggcgagaagagaaaggagggcgccgacaaggagaagaagaaggagaaggaggaggagcccaagaagcccaacgagaacaagcugaagcagcccgagcaggccagagccggcggcgagcagcccgccgccggcggcgagcagcccgccgccggcggcgagcagcccgccgccggcggcgagcagcccgccgccggcggcgagcagcccgccgccggcggcgagcagcccgccgccggcggcgagcagcccgccgccggcggcgagcagcccgccgccggcggcgagcagcccgccgccggcggcgagcagcccgccgccggcggcgagcagcccgcccccgcccccagaagagagcagcccgccgccggcggcgagcagcccgcccccgcccccagaagagagcagcccgccgccggcggcgagcagcccgcccccggcgccggcgccggcgacggcgccagaggcggcaacgccggcgccggcaagggccagggccagaacaaccagggcgccaacgugcccaacgagaagguggugaacgacuaccugcacaagaucagaagcagcgugaccaccgaguggacccccugcagcgugaccugcggcaacggcgugagaaucagaagaaaggcccacgccgacaagaagaaggccgagaaccugaccauggacgaccuggagguggaggccugcgugauggacaagugcgccggcaucuucaacguggugagcaacagccugggccuggugauccugcuggugcuggcccuguucaacuga

SEQ ID NO: 4833 - RNA, 960 nt, Artificial Sequence
  derived and/or modified CDS sequence (opt4) from Pk(UM0032C4)__AHF20653.1__CSP
augaagaacuucauccugcuggccgugagcagcauccugcugguggaccugcugcccacccacuucgagcacaacguggaccugagcagagccaucaacgugaacggcgugagcuucaacaacguggacaccagcagccugggcgccgcccaggugagacagagcgccagcagaggcagaggccugggcgagaagcccaaggagggcgccgacaaggagaagaagaaggagaaggagaaggaggaggagcccaagaagcccaacgagaacaagcugaagcagcccaacgccgagggcgacggcgccaacgccagacagcccaacgccgagggcgacggcgccaacgccagacagcccaacgccgagggcgacggcgccaacgccagacagcccaacgccgagggcgacggcgccaacgccagacagcccaacgccgagggcgacggcgccaacgccagacagcccaacgccgagggcgacggcgccaacgccagacagcccaacgccgagggcggcggcgccaacgccagacagccccaggccgagggcgacggcgccaacgccagacagccccaggcccagggcgacggcggcaacgccagacagggcggcaacggcggcggcgcccccgccggcggcaacgagggcaacaagcaggccggcaagggccagggccagaacaaccagggcgccaacgcccccaacgagaagguggugaacgacuaccugcagaagaucagaagcagcgugaccaccgaguggacccccugcagcgugaucugcggcaacggcgugagaaucagaagaagagcccacgccgacaagaagaaggccgaggaccugaccauggacgaccuggagguggaggccugcgugauggacaagugcgccggcaucuucaacguggugagcaacagccugggcuucgugauccugcuggugcuggcccuguucaacuga

SEQ ID NO: 4834 - RNA, 951 nt, Artificial Sequence
  derived and/or modified CDS sequence (opt4) from Pk(SGEHIH1-im-Y09-80)__AFD97207.1__CSP
augaagaacuucauccugcuggccgugagcagcauccugcugguggaccugcugcccacccacuucgagcacaacguggaccugagcagagccaucaacgugaacggcgugagcuucaacaacguggacaccagcagccugggcgccgcccaggugagacagagcgccagcagaggcagaggccugggcgagaagcccaaggagggcgacgacaaggagaagaagaaggagaaggagaaggaggaggagcccaagaagcugaacgagaacaaccccaagaagcccaacgaggagggcgacggcgccaagcugaagcagcccaacgaggagggcgacggcgccaagcugaagcagcccaacgccgagggcggcgccaacgccggccagcccaacgccgagggcggcgccaacgccggccagcccaacgccgagggcggcgccaacgccagacagcccaacgccgagggcggcgccaacgccggccagcccaacgccgagggcggcgccaacgccggccagcccaacgccgagggcggcgccaacgccagacagccccaggccgagggcggcggcgccaacgccagacagccccaggccgagggcggcggcgccaacgccagacagggcggcaacgagggcaacaagcaggccggcaagggccagggccagaacaaccagggcgccaacgcccccaacgagaagguggugaacgacuaccugcagaagaucagaagcagcgugaccaucgaguggacccccugcagcgugaccugcggcaacggcgugagaaucagaagaagagcccacgccgacaagaagaaggccgaggaccugaccauggacgaccuggagguggaggccugcgugauggacaagugcgccggcaucuucaacguggugagcaacagccugggccuggugauccugcuggugcuggcccuguucaacuga

SEQ ID NO: 4835 - RNA, 939 nt, Artificial Sequence
  derived and/or modified CDS sequence (opt4) from Pk(LT33)__ADN94514.1__CSP
augagaaacuucauccugcuggccgugagcagcauccugcugguggaccugcugcccacccacuucgagcacaacguggaccugagcagagccaucaacgugaacggcgugagcuucaacaacguggacaccagcagccugggcgccgcccaggugagacagagcgccagcagaggcagaggccugggcgagaagagaaaggagggcgccgacaaggagaagaagaaggagaaggaggaggagcccaagaagcccaacgagaacaagcugaagcagcccgagcaggccgcccccggcgccggcggcgagcagcccgcccccggcgccggcggcgagagacccgcccccggcgccggcggcgagcagcccgcccccggcgccggcggcgagcagcccgcccccggcgccggcggcgagcagcccgcccccggcgccggcggcgagcagcccgccgccggcggcgagcagcccgccgccggcggcgagcagcccgcccccgcccccagaagagagcagcccgccgccggcggcgagcagcccgcccccgcccccagaagagagcagcccgccgccggcggcgagcagcccgcccccggcgccggcgccggcgacggcgccagaggcggcaacgccggcgccggcaagggccagggccagaacaaccagggcgccaacgugcccaacgagaagguggugaacgacuaccugcacaagaucagaagcagcgugaccaccgaguggacccccugcagcgugaccugcggcaacggcgugagaaucagaagaaaggcccacgccgacaagaagaaggccgagaaccugaccauggacgaccuggagguggaggccugcgugauggacaagugcgccggcaucuucaacguggugagcaacagccugggccuggugauccugcuggugcuggcccuguucaacuga

SEQ ID NO: 4836 - RNA, 894 nt, Artificial Sequence
  derived and/or modified CDS sequence (opt4) from Pk(SGEHIWM26-Y09-98)__AFD97239.1__CSP
augaagaacuucauccugcuggccgugagcagcauccugcugguggaccugcugcccacccacuucgagcacaacguggaccugagcagagccaucaacgugaacggcgugagcuucaacaacguggacaccagcagccugggcgccgcccaggugagacagagcgccagcagaggcagaggccugggcgagaagcccaaggagggcgccgacaaggagaagaagaaggagaaggaggaggagcccaagaagcccaacgagaacaagcugaagcagcccgacaccgugcccggcggcgaggagcccgcccccggcagagagcagcccgcccccggcagagaggagcccgcccccggcagagagcagcccgcccccggcagagaggagcccgcccccggcagagagcagcccgcccccggcagagaggagcccgcccccggcagagagcagcccgcccccggcagagagcagcccgcccccggcagagaggagcccgcccccggcagagagcagcccgcccccggcagagaggagcccgcccccgcccccggcgccggcgccggcgacggcgccagaggcggcaacgccggcgccggcaagggccagggccagaacaaccagggcgccaacgugcccaacgagaagguggugaacgacuaccugcacaagaucagaagcagcgugaccaccgaguggacccccugcagcgugaccugcggcaacggcgugagaaucagaagaaagggccacgccggcaacaagaaggccgaggaccugaccauggacgaccuggagguggaggccugcgugauggacaagugcgccggcaucuucaacguggugagcaacagccugggccuggugauccugcuggugcuggcccuguucaacuga

SEQ ID NO: 4837 - RNA, 801 nt, Artificial Sequence
  derived and/or modified CDS sequence (opt4) from Pk(KH296)__ADN94490.1__CSP
augagaaacuucauccugcuggccgugagcagcauccugcugguggaccugcugcccacccacuucgagcacaacguggaccugagcagagccaucaacgugaacggcgugagcuucaacaacguggacaccagcagccugggcgccgcccaggugagacagagcgccagcagaggcagaggccugggcgagaagagaaaggagggcgccgacaaggagaagaagaaggagaaggaggaggagcccaagaagcccaacgagaacaagcugaagcagcccgagcaggccgcccccggcgccggcggcgagcagcccgcccccggcgccggcggcgagcagcccgcccccggcgccggcggcgagcagcccgcccccggcgccggcggcgagcagcccgcccccggcgccggcggcgagcagcccgcccccgcccccagaagagagcagcccgcccccgcccccggcgccggcgacggcgccagaggcggcaacgccggcgccggcaagggccagggccagaacaaccagggcgccaacgugcccaacgagaagguggugaacgacuaccugcacaagaucagaagcagcgugaccaccgaguggacccccugcagcgugaccugcggcaacggcgugagaaucagaagaaaggcccacgccgacaagaagaaggccgaggaccugaccauggacgaccuggagguggaggccugcgugauggacaagugcgccggcaucuucaacguggugagcaacagccugggccuggugauccugcuggugcuggcccuguucaacuga

SEQ ID NO: 4838 - RNA, 801 nt, Artificial Sequence
  derived and/or modified CDS sequence (opt4) from Pk(LT33)__ADN94528.1__CSP
augagaaacuucauccugcuggccgugagcagcauccugcugguggaccugcugcccacccacuucgagcacaacguggaccugagcagagccaucaacgugaacggcgugagcuucaacaacguggacaccagcagccugggcgccgcccaggugagacagagcgccagcagaggcagaggccugggcgagaagagaaaggagggcgccgacaaggagaagaagaaggagaaggaggaggagcccaagaagcccaacgagaacaagcugaagcagcccgagcaggccgcccccggcgccggcggcgagcagcccgcccccggcgccggcggcgagagacccgcccccggcgccggcggcgagcagcccgcccccggcgccggcggcgagagacccgcccccggcgccggcggcgagcagcccgcccccgcccccagaagagagcagcccgcccccggccccggcgccggcgacggcgccagaggcggcaacgccggcgccggcaagggccagggccagaacaaccagggcgccaacgugcccaacgagaagguggugaacgacuaccugcacaagaucagaagcagcgugaccaccgaguggacccccugcagcgugaccugcggcaacggcgugagaaucagaagaagacagaacgccggcaacaagaaggccgaggaccugaccauggacgaccuggagguggaggccugcgugauggacaagugcgccggcaucuucaacguggugagcaacagccugggccuggugauccugcuggugcuggcccuguucaacuga

SEQ ID NO: 4839 - RNA, 744 nt, Artificial Sequence
  derived and/or modified CDS sequence (opt4) from Pk(SGEHIWM4-Y09-8)__AFD97222.1__CSP
augaagaacuucauccugcuggccgugagcagcauccugcugguggaccugcugcccaccuacuucgagcacaacguggaccugagcagagccaucaacgugaacggcgugagcuucaacagcguggacaccagcagccugggcgccgcccaggugagacagagcgccagcagaggcagaggccugggcgagaagcccaaggagggcgccgacaaggagaagaagaaggagaaggagaaggaggaggagcccaagaagcccaacgagaacaagcugaagcagccccagggcaacggcggcgccggccaggcccagccccagggcaacggcggcgccggccaggcccagcccgagggcaacagagaggcccccgcccagccccagggcaacggcggcgccggccaggcccagccccagaagaacgagggcggcaacgccggcgccagaaagggccagggccagaacaaccagggcgccaacgcccccaacgagaagguggugaacgacuaccugcagaagaucagaagcagcgugaccaccgaguggacccccugcagcgugaccugcggcaacggcgugagaaucagaagaagagcccacgccgacaagaagaaggccgaggaccugaccauggacgaccuggagguggaggccugcgugauggacaagugcgccggcaucuucaacguggugagcaacagccugggccuggugaucagccuggugcuggcccuguucaacuga

SEQ ID NO: 4840 - RNA, 720 nt, Artificial Sequence
  derived and/or modified CDS sequence (opt4) from Pk(PT01)__ADN94512.1__CSP
augagaaacuucauccugcuggccgugagcagcauccugcugguggaccugcugcccacccacuucgagcacaacguggaccugagcagagccaucaacgugaacggcgugagcuucaacaacguggacaccagcagccugggcgccgcccaggugagacagagcgccagcagaggcagaggccugggcgagaagagaaaggagggcgccgacaaggagaagaagaaggagaaggaggaggagcccaagaagcccaacgagaacaagcugaagcagcccgagcaggccgcccccggcgccggcggcgagcagcccgcccccggcgccggcggcgagcagcccgcccccgcccccagaagagagcagcccgcccccgcccccggcgccggcgacggcgccagaggcggcaacgccggcgccggcaagggccagggccagaacaaccagggcgccaacgugcccaacgagaagguggugaacgacuaccugcacaagaucagaagcagcgugaccaccgaguggacccccugcagcgugaccugcggcaacggcgugagaaucagaagaaaggcccacgccgacaagaagaaggccgaggaccugaccauggacgaccuggagguggaggccugcgugauggacaagugcgccggcaucuucaacguggugagcaacagccugggccuggugauccugcuggugcuggcccuguucaacuga

SEQ ID NO: 4841 - RNA, 717 nt, Artificial Sequence
  derived and/or modified CDS sequence (opt4) from Pk(LT53)__ADN94502.1__CSP
augaagaacuucauccugcuggccgugagcagcauccugcugguggaccugcugcccacccacuucgagcacaacguggaccugagcagagccaucaacgugaacggcgugagcuucaacaacguggacaccagcagccugggcgccgcccaggugagacagagcgccagcagaggcagaggccugggcgagaagcccaaggagggcgacgacaaggagaagaagaaggagaaggagaaggaggaggagcccaagaaccugaacgagaacaagcccaagcagcccaacgccgagggcgacggcgccaagcccaagcagcccaacgccgagggcgacggcgccaacgccagacagccccaggccgagggcggcggcggcaacgccagacagggcggcaacgagggcaacaagcaggccggcaagggccagggccagaacaaccagggcgccaacgcccccaacgagaagguggugaacgacuaccugcagaagaucagaagcagcgugaccaccgaguggacccccugcagcgugaccugcggcaacggcgugagaaucagaagaagagcccacgccgacaagaagaaggccgaggaccugaccauggacgaccuggagguggaggccugcgugauggacaagugcgccggcaucuucaacguggugagcaacagccugggccuggugauccugcuggugcuggcccuguucaacuga

SEQ ID NO: 4842 - RNA, 702 nt, Artificial Sequence
  derived and/or modified CDS sequence (opt4) from Pk(SGEHIWM5-Y09-79)__AFD97229.1__CSP
augaagaacuucauccugcuggccgugagcagcauccugcugguggaccugcugcccacccacuucgagcacaacguggaccugagcagagccaucaacgugaacggcgugagcuucaacaacguggacaccagcagccugggcgccgcccaggugagacagagcgccagcagaggcagaggccugggcgagagacccaaggagggcgccgacaaggagaagaagaaggagaaggagaaggagaaggaggagcccaagaagcccaacgagaacaagcugaagcagcccgagcagcccgccgccggcgccggcggcgagcagcccgcccccgcccccagaagagagcagcccgcccccggcgccggcgccggcgacggcgccagaggcggcaacgccggcgccggcaagggccagggccagaacaaccagggcgccaacgugcccaacgagaagguggugaacgacuaccugcacaagaucagaagcagcgugaccaccgaguggacccccugcagcgugaccugcggcaacggcgugagaaucagaagaagacagaacgccggcaacaagaaggccgaggaccugaccauggacgaccuggagguggaggccugcgugauggacaagugcgccggcaucuucaacguggugagcaacagccugggccuggugauccugcuggugcuggcccuguucaacuga

SEQ ID NO: 4843 - RNA, 660 nt, Artificial Sequence
  derived and/or modified CDS sequence (opt4) from Pk(PT01)__ADN94513.1__CSP
augagaaacuucauccugcuggccgugagcagcauccugcugguggaccugcugcccacccacuucgagcacaacguggaccugagcagagccaucaacgugaacggcgugagcuucaacaacguggacaccagcagccugggcgccgcccaggugagacagagcgccagcagaggcagaggccugggcgagaagagaaaggagggcgccgacaaggagaagaagaaggagaaggaggaggagcccaagaagcccaacgagaacaagcugaagcagcccgagcaggccgcccccagaagagagcagcccgcccccgcccccggcgccggcgacggcgccagaggcggcaacgccggcgccggcaagggccagggccagaacaaccagggcgccaacgugcccaacgagaagguggugaacgacuaccugcacaagaucagaagcagcgugaccaccgaguggacccccugcagcgugaccugcggcaacggcgugagaaucagaagaaaggcccacgccgacaagaagaaggccgaggaccugaccauggacgaccuggagguggaggccugcgugauggacaagugcgccggcaucuucaacguggugagcaacagccugggccuggugauccugcuggugcuggcccuguucaacuga

SEQ ID NO: 4844 - RNA, 1290 nt, Artificial Sequence
  derived and/or modified CDS sequence (opt4) from Pm(408/Cameroon)__CAA05623.1__CSP
augaagaagcugagcgugcuggccaucagcagcuuccugaucguggacuuccuguuccccggcuaccaccacaacagcaacagcaccaagagcagaaaccugagcgagcugugcuacaacaacguggacaccaagcuguucaacgagcuggaggugagauacagcaccaaccaggaccacuucuacaacuacaacaagaccaucagacugcugaacgagaacaacaacgagaaggacggcaacgugaccaacgagagaaagaagaagcccaccaaggccguggagaacaagcugaagcagccccccggcgacgacgacggcgccggcaacgacgccggcaacgacgccggcaacgccgccggcaacgccgccggcaacgccgccggcaacgccgccggcaacgccgccggcaacgacgccggcaacgccgccggcaacgccgccggcaacgccgccggcaacgccgccggcaacgccgccggcaacgacgccggcaacgccgccggcaacgacgccggcaacgccgccggcaacgccgccggcaacgccgccggcaacgccgccggcaacgccgccggcaacgacgccggcaacgccgccggcaacgccgccggcaacgccgccggcaacgccgccggcaacgccgccggcaacgccgccggcaacgccgccggcaacgccgccggcaacgccgccggcaacgccgccggcaacgacgccggcaacgccgccggcaacgccgccggcaacgccgccggcaacgccgccggcaacgccgccggcaacgccgccggcaacgccgccggcaacgccgccggcaacgccgccggcaacgccgccggcaacgccgccggcaacgccgccggcaacgccgccggcaacgccgccggcaacgccgccggcaacgccgccggcaacgccgccggcaacgccgccggcaacgagaaggccaagaacaaggacaacaagguggacgccaacaccaacaagaaggacaaccaggaggagaacaacgacagcagcaacggccccagcgaggagcacaucaagaacuaccuggagagcaucagaaacagcaucaccgaggaguggagccccugcagcgugaccugcggcagcggcaucagaaccagaagaaagguggacgccaagaacaagaagcccgccgagcuggugcugagcgaccuggagaccgagaucugcagccuggacaagugcagcagcaucuucaacguggugagcaacagccugggcaucgugcuggugcuggugcugauccuguuccacuga

SEQ ID NO: 4845 - RNA, 1290 nt, Artificial Sequence
  derived and/or modified CDS sequence (opt4) from Pm(Uganda 1-CDC)__AAA29557.1__CSP
augaagaagcugagcgugcuggccaucagcagcuuccugaucguggacuuccuguuccccggcuaccaccacaacagcaacagcaccaagagcagaaaccugagcgagcugugcuacaacaacguggacaccaagcuguucaacgagcuggaggugagauacagcaccaaccaggaccacuucuacaacuacaacaagaccaucagacugcugaacgagaacaacaacgagaaggacggcaacgugaccaacgagagaaagaagaagcccaccaaggccguggagaacaagcugaagcagccccccggcgacgacgacggcgccggcaacgacgccggcaacgacgccggcaacgacgccggcaacgccgccggcaacgccgccggcaacgccgccggcaacgccgccggcaacgccgccggcaacgccgccggcaacgccgccggcaacgccgccggcaacgccgccggcaacgccgccggcaacgacgccggcaacgccgccggcaacgccgccggcaacgccgccggcaacgccgccggcaacgccgccggcaacgacgccggcaacgccgccggcaacgccgccggcaacgccgccggcaacgccgccggcaacgccgccggcaacgccgccggcaacgccgccggcaacgccgccggcaacgccgccggcaacgccgccggcaacgacgccggcaacgccgccggcaacgccgccggcaacgccgccggcaacgccgccggcaacgccgccggcaacgccgccggcaacgccgccggcaacgccgccggcaacgccgccggcaacgccgccggcaacgccgccggcaacgccgccggcaacgccgccggcaacgccgccggcaacgccgccggcaacgccgccggcaacgccgccggcaacgccgccggcaacgccgccggcaacgccgccggcaacgagaaggccaagaacaaggacaacaagguggacgccaacaccaacaagaaggacaaccaggaggagaacaacgacagcagcaacggccccagcgaggagcacaucaagaacuaccuggagagcaucagaaacagcaucaccgaggaguggagccccugcagcgugaccugcggcagcggcaucagagccagaagaaaggugggcgccaagaacaagaagcccgccgagcuggugcugagcgaccuggagaccgagaucugcagccuggacaagugcagcagcaucuucaacguggugagcaacagccugggcaucgugcuggugcuggugcugauccuguuccacuga

SEQ ID NO: 4846 - RNA, 1170 nt, Artificial Sequence
  derived and/or modified CDS sequence (opt4) from Pm(UG01)__SCN12386.1__CSP
augaagaagcugagcgugcuggccaucagcagcuuccugaucguggacuuccuguuccccggcuaccaccacaacagcaacagcaccaagagcagaaaccugagcgagcugugcuacaacaacguggacaccaagcuguucaacgagcuggaggugagauacagcaccaaccaggaccacuucuacaacuacaacaagaccaucagacugcugaacgagaacaacaacgagaaggacggcaacgugaccaacgagagaaagaagaagcccaccaaggccguggagaacaagcugaagcagccccccggcgacgacgacggcgccggcaacgacgccggcaacgacgccggcaacgccgccggcaacgccgccggcaacgccgccggcaacgccgccggcaacgacgccggcaacgccgccggcaacgccgccggcaacgccgccggcaacgccgccggcaacgccgccggcaacgccgccggcaacgccgccggcaacgccgccggcaacgccgccggcaacgccgccggcaacgccgccggcaacgccgccggcaacgccgccggcaacgccgccggcaacgccgccggcaacgccgccgccggcaacgccgccggcaacgccgccggcaacgccgccggcgccgccggcaacgccgccggcaacgccgccggcaacgccgccggcaacgccgccggcaacgccgccggcaacgccgccggcaacgccgccggcaacgccgccggcaacgccgccggcaacgccgccggcaacgccgccggcaacgccgccggcaacgccgccggcaacgccgccggcaacgagaaggccaagaacaaggacaacaagguggacgccaacaccaacaagaaggacaaccaggaggagaacaacgacagcagcaacggccccagcgaggagcacaucaagaacuaccuggagagcaucagaaacagcaucaccgaggaguggagccccugcagcgugaccugcggcagcggcaucagagccagaagaaagguggacgccaagaacaagaagcccgccgagcuggugcugagcgaccuggagaccgagaucugcagccuggacaagugcagcagcaucuucaacguggugagcaacagccugggcaucgugcuggugcuggugcugauccuguuccacuga

SEQ ID NO: 4847 - RNA, 1170 nt, Artificial Sequence; identical to SEQ ID NO: 4846
  derived and/or modified CDS sequence (opt4) from Pm()__SCN12386.1__CSP

SEQ ID NO: 4848 - RNA, 885 nt, Artificial Sequence
  derived and/or modified CDS sequence (opt4) from Pm(PmlGA01)__SBT79431.1__CSP
augaagaagcugagcgugcuggccaucagcagcuuccugaucguggacuuccuguuccccggcuaccaccacaacagcaacagcaccaagagcagaaaccugagcgagcugugcuacaacaacguggacaccaagcuguucaacgagcuggaggugagauacagcaccaaccaggaccacuucuacaacuacaacaagaccaucagacugcugaacgagaacaacaacgccaaggacggcaacgugaccaacgagagaaagaagaagcccaccaaggccguggagaacaagcugaagcagccccccggcgacgaggaggacgacgccgagaacggcgagggcaacgagagaggcaacggcgagggcaacgagagaggcaacggcgagggcaacgagagaggcaacggcgagggcaacgagagaggcaacggcgccggcaacgagagaggcaacgacgccggcaacgccgccggcaacgccgccggcaacgacgccggcaacgccgccggcaacgccgccggcaacgccgccggcaacgccgccggcaacgacgccggcaacgccgccggcaacgccgccggcaacgccgccggcaacggcgagaacaacgacagcagcaacggccccagcgaggagcacaucaagaacuaccuggagagcaucagaaacagcaucaccgaggaguggagccccugcagcgugaccugcggcaacggcaucagagccagaagaaagguggacgccaagaacaagaagcccgccgagcuggugcugagcgaccuggagaccgagaucugcagccuggacaagugcagcagcaucuucaacguggugagcaacagccugggcaucgugcuggugcuggugcugauccuguuccacuga

SEQ ID NO: 4849 - RNA, 1104 nt, Artificial Sequence
  derived and/or modified CDS sequence (opt4) from Poc(contig1754)__SBT00176.1__CSP
augagaaaccuggccaucuucgccgugagcgccuuccuguucgccgacagcagauaccccguguacgcccacaacggcaacagcaccgagggcagaaagcugaacgagcugugcuacaacaacguggaccuguacaacacccuguucaacgagcuggacgugggcagcagcaccaaccaggccuucuuccugaacagcaagaagacccugagacugcugaacgagaaccccaaggagaacaagaagaagagaaaggacgacaagaagcccguggagaacaagcugaagcagggcgagagagagaacgacccccccgcccccagaggcgagggcaacccccccgccccccagggcgagggcaacccccccgccccccagggcgagggcaacccccccgccccccagggcgagggcaacccccccgccccccagggcgagggcaacccccccgcccccagaggcgagggcaacccccccgccccccagggcgagggcaacccccccgccccccagggcgagggcaacccccccgccccccagggcgagggcaacccccccgcccccagaggcgagggcaacccccccgccccccagggcgagggcaacccccccgccccccagggcgagggcaacccccccgccccccagggcgagggcaacccccccgccgcccagggcgagggcaacccccccgccgcccagggcaacggcaacccccccgccgcccagggcaacggcaacccccccgccgcccagggcaacggcaacccccccgcccccgccggcaagggcaagaacgagaaccagaaggagaaggaggagaagaacgccgccaacaacccccccagcgaggacgacaucaagaaguacaucgacaagaucagaaacgacaucaccgagaacuggagccccugcagcgugaccugcggcuucggcgugagagugagaagaaaggccggcgccagcgccaagaaggcccaggagcugacccugagcgaccuggagaccgagaucugcaagaucgagaacugcagcagcaucuucaacguggugagcaacagccugggccuggugaucuuccuguuccugguguucuuccacuga

SEQ ID NO: 4850 - RNA, 888 nt, Artificial Sequence
  derived and/or modified CDS sequence (opt4) from Poc(GH01)__SBT84923.1__CSP
augagaaaccuggccaucuucgccgugagcgccuuccuguucgccgacagcagauaccccguguacgcccacaacggcaacagcaccgagggcagaaagcugaacgagcugugcuacaacaacguggaccuguacaacacccuguucaacgagcuggacgugggcagcagcaccaaccaggccuucuuccugaacagcaagaagacccugagacugcugaacgagaaccccaaggagaacaagaagaagagaaaggacgacaagaagcccguggagaacaagcugaagcagggcgagagagagaacgacccccccgccccccagggcgagggcaacccccccgccccccagggcgagggcaacccccccgccccccagggcgagggcaacccccccgccccccagggcgagggcaacccccccgccccccagggcgagggcaacccccccgccgcccagggcgagggcaacccccccgccgcccagggcaacggcaacccccccgccgcccagggcaacggcaacccccccgccgcccagggcaacggcaacccccccgcccccgccggcaagggcaagaacgagaaccagaaggagaaggaggagaagaacgccgccaacaacccccccagcgaggacgacaucaagaaguacaucgacaagaucagaaacgacaucaccgagaacuggagccccugcagcgugaccugcggcuucggcgugagagugagaagaaaggccggcgccagcgccaagaaggcccaggagcugacccugagcgaccuggagaccgagaucugcaagaucgagaacugcagcagcaucuucaacguggugagcaacagccugggccuggugaucuuccuguuccugguguucuuccacuga

SEQ ID NO: 4851 - RNA, 828 nt, Artificial Sequence
  derived and/or modified CDS sequence (opt4) from Poc(contig251)__SBS83173.1__CSP
augagaaaccuggccaucuucgccgugagcgccuuccuguucgccgacagcagauaccccguguacgcccacaacggcaacagcaccgagggcagaaagcugaacgagcugugcuacaacaacguggaccuguacaacacccuguucaacgagcuggacgugggcagcagcaccaaccaggccuucuuccugaacagcaagaagacccugagacugcugaacgagaaccccaaggagaacaagaagaagagaaaggacgacaagaagcccguggagaacaagcugaagcagggcgagagagagaacgacccccccgcccccagaggcgagggcaacccccccgccccccagggcgagggcaacccccccgccccccagggcgagggcaacccccccgccccccagggcgagggcaacccccccgccccccagggcgagggcaacccccccgccgcccagggcgagggcaacccccccgccgcccagggcaacccccccgcccccgccggcaagggcaagaacgagaaccagaaggagaaggaggagaagaacgccgccaacaacccccccagcgaggacgacaucaagaaguacaucgacaagaucagaaacgacaucaccgagaacuggagccccugcagcgugaccugcggcuucggcgugagagugagaagaaaggccggcgccagcgccaagaaggcccaggagcugacccugagcgaccuggagaccgagaucugcaagaucgagaacugcagcagcaucuucaacguggugagcaacagccugggccuggugaucuuccuguuccugguguucuuccacuga

SEQ ID NO: 4852 - RNA, 945 nt, Artificial Sequence
  derived and/or modified CDS sequence (opt4) from Pow(contig93)__SBT35133.1__CSP
augagaaaccuggccaucuucgccgugagcgccuuccuguucgccgacagcggcuaccccguguacgcccacaacggcaacagcauggagggcagaaagcugaacgagcugugcuacaacaacguggaccuguacaacacccuguucgacggccuggacguggagagcagcaccaaccaggccuucuuccugaacagcaagaagacccugagacugcugaacgagaaccccaaggagaacaagaagaagagaaaggacgacaagauccccguggagaacaagcugaagcagggcgacagagagaacgacccccccgcccccgugccccagggcgacccccccgcccccgugccccagggcgacccccccgccgccgugccccagggcgacccccccgcccccgugccccagggcgacccccccgccccccagggcgacccccccgcccccgugccccagggcgacccccccgcccccgugccccagggcgacccccccgcccccgugccccagggcgacccccccgcccccgccccccagggcgacccccccgcccccgccccccagggcgacggcaagccccccgcccccgccccccagggcgacggcaaccagcccgcccccggcaagggcaagagcgagaaccagaaggagaaggacgagaagaacgccgccaacaacccccccagcgaggacgacaucaagaaguacaucgacaagaucagaaaggacaucaccgagaacuggagccccugcagcgugaccugcggccugggcgugagagugagaagaaaggccggcgccagcgccaagaaggccaacgagcugaccaucaacgacguggagaccgagaucugcaagaucgagaacugcagcagcaucuucaacguggugagcaacagcaucggccuggugaucuuccuguuccugguguucuuccacuga

SEQ ID NO: 4853 - RNA, 891 nt, Artificial Sequence
  derived and/or modified CDS sequence (opt4) from Pow(contig72)__SBT34702.1__CSP
augagaaaccuggccaucuucgccgugagcgccuuccuguucgccgacagcggcuaccccguguacgcccacaacggcaacagcauggagggcagaaagcugaacgagcugugcuacaacaacguggaccuguacaacacccuguucgacggccuggacguggagagcagcaccaaccaggccuucuuccugaacagcaagaagacccugagacugcugaacgagaaccccaaggagaacaagaagaagagaaaggacgacaagauccccguggagaacaagcugaagcagggcgacagagagaacgacccccccgcccccgugccccagggcgacccccccgcccccgugccccagggcgacccccccgcccccgugccccagggcgacccccccgcccccgugccccagggcgacccccccgccccccagggcgacccccccgcccccgugccccagggcgacccccccgcccccgccccccagggcgacccccccgcccccgccccccagggcgacggcaagccccccgcccccgccccccagggcgacggcaaccagcccgcccccggcaagggcaagagcgagaaccagaaggagaaggacgagaagaacgccgccaacaacccccccagcgaggacgacaucaagaaguacaucgacaagaucagaaaggacaucaccgagaacuggagccccugcagcgugaccugcggccugggcgugagagugagaagaaaggccggcgccagcgccaagaaggccaacgagcugaccaucaacgacguggagaccgagaucugcaagaucgagaacugcagcagcaucuucaacguggugagcaacagcaucggccuggugaucuuccuguuccugguguucuuccacuga

SEQ ID NO: 4854 - RNA, 1020 nt, Artificial Sequence
  derived and/or modified CDS sequence (opt4) from Po(PowCR01)__SBT72933.1__CSP
augagaaaccuggccaucuucgccgugagcgccuuccuguucgccgacagcggcuaccccguguacgcccacaacggcaacagcauggagggcagaaagcugaacgagcugugcuacaacaacguggaccuguacaacacccuguucgacggccuggacguggagagcagcaccaaccaggccuucuuccugaacagcaagaagacccugagacugcugaacgagaaccccaaggagaacaagaagaagagaaaggacgacaagauccccguggagaacaagcugaagcagggcgacagagagaacgacccccccgcccccgugccccagggcgacccccccgcccccgugccccagggcgacccccccgccgccgugccccagggcgacccccccgcccccgugccccagggcgacccccccgccccccagggcgacccccccgcccccgugccccagggcgacccccccgcccccgugccccagggcgacccccccgcccccgugccccagggcaacccccccgcccccgugccccagggcgacccccccgccccccagggcgacccccccgcccccgugccccagggcgacccccccgcccccgccccccagggcgacccccccgcccccgccccccagggcgacggcaagccccccgcccccgccccccagggcgacggcaaccagcccgcccccggcaagggcaagagcgagaaccagaaggagaaggacgagaagaacgccgccaacaacccccccagcgaggacgacaucaagaaguacaucgacaagaucagaaaggacaucaccgagaacuggagccccugcagcgugaccugcggccugggcgugagagugagaagaaaggccggcgccagcgccaagaaggccaacgagcugaccaucaacgacguggagaccgagaucugcaagaucgagaacugcagcagcaucuucaacguggugagcaacagcaucggccuggugaucuuccuguuccugguguucuuccacuga

SEQ ID NO: 4855 - RNA, 1164 nt, Artificial Sequence
  derived and/or modified CDS sequence (opt4) from Pv(Pt02.1)__ADB92551.1__CSP
augaagaacuucauccugcuggccgugagcagcauccugcugguggaccuguuccccacccacugcggccacaacguggaccugagcaaggccaucaaccugaacggcgugggcuucaacaacguggacgccagcagccugggcgccgcccacgugggccagagcgccagcagaggcagaggccugggcgagaaccccgacgacgaggagggcgacgccaagaagaagaaggacggcaagaaggccgagcccaagaaccccagagagaacaagcugaagcagcccgaggacggcgccggcgaccagcccggcgccaacggcgccggcaaccagcccggcgccaacggcgccggcaaccagcccggcgccaacggcgccggcaaccagcccggcgccaacggcgccggcaaccagcccggcgccaacggcgccggcaaccagcccggcgccaacggcgccggcaaccagcccggcgccaacggcgccggcgaccagcccggcgccaacggcgccggcaaccagcccggcgccaacggcgccggcaaccagcccggcgccaacggcgccggcgaccagcccggcgccaacggcgccggcaaccagcccggcgccaacggcgccggcgaccagcccggcgccaacggcgccggcaaccagcccggcgccaacggcgccggcaaccagcccggcgccaacggcgccggcaaccagcccggcgccaacggcgccggcaaccagcccggcgccaacggcgccggcggccaggccgccggcggcaacgccgccaacaagaaggccggcgacgccggcgccggcggccaggccgccggcggcaacgccgccaacaagaaggccggcgacgccggcgccggccagggccagaacaacgagggcgccaacgcccccaacgagaagagcgugaaggaguaccuggacaaggugagagccaccgugggcaccgaguggacccccugcagcgugaccugcggcgugggcgugagagugagaagaagagugaacgccgccaacaagaagcccgaggaccugacccugaacgaccuggagaccgacgugugcaccauggacaagugcgccggcaucuucaacguggugagcaacagccugggccuggugauccugcuggugcuggcccuguucaacuga

SEQ ID NO: 4856 - RNA, 1134 nt, Artificial Sequence
  derived and/or modified CDS sequence (opt4) from Pv(Salvador I (Sal-1))__XP_001613068.1__CSP
augaagaacuucauccugcuggccgugagcagcauccugcugguggaccuguuccccacccacugcggccacaacguggaccugagcaaggccaucaaccugaacggcgugaacuucaacaacguggacgccagcagccugggcgccgcccacgugggccagagcgccagcagaggcagaggccugggcgagaaccccgacgacgaggagggcgacgccaagaagaagaaggacggcaagaaggccgagcccaagaaccccagagagaacaagcugaagcagcccggcgacagagccgacggccagcccgccggcgacagagccgacggccagcccgccggcgacagagccgacggccagcccgccggcgacagagccgacggccagcccgccggcgacagagccgccggccagcccgccggcgacagagccgacggccagcccgccggcgacagagccgacggccagcccgccggcgacagagccgacggccagcccgccggcgacagagccgacggccagcccgccggcgacagagccgccggccagcccgccggcgacagagccgccggccagcccgccggcgacagagccgacggccagcccgccggcgacagagccgccggccagcccgccggcgacagagccgacggccagcccgccggcgacagagccgccggccagcccgccggcgacagagccgacggccagcccgccggcgacagagccgccggccagcccgccggcgacagagccgccggccagcccgccggcgacagagccgccggccaggccgccggcgacagagccgccggccaggccgccggcggcaacgccggcggccagggccagaacaacgagggcgccaacgcccccaacgagaagagcgugaaggaguaccuggacaaggugagagccaccgugggcaccgaguggacccccugcagcgugaccugcggcgugggcgugagagugagaagaagagugaacgccgccaacaagaagcccgaggaccugacccugaacgaccuggagaccgacgugugcaccauggacaagugcgccggcaucuucaacguggugagcaacagccugggccuggugauccugcuggugcuggcccuguucaacuga

SEQ ID NO: 4857 - RNA, 1092 nt, Artificial Sequence
  derived and/or modified CDS sequence (opt4) from Pv(P01)__SGX77278.1__CSP
augaagaacuucauccugcuggccgugagcagcauccugcugguggaccuguuccccacccacugcggccacaacguggaccugagcaaggccaucaaccugaacggcgugaacuucaacaacguggacgccagcagccugggcgccgcccacgugggccagagcgccagcagaggcagaggccugggcgagaaccccgacgacgaggagggcgacgccaagaagaagaaggacggcaagaaggccgagcccaagaaccccagagagaacaagcugaagcagcccgccggcgacagagccgacggccagcccgccggcgacagagccgacggccagcccgccggcgacagagccgacggccagcccgccggcgacagagccgccggccagcccgccggcgacagagccgacggccagcccgccggcgacagagccgccggccagcccgccggcgacagagccgacggccagcccgccggcgacagagccgccggccagcccgccggcgacagagccgacggccagcccgccggcgacagagccgccggccagcccgccggcgacagagccgccggccagcccgccggcgacagagccgacggccagcccgccggcgacagagccgccggccagcccgccggcgacagagccgacggccagcccgccggcgacagagccgccggccagcccgccggcgacagagccgccggccagcccgccggcaacggcgccggcggccaggccgccggcggcaacgccggcggcaacgccggcggcaacgccggcggcaacgccggcggccagggccagaacaacgagggcgccaacgcccccaacgagaagagcgugaaggaguaccuggacaaggugagagccaccgugggcaccgaguggacccccugcagcgugaccugcggcgugggcgugagagugagaagaagagugaacgccgccaacaagaagcccgaggaccugacccugaacgaccuggagaccgacgugugcaccauggacaagugcgccggcaucuucaacguggugagcaacagccugggccuggugauccugcuggugcuggcccuguucaacuga

SEQ ID NO: 4858 - RNA, 1188 nt, Artificial Sequence
  derived and/or modified CDS sequence (opt4) from Pv(Cam22)__AHL69650.1__CSP
augaagaacuucauccugcuggccgugagcagcauccugcugguggaccuguuccccacccacugcggccacaacguggaccugagcaaggccaucaaccugaacggcgugggcuucaacaacguggacgccagcagccugggcgccgcccacgugggccagagcgccagcagaggcagaggccugggcgagaaccccgacgacgaggagggcgacgccaagaagaagaaggacggcaagaaggccgagcccaagaaccccagagagaacaagcugaagcagcccgaggacggcgccggcaaccagcccggcgccaacggcgccggcaaccagcccggcgccaacggcgccggcaaccagcccggcgccaacggcgccggcaaccagcccggcgccaacggcgccggcaaccagcccggcgccaacggcgccggcaaccagcccggcgccaacggcgccggcaaccagcccggcgccaacggcgccggcaaccagcccggcgccaacggcgccgacgaccagcccggcgccaacggcgccggcaaccagcccggcgccaacggcgccggcaaccagcccggcgccaacggcgccggcaaccagcccggcgccaacggcgccggcgaccagcccggcgccaacggcgccggcaaccagcccggcgccaacggcgccggcgaccagcccggcgccaacggcgccggcaaccagcccggcgccaacggcgccggcaaccagcccggcgccaacggcgccggcaaccagcccggcgccaacggcgccggcaaccagcccggcgccaacggcgccggcaaccagcccggcgccaacggcgccggcggccaggccgccggcggcaacgccgccaacaagaaggccggcgacgccggcgccggccagggccagaacaacgagggcgccaacgcccccaacgagaagagcgugaaggaguaccuggacaaggugagagccaccgugggcaccgaguggacccccugcagcgugaccugcggcgugggcgugagagugagaagaagagugaacgccgccaacaagaagcccgaggaccugacccugaacgaccuggagaccgacgugugcaccauggacaagugcgccggcaucuucaacguggugagcaacagccugggccuggugauccugcuggugcuggcccuguucaacuga

SEQ ID NO: 4859 - RNA, 1188 nt, Artificial Sequence
  derived and/or modified CDS sequence (opt4) from Pv(Cam29)__AGN05257.1__CSP
augaagaacuucauccugcuggccgugagcagcauccugcugguggaccuguuccccacccacugcggccacaacguggaccugagcaaggccaucaaccugaacggcgugggcuucaacaacguggacgccagcagccugggcgccgcccacgugggccagagcgccagcagaggcagaggccugggcgagaaccccgacgacgaggagggcgacgccaagaagaagaaggacggcaagaaggccgagcccaagaaccccagagagaacaagcugaagcagcccgaggacggcgagggcaaccagcccggcgccaacggcgccggcaaccagcccggcgccaacggcgccggcaaccagcccggcgccaacggcgccggcaaccagcccggcgccaacggcgccggcaaccagcccggcgccaacggcgccggcaaccagcccggcgccaacggcgccggcaaccagcccggcgccaacggcgccgacgaccagcccggcgccaacggcgccggcaaccagcccggcgccaacggcgccggcaaccagcccggcgccaacggcgccggcaaccagcccggcgccaacggcgccggcgaccagcccggcgccaacggcgccggcaaccagcccggcgccaacggcgccggcaaccagcccggcgccaacggcgccggcaaccagcccggcgccaacggcgccggcaaccagcccggcgccaacggcgccggcaaccagcccggcgccaacggcgccggcaaccagcccggcgccaacggcgccggcaaccagcccggcgccaacggcgccggcaaccagcccggcgccaacggcgccggcggccaggccgccggcggcaacgccgccaacaagaaggccggcgacgccggcgccggccagggccagaacaacgagggcgccaacgcccccaacgagaagagcgugaaggaguaccuggacaaggugagagccaccgugggcaccgaguggacccccugcagcgugaccugcggcgugggcgugagagugagaagaagagugaacgccgccaacaagaagcccgaggaccugacccugaacgaccuggagaccgacgugugcaccauggacaagugcgccggcaucuucaacguggugagcaacagccugggccuggugauccugcuggugcuggcccuguucaacuga

SEQ ID NO: 4860 - RNA, 1188 nt, Artificial Sequence
  derived and/or modified CDS sequence (opt4) from Pv(Cam9)__AGN05240.1__CSP
augaagaacuucauccugcuggccgugagcagcauccugcugguggaccuguuccccacccacugcggccacaacguggaccugagcaaggccaucaaccugaacggcgugggcuucaacaacguggacgccagcagccugggcgccgcccacgugggccagagcgccagcagaggcagaggccugggcgagaaccccgacgacgaggagggcgacgccaagaagaagaaggacggcaagaaggccgagcccaagaaccccagagagaacaagcugaagcagcccgaggacggcgccggcaaccagcccggcgccaacggcgccggcaaccagcccggcgccaacggcgccggcaaccagcccggcgccaacggcgccggcaaccagcccggcgccaacggcgccggcaaccagcccggcgccaacggcgccggcaaccagcccggcgccaacggcgccggcaaccagcccggcgccaacggcgccggcaaccagcccggcgccaacggcgccgacgaccagcccggcgccaacggcgccggcaaccagcccggcgccaacggcgccggcaaccagcccggcgccaacggcgccggcaaccagcccggcgccaacggcgccggcgaccagcccggcgccaacggcgccggcaaccagcccggcgccaacggcgccggcgaccagcccggcgccaacggcgccggcaaccagcccggcgccaacggcgccggcaaccagcccggcgccaacgaggccggcaaccagcccggcgccaacggcgccggcaaccagcccggcgccaacggcgccggcaaccagcccggcgccaacggcgccggcggccaggccgccggcggcaacgccgccaacaagaaggccggcgacgccggcgccggccagggccagaacaacgagggcgccaacgcccccaacgagaagagcgugaaggaguaccuggacaaggugagagccaccgugggcaccgaguggacccccugcagcgugaccugcggcgugggcgugagagugagaagaagagugaacgccgccaacaagaagcccgaggaccugacccugaacgaccuggagaccgacgugugcaccauggacaagugcgccggcaucuucaacguggugagcaacagccugggccuggugauccugcuggugcuggcccuguucaacuga

SEQ ID NO: 4861 - RNA, 1182 nt, Artificial Sequence
  derived and/or modified CDS sequence (opt4) from Pv(Ca05)__ADB92533.1__CSP
augaagaacuucauccugcuggccgugagcagcauccugcugguggaccuguuccccacccacugcggccacaacguggaccugagcaaggccaucaaccugaacggcgugggcuucaacaacguggacgccagcagccugggcgccgcccacgugggccagagcgccagcagaggcagaggccugggcgagaaccccgacgacgaggagggcgacgccaagaagaagaaggacggcaagaaggccgagcccaagaaccccagagagaacaagcugaagcagcccgaggacggcgccggcgaccagcccggcgccaacggcgccggcaaccagcccggcgccaacggcgccggcaaccagcccggcgccaacggcgccggcaaccagcccggcgccaacggcgccggcaaccagcccggcgccaacggcgccggcaaccagcccggcgccaacggcgccggcaaccagcccggcgccaacggcgccggcaaccagcccggcgccaacggcgccgacgaccagcccggcgccaacggcgccggcaaccagcccggcgccaacggcgccggcaaccagcccggcgccaacggcgccggcaaccagcccggcgccaacggcgccggcgaccagcccggcgccaacggcgccggcaaccagcccggcgccaacggcgccggcgaccagcccggcgccaacggcgccggcaaccagcccggcgccaacggcgccggcaaccagcccggcgccaacggcgccggcaaccagcccggcgccaacggcgccggcaaccagcccggcgccaacggcgccggcggccaggccgccggcggcaacgccgccaacaagaaggccggcgacgccggcggcaacgccggcggcaacgccggcggccagggccagaacaacgagggcgccaacgcccccaacgagaagagcgugaaggaguaccuggacaaggugagagccaccgugggcaccgaguggacccccugcagcgugaccugcggcgugggcgugagagugagaagaagagugaacgccgccaacaagaagcccgaggaccugacccugaacgaccuggagaccgacgugugcaccauggacaagugcgccggcaucuucaacguggugagcaacagccugggccuggugauccugcuggugcuggcccuguucaacuga

SEQ ID NO: 4862 - RNA, 1182 nt, Artificial Sequence
  derived and/or modified CDS sequence (opt4) from Pv(Ch05)__ADB92538.1__CSP
augaagaacuucauccugcuggccgugagcagcauccugcugguggaccuguuccccacccacugcggccacaacguggaccugagcaaggccaucaaccugaacggcgugggcuucaacaacguggacgccagcagccugggcgccgcccacgugggccagagcgccagcagaggcagaggccugggcgagaaccccgacgacgaggagggcgacgccaagaagaagaaggacggcaagaaggccgagcccaagaaccccagagagaacaagcugaagcagcccgaggacggcgccggcgaccagcccggcgccaacggcgccggcaaccagcccggcgccaacggcgccggcaaccagcccggcgccaacggcgccggcaaccagcccggcgccaacggcgccggcaaccagcccggcgccaacggcgccggcaaccagcccggcgccaacggcgccggcaaccagcccggcgccaacggcgccggcgaccagcccggcgccaacggcgccgacgaccagcccggcgccaacggcgccggcaaccagcccggcgccaacggcgccggcaaccagcccggcgccaacggcgccggcgaccagcccggcgccaacggcgccggcgaccagcccggcgccaacggcgccggcaaccagcccggcgccaacggcgccggcgaccagcccggcgccaacggcgccggcaaccagcccggcgccaacggcgccggcaaccagcccggcgccaacggcgccggcaaccagcccggcgccaacggcgccggcaaccagcccggcgccaacggcgccggcggccaggccgccggcggcaacgccgccaacaagaaggccggcgacgccggcggcaacgccggcggcaacgccggcggccagggccagaacaacgagggcgccaacgcccccaacgagaagagcgugaaggaguaccuggacaaggugagagccaccgugggcaccgaguggacccccugcagcgugaccugcggcgugggcgugagagugagaagaagagugaacgccgccaacaagaagcccgaggaccugacccugaacgaccuggagaccgacgugugcaccauggacaagugcgccggcaucuucaacguggugagcaacagccugggccuggugauccugcuggugcuggcccuguucaacuga

SEQ ID NO: 4863 - RNA, 1173 nt, Artificial Sequence
  derived and/or modified CDS sequence (opt4) from Pv(Cam16)__AHL69649.1__CSP
augaagaacuucauccugcuggccgugagcagcauccugcugguggaccuguuccccacccacugcggccacaacguggaccugagcaaggccaucaaccugaacggcgugggcuucaacaacguggacgccagcagccugggcgccgcccacgugggccagagcgccagcagaggcagaggccugggcgagaaccccgacgacgaggagggcgacgccaagaagaagaaggacggcaagaaggccgagcccaagaaccccagagagaacaagcugaagcagcccgaggacggcgccggcaaccagcccggcgccaacggcgccggcaaccagcccggcgccaacggcgccggcaaccagcccggcgccaacggcgccggcaaccagcccggcgccaacggcgccggcaaccagcccggcgccaacggcgccggcaaccagcccggcgccaacggcgccgacgaccagcccggcgccaacggcgccggcaaccagcccggcgccaacggcgccggcaaccagcccggcgccaacggcgccggcaaccagcccggcgccaacggcgccggcaaccagcccggcgccaacggcgccggcaaccagcccggcgccaacggcgccggcgaccagcccggcgccaacggcgccggcaaccagcccggcgccaacggcgccggcgaccagcccggcgccaacggcgccggcaaccagcccggcgccaacggcgccggcaaccagcccggcgccaacgaggccggcaaccagcccggcgccaacggcgccggcaaccagcccggcgccaacggcgccggcaaccagcccggcgccaacggcgccggcggccaggccgccggcggcaacgccggcggcaacgccggcggccagggccagaacaacgagggcgccaacgcccccaacgagaagagcgugaaggaguaccuggacaaggugagagccaccgugggcaccgaguggacccccugcagcgugaccugcggcgugggcgugagagugagaagaagagugaacgccgccaacaagaagcccgaggaccugacccugaacgaccuggagaccgacgugugcaccauggacaagugcgccggcaucuucaacguggugagcaacagccugggccuggugauccugcuggugcuggcccuguucaacuga

SEQ ID NO: 4864 - RNA, 1170 nt, Artificial Sequence
  derived and/or modified CDS sequence (opt4) from Pv(Cam26)__AGN05254.1__CSP
augaagaacuucauccugcuggccgugagcagcauccugcugguggaccuguuccccacccacugcggccacaacguggaccugagcaaggccaucaaccugaacggcgugaacuucaacaacguggacgccagcagccugggcgccgcccacgugggccagagcgccagcagaggcagaggccugggcgagaaccccgacgacgaggagggcgacgccaagaagaagaaggacggcaagaaggccgagcccaagaaccccagagagaacaagcugaagcagcccggcgacagagccgacggccagcccgccggcgacagagccgacggccagcccgccggcgacagagccgacggccagcccgccggcgacagagccgccggccagcccgccggcgacagagccgacggccagcccgccggcgacagagccgccggccagcccgccggcgacagagccgccggccagcccgccggcgacagagccgacggccagcccgccggcgacagagccgccggccagcccgccggcgacagagccgccggccagcccgccggcgacagagccgacggccagcccgccggcgacagagccgccggccagcccgccggcgacagagccgacggccagcccgccggcgacagagccgccggccagcccgccggcgacagagccgccggccagcccgccggcgacagagccgacggccagcccgccggcgacagagccgccggccagcccgccggcgacagagccgccggccagcccgccggcgacagagccgccggccagcccgccggcaacggcgccggcggccaggccgccggcggcaacgccgccaacaagaaggccgaggacgccggcggcaacgccggcggccagggccagaacaacgagggcgccaacgcccccaacgagaagagcgugaaggaguaccuggacaaggugagagccaccgugggcaccgaguggacccccugcagcgugaccugcggcgugggcgugagagugagaagaagagugaacgccgccaacaagaagcccgaggaccugacccugaacgacaucgagaccgacgugugcaccauggacaagugcgccggcaucuucaacguggugagcaacagccugggccuggugauccugcuggugcuggcccuguucaacuga

SEQ ID NO: 4865 - RNA, 1164 nt, Artificial Sequence
  derived and/or modified CDS sequence (opt4) from Pv(Ch01)__ADB92534.1__CSP
augaagaacuucauccugcuggccgugagcagcauccugcugguggaccuguuccccacccacugcggccacaacguggaccugagcaaggccaucaaccugaacggcgugggcuucaacaacguggacgccagcagccugggcgccgcccacgugggccagagcgccagcagaggcagaggccugggcgagaaccccgacgacgaggagggcgacgccaagaagaagaaggacggcaagaaggccgagcccaagaaccccagagagaacaagcugaagcagcccgaggacggcgccggcgaccagcccggcgccaacggcgccggcaaccagcccggcgccaacggcgccggcaaccagcccggcgccaacggcgccggcaaccagcccggcgccaacggcgccggcaaccagcccggcgccaacggcgccggcaaccagcccggcgccaacggcgccggcaaccagcccggcgccaacggcgccggcaaccagcccggcgccaacggcgccgacgaccagcccggcgccaacggcgccggcaaccagcccggcgccaacggcgccggcgaccagcccggcgccaacggcgccggcaaccagcccggcgccaacggcgccggcgaccagcccggcgccaacggcgccggcaaccagcccggcgccaacggcgccggcaaccagcccggcgccaacggcgccggcaaccagcccggcgccaacggcgccggcaaccagcccggcgccaacggcgccggcggccaggccgccggcggcaacgccgccaacaagaaggccggcgacgccggcgccggcggccaggccgccggcggcaacgccgccaacaagaaggccggcgacgccggcgccggccagggccagaacaacgagggcgccaacgcccccaacgagaagagcgugaaggaguaccuggacaaggugagagccaccgugggcaccgaguggacccccugcagcgugaccugcggcgugggcgugagagugagaagaagagugaacgccgccaacaagaagcccgaggaccugacccugaacgaccuggagaccgacgugugcaccauggacaagugcgccggcaucuucaacguggugagcaacagccugggccuggugauccugcuggugcuggcccuguucaacuga

SEQ ID NO: 4866 - RNA, 1164 nt, Artificial Sequence
  derived and/or modified CDS sequence (opt4) from Pv(Nr04)__ADB92542.1__CSP
augaagaacuucauccugcuggccgugagcagcauccugcugguggaccuguuccccacccacugcggccacaacguggaccugagcaaggccaucaaccugaacggcgugggcuucaacaacguggacgccagcagccugggcgccgcccacgugggccagagcgccagcagaggcagaggccugggcgagaaccccgacgacgaggagggcgacgccaagaagaagaaggacggcaagaaggccgagcccaagaaccccagagagaacaagcugaagcagcccgaggacggcgccggcgaccagcccggcgccaacggcgccggcaaccagcccggcgccaacggcgccggcaaccagcccggcgccaacggcgccggcaaccagcccggcgccaacggcgccggcaaccagcccggcgccaacggcgccggcaaccagcccggcgccaacggcgccggcaaccagcccggcgccaacggcgccggcgaccagcccggcgccaacggcgccgacaaccagcccggcgccaacggcgccggcaaccagcccggcgccaacggcgccggcaaccagcccggcgccaacggcgccggcaaccagcccggcgccaacggcgccggcgaccagcccggcgccaacggcgccggcaaccagcccggcgccaacggcgccggcgaccagcccggcgccaacggcgccggcaaccagcccggcgccaacggcgccggcaaccagcccggcgccaacggcgccggcggccaggccgccggcggcaacgccgccaacaagaaggccggcgacgccggcgccggcggccaggccgccggcggcaacgccgccaacaagaaggccggcgacgccggcgccggccagggccagaacaacgagggcgccaacgcccccaacgagaagagcgugaaggaguaccuggacaaggugagagccaccgugggcaccgaguggacccccugcagcgugaccugcggcgugggcgugagagugagaagaagagugaacgccgccaacaagaagcccgaggaccugacccugaacgaccuggagaccgacgugugcaccauggacaagugcgccggcaucuucaacguggugagcaacagccugggccuggugauccugcuggugcuggcccuguucaacuga

SEQ ID NO: 4867 - RNA, 1164 nt, Artificial Sequence
  derived and/or modified CDS sequence (opt4) from Pv(Pt03)__ADB92553.1__CSP
augaagaacuucauccugcuggccgugagcagcauccugcugguggaccuguuccccacccacugcggccacaacguggaccugagcaaggccaucaaccugaacggcgugggcuucaacaacguggacgccagcagccugggcgccgcccacgugggccagagcgccagcagaggcagaggccugggcgagaaccccgacgacgaggagggcgacgccaagaagaagaaggacggcaagaaggccgagcccaagaaccccagagagaacaagcugaagcagcccgaggacggcgccggcgaccagcccggcgccaacggcgccggcaaccagcccggcgccaacggcgccggcaaccagcccggcgccaacggcgccggcaaccagcccggcgccaacggcgccggcgaccagcccggcgccaacggcgccggcaaccagcccggcgccaacggcgccggcgaccagcccggcgccaacggcgccggcaaccagcccggcgccaacggcgccggcaaccagcccggcgccaacggcgccggcaaccagcccggcgccaacggcgccggcaaccagcccggcgccaacggcgccggcaaccagcccggcgccaacggcgccggcgaccagcccggcgccaacggcgccggcaaccagcccggcgccaacggcgccggcaaccagcccggcgccaacggcgccggcaaccagcccggcgccaacggcgccggcaaccagcccggcgccaacggcgccggcggccaggccgccggcggcaacgccgccaacaagaaggccggcgacgccggcgccggcggccaggccgccggcggcaacgccgccaacaagaaggccggcgacgccggcgccggccagggccagaacaacgagggcgccaacgcccccaacgagaagagcgugaaggaguaccuggacaaggugagagccaccgugggcaccgaguggacccccugcagcgugaccugcggcgugggcgugagagugagaagaagagugaacgccgccaacaagaagcccgaggaccugacccugaacgaccuggagaccgacgugugcaccauggacaagugcgccggcaucuucaacguggugagcaacagccugggccuggugauccugcuggugcuggcccuguucaacuga

SEQ ID NO: 4868 - RNA, 1164 nt, Artificial Sequence
  derived and/or modified CDS sequence (opt4) from Pv(Vc03)__ADB92546.1__CSP
augaagaacuucauccugcuggccgugagcagcauccugcugguggaccuguuccccacccacugcggccacaacguggaccugagcaaggccaucaaccugaacggcgugggcuucaacaacguggacgccagcagccugggcgccgcccacgugggccagagcgccagcagaggcagaggccugggcgagaaccccgacgacgaggagggcgacgccaagaagaagaaggacggcaagaaggccgagcccaagaaccccagagagaacaagcugaagcagcccgaggacggcgccggcgaccagcccggcgccaacggcgccggcaaccagcccggcgccaacggcgccggcaaccagcccggcgccaacggcgccggcaaccagcccggcgccaacggcgccggcaaccagcccggcgccaacggcgccggcaaccagcccggcgccaacggcgccggcaaccagcccggcgccaacggcgccggcgaccagcccggcgccaacggcgccgacgaccagcccggcgccaacggcgccggcaaccagcccggcgccaacggcgccggcaaccagcccggcgccaacggcgccggcaaccagcccggcgccaacggcgccggcgaccagcccggcgccaacggcgccggcaaccagcccggcgccaacggcgccggcaaccagcccggcgccaacggcgccggcaaccagcccggcgccaacggcgccggcaaccagcccggcgccaacggcgccggcggccaggccgccggcggcaacgccgccaacaagaaggccggcgacgccggcgccggcggccaggccgccggcggcaacgccgccaacaagaaggccggcgacgccggcgccggccagggccagaacaacgagggcgccaacgcccccaacgagaagagcgugaaggaguaccuggacaaggugagagccaccgugggcaccgaguggacccccugcagcgugaccugcggcgugggcgugagagugagaagaagagugaacgccgccaacaagaagcccgaggaccugacccugaacgaccuggagaccgacgugugcaccauggacaagugcgccggcaucuucaacguggugagcaacagccugggccuggugauccugcuggugcuggcccuguucaacuga

SEQ ID NO: 4869 - RNA, 1164 nt, Artificial Sequence
  derived and/or modified CDS sequence (opt4) from Pv(Vc04)__ADB92547.1__CSP
augaagaacuucauccugcuggccgugagcagcauccugcugguggaccuguuccccacccacugcggccacaacguggaccugagcaaggccaucaaccugaacggcgugggcuucaacaacguggacgccagcagccugggcgccgcccacgugggccagagcgccagcagaggcagaggccugggcgagaaccccgacgacgaggagggcgacgccaagaagaagaaggacggcaagaaggccgagcccaagaaccccagagagaacaagcugaagcagcccgaggacggcgccggcgaccagcccggcgccaacggcgccggcaaccagcccggcgccaacggcgccggcaaccagcccggcgccaacggcgccggcaaccagcccggcgccaacggcgccggcaaccagcccggcgccaacggcgccggcaaccagcccggcgccaacggcgccggcaaccagcccggcgccaacggcgccgacgaccagcccggcgccaacggcgccggcgaccagcccggcgccaacggcgccggcaaccagcccggcgccaacggcgccggcaaccagcccggcgccaacggcgccggcgaccagcccggcgccaacggcgccggcgaccagcccggcgccaacggcgccggcaaccagcccggcgccaacggcgccggcgaccagcccggcgccaacggcgccggcaaccagcccggcgccaacggcgccggcaaccagcccggcgccaacggcgccggcggccaggccgccggcggcaacgccgccaacaagaaggccggcgacgccggcgccggcggccaggccgccggcggcaacgccgccaacaagaaggccggcgacgccggcgccggccagggccagaacaacgagggcgccaacgcccccaacgagaagagcgugaaggaguaccuggacaaggugagagccaccgugggcaccgaguggacccccugcagcgugaccugcggcgugggcgugagagugagaagaagagugaacgccgccaacaagaagcccgaggaccugacccugaacgaccuggagaccgacgugugcaccauggacaagugcgccggcaucuucaacguggugagcaacagccugggccuggugauccugcuggugcuggcccuguucaacuga

SEQ ID NO: 4870 - RNA, 1164 nt, Artificial Sequence
  derived and/or modified CDS sequence (opt4) from Pv(Vc05)__ADB92548.1__CSP
augaagaacuucauccugcuggccgugagcagcauccugcugguggaccuguuccccacccacugcggccacaacguggaccugagcaaggccaucaaccugaacggcgugggcuucaacaacguggacgccagcagccugggcgccgcccacgugggccagagcgccagcagaggcagaggccugggcgagaaccccgacgacgaggagggcgacgccaagaagaagaaggacggcaagaaggccgagcccaagaaccccagagagaacaagcugaagcagcccgaggacggcgccggcgaccagcccggcgccaacggcgccggcaaccagcccggcgccaacggcgccggcaaccagcccggcgccaacggcgccggcaaccagcccggcgccaacggcgccggcaaccagcccggcgccaacggcgccggcaaccagcccggcgccaacggcgccggcaaccagcccggcgccaacggcgccggcgaccagcccggcgccaacggcgccggcaaccagcccggcgccaacggcgccggcaaccagcccggcgccaacggcgccggcaaccagcccggcgccaacggcgccggcgaccagcccggcgccaacggcgccggcgaccagcccggcgccaacggcgccggcaaccagcccggcgccaacggcgccggcaaccagcccggcgccaacggcgccggcaaccagcccggcgccaacggcgccggcaaccagcccggcgccaacggcgccggcggccaggccgccggcggcaacgccgccaacaagaaggccggcgacgccggcgccggcggccaggccgccggcggcaacgccgccaacaagaaggccggcgacgccggcgccggccagggccagaacaacgagggcgccaacgcccccaacgagaagagcgugaaggaguaccuggacaaggugagagccaccgugggcaccgaguggacccccugcagcgugaccugcggcgugggcgugagagugagaagaagagugaacgccgccaacaagaagcccgaggaccugacccugaacgaccuggagaccgacgugugcaccauggacaagugcgccggcaucuucaacguggugagcaacagccugggccuggugauccugcuggugcuggcccuguucaacuga

SEQ ID NO: 4871 - RNA, 1161 nt, Artificial Sequence
  derived and/or modified CDS sequence (opt4) from Pv(Ca03)__ADB92531.1__CSP
augaagaacuucauccugcuggccgugagcagcauccugcugguggaccuguuccccacccacugcggccacaacguggaccugagcaaggccaucaaccugaacggcgugggcuucaacaacguggacgccagcagccugggcgccgcccacgugggccagagcgccagcagaggcagaggccugggcgagaaccccgacgacgaggagggcgacgccaagaagaagaaggacggcaagaaggccgagcccaagaaccccagagagaacaagcugaagcagcccgaggacggcgccggcgaccagcccggcgccaacggcgccggcaaccagcccggcgccaacggcgccggcaaccagcccggcgccaacggcgccggcaaccagcccggcgccaacggcgccggcaaccagcccggcgccaacggcgccggcaaccagcccggcgccaacggcgccggcaaccagcccggcgccaacggcgccgacgaccagcccggcgccaacggcgccgacgaccagcccggcgccaacggcgccggcaaccagcccggcgccaacggcgccggcaaccagcccggcgccaacggcgccggcgaccagcccggcgccaacggcgccggcgaccagcccggcgccaacggcgccggcaaccagcccggcgccaacggcgccggcgaccagcccggcgccaacggcgccggcaaccagcccggcgccaacggcgccggcaaccagcccggcgccaacggcgccggcaaccagcccggcgccaacggcgccggcaaccagcccggcgccaacggcgccggcggccaggccgccggcggcaacgccgccaacaagaaggccggcgacgccggcggcggccagggccagaacaacgagggcgccaacgcccccaacgagaagagcgugaaggaguaccuggacaaggugagagccaccgugggcaccgaguggacccccugcagcgugaccugcggcgugggcgugagagugagaagaagagugaacgccgccaacaagaagcccgaggaccugacccugaacgaccuggagaccgacgugugcaccauggacaagugcgccggcaucuucaacguggugagcaacagccugggccuggugauccugcuggugcuggcccuguucaacuga

SEQ ID NO: 4872 - RNA, 1161 nt, Artificial Sequence
  derived and/or modified CDS sequence (opt4) from Pv(Cam5)__AHL69647.1__CSP
augaagaacuucauccugcuggccgugagcagcauccugcugguggaccuguuccccacccacugcggccacaacguggaccugagcaaggccaucaaccugaacggcgugggcuucaacaacguggacgccagcagccugggcgccgcccacgugggccagagcgccagcagaggcagaggccugggcgagaaccccgacgacgaggagggcgacgccaagaagaagaaggacggcaagaaggccgagcccaagaaccccagagagaacaagcugaagcagcccgaggacggcgccggcaaccagcccggcgccaacggcgccggcaaccagcccggcgccaacggcgccggcaaccagcccggcgccaacggcgccggcaaccagcccggcgccaacggcgccggcaaccagcccggcgccaacggcgccggcaaccagcccggcgccaacggcgccggcaaccagcccggcgccaacggcgccgacgaccagcccggcgccaacggcgccggcaaccagcccggcgccaacggcgccggcaaccagcccggcgccaacggcgccggcaaccagcccggcgccaacggcgccggcgaccagcccggcgccaacggcgccggcaaccagcccggcgccaacggcgccggcgaccagcccggcgccaacggcgccggcaaccagcccggcgccaacggcgccggcaaccagcccggcgccaacgaggccggcaaccagcccggcgccaacggcgccggcaaccagcccggcgccaacggcgccggcaaccagcccggcgccaacggcgccggcggccaggccgccggcggcaacgccgccaacaagaaggccggcgacgccggcgccggccagggccagaacaacgagggcgccaacgcccccaacgagaagagcgugaaggaguaccuggacaaggugagagccaccgugggcaccgaguggacccccugcagcgugaccugcggcgugggcgugagagugagaagaagagugaacgccgccaacaagaagcccgaggaccugacccugaacgaccuggagaccgacgugugcaccauggacaagugcgccggcaucuucaacguggugagcaacagccugggccuggugauccugcuggugcuggcccuguucaacuga

SEQ ID NO: 4873 - RNA, 1161 nt, Artificial Sequence
  derived and/or modified CDS sequence (opt4) from Pv(Cam5)__AGN05236.2__CSP
augaagaacuucauccugcuggccgugagcagcauccugcugguggaccuguuccccacccacugcggccacaacguggaccugagcaaggccaucaaccugaacggcgugaacuucaacaacguggacgccagcagccugggcgccgcccacgugggccagagcgccagcagaggcagaggccugggcgagaaccccgacgacgaggagggcgacgccaagaagaagaaggacggcaagaaggccgagcccaagaaccccagagagaacaagcugaagcagcccggcgacagagccgacggccagcccgccggcgacggcgccgccggccagcccgccggcgacggcgccgccggccagcccgccggcgacagagccgccggccagcccgccggcgacagagccgccggccagcccgccggcgacggcgccgccggccagcccgccggcgacggcgccgccggccagcccgccggcgacagagccgccggccagcccgccggcgacagagccgccggccagcccgccggcgacagagccgacggccagcccgccggcgacagagccgccggccagcccgccggcgacagagccgccggccagcccgccggcgacagagccgacggccagcccgccggcgacagagccgccggccagcccgccggcgacagagccgccggccagcccgccggcgacagagccgccggccagcccgccggcgacagagccgacggccagcccgccggcgacagagccgccggccagcccgccggcgacagagccgccggccagcccgccggcgacagagccgccggccagcccgccggcaacggcgccggcggccaggccgccggcggcaacgccggcggccagggccagaacaacgagggcgccaacgcccccaacgagaagagcgugaaggaguaccuggacaaggugagagccaccgugggcaccgaguggacccccugcagcgugaccugcggcgugggcgugagagugagaagaagagugaacgccgccaacaagaagcccgaggaccugacccugaacgaccuggagaccgacgugugcaccauggacaagugcgccggcaucuucaacguggugagcaacagccugggccuggugauccugcuggugcuggcccuguucaacuga

SEQ ID NO: 4874 - RNA, 1161 nt, Artificial Sequence
  derived and/or modified CDS sequence (opt4) from Pv(Cam7)__AGN05238.1__CSP
augaagaacuucauccugcuggccgugagcagcauccugcugguggaccuguuccccacccacugcggccacaacguggaccugagcaaggccaucaaccugaacggcgugggcuucaacaacguggacgccagcagccugggcgccgcccacgugggccagagcgccagcagaggcagaggccugggcgagaaccccgacgacgaggagggcgacgccaagaagaagaaggacggcaagaaggccgagcccaagaaccccagagagaacaagcugaagcagcccgaggacggcgccggcaaccagcccggcgccaacggcgccggcaaccagcccggcgccaacggcgccggcaaccagcccggcgccaacggcgccggcaaccagcccggcgccaacggcgccggcaaccagcccggcgccaacggcgccggcaaccagcccggcgccaacggcgccggcaaccagcccggcgccaacggcgccgacgaccagcccggcgccaacggcgccggcaaccagcccggcgccaacggcgccggcaaccagcccggcgccaacggcgccggcaaccagcccggcgccaacggcgccggcaaccagcccggcgccaacggcgccggcgaccagcccggcgccaacggcgccggcaaccagcccggcgccaacggcgccggcgaccagcccggcgccaacggcgccggcaaccagcccggcgccaacgaggccggcaaccagcccggcgccaacggcgccggcaaccagcccggcgccaacggcgccggcaaccagcccggcgccaacggcgccggcggccaggccgccggcggcaacgccgccaacaagaaggccggcgacgccggcgccggccagggccagaacaacgagggcgccaacgcccccaacgagaagagcgugaaggaguaccuggacaaggugagagccaccgugggcaccgaguggacccccugcagcgugaccugcggcgugggcgugagagugagaagaagagugaacgccgccaacaagaagcccgaggaccugacccugaacgaccuggagaccgacgugugcaccauggacaagugcgccggcaucuucaacguggugagcaacagccugggccuggugauccugcuggugcuggcccuguucaacuga

SEQ ID NO: 4875 - RNA, 1161 nt, Artificial Sequence
  derived and/or modified CDS sequence (opt4) from Pv(CSP27VK247)__ANS71607.1__CSP
augaagaacuucauccugcuggccgugagcagcauccugcugguggaccuguuccccacccacugcggccacaacguggaccugagcaaggccaucaaccugaacggcgugggcuucaacaacguggacgccagcagccugggcgccgcccacgugggccagagcgccagcagaggcagaggccugggcgagaaccccgacgacgaggagggcgacgccaagaagaagaaggacggcaagaaggccgagcccaagaaccccagagagaacaagcugaagcagcccgaggacggcgccggcaaccagcccggcgccaacggcgccggcgaccagcccggcgccaacggcgccggcaaccagcccggcgccaacggcgccggcaaccagcccggcgccaacggcgccggcaaccagcccggcgccaacggcgccggcaaccagcccggcgccaacggcgccggcaaccagcccggcgccaacggcgccggcgaccagcccggcgccaacggcgccggcaaccagcccggcgccaacggcgccggcaaccagcccggcgccaacggcgccggcaaccagcccggcgccaacggcgccggcgaccagcccggcgccaacggcgccggcaaccagcccggcgccaacggcgccggcgaccagcccggcgccaacggcgccggcaaccagcccggcgccaacggcgccggcaaccagcccggcgccaacggcgccggcaaccagcccggcgccaacggcgccggcaaccagcccggcgccaacggcgccggcaaccagcccggcgccaacggcgccggcggccaggccgccggcggcaacgccgccaacaagaaggccggcgacgccggcgccggccagggccagaacaacgagggcgccaacgcccccaacgagaagagcgugaaggaguaccuggacaaggugagaaccaccgugggcaccgaguggacccccugcagcgugaccugcggcgugggcgugagagugagaagaagagugaacgccgccaacaagaagcccgaggaccugacccugaacgaccuggagaccgacgugugcaccauggacaagugcgccggcaucuucaacguggugagcaacagccugggccuggugauccugcuggugcuggcccuguucaacuga

SEQ ID NO: 4876 - RNA, 1161 nt, Artificial Sequence
  derived and/or modified CDS sequence (opt4) from Pv(CSP38VK247)__ANS71618.1__CSP
augaagaacuucauccugcuggccgugagcagcauccugcugguggaccuguuccccacccacugcggccacaacguggaccugagcaaggccaucaaccugaacggcgugaacuucaacaacguggacgccagcagccugggcgccgcccacgugggccagagcgccagcagaggcagaggccugggcgagaaccccgacgacgaggagggcgacgccaagaagaagaaggacggcaagaaggccgagcccaagaaccccagagagaacaagcugaagcagcccgaggacggcgccggcgaccagcccggcgccaacggcgccggcaaccagcccggcgccaacggcgccggcaaccagcccggcgccaacggcgccggcaaccagcccggcgccaacggcgccggcaaccagcccggcgccaacggcgccggcaaccagcccggcgccaacggcgccggcaaccagcccggcgccaacggcgccggcgaccagcccggcgccaacggcgccggcaaccagcccggcgccaacggcgccggcgaccagcccggcgccaacggcgccggcaaccagcccggcgccaacggcgccggcaaccagcccggcgccaacggcgccggcgaccagcccggcgccaacggcgccggcaaccagcccggcgccaacggcgccggcgaccagcccggcgccaacggcgccggcaaccagcccggcgccaacggcgccggcaaccagcccggcgccaacggcgccggcaaccagcccggcgccaacggcgccggcaaccagcccggcgccaacggcgccggcggccaggccgccggcggcaacgccgccaacaagaaggccggcgacgccggcgccggccagggccagaacaacgagggcgccaacgcccccaacgagaagagcgugaaggaguaccuggacaaggugagagccaccgugggcaccgaguggacccccugcagcgugaccugcggcgugggcgugagagugagaagaagagugaacgccgccaacaagaagcccgaggaccugacccugaacgacaucgagaccgacgugugcaccauggacaagugcgccggcaucuucaacguggugagcaacagccugggccuggugauccugcuggugcuggcccuguucaacuga

SEQ ID NO: 4877 - RNA, 1161 nt, Artificial Sequence
  derived and/or modified CDS sequence (opt4) from Pv(CSP48VK247)__ANS71628.1__CSP
augaagaacuucauccugcuggccgugagcagcauccugcugguggaccuguuccccacccacugcggccacaacguggaccugagcaaggccaucaaccugaacggcgugggcuucaacaacguggacgccagcagccugggcgccgcccacgugggccagagcgccagcagaggcagaggccugggcgagaaccccgacgacgaggagggcgacgccaagaagaagaaggacggcaagaaggccgagcccaagaaccccagagagaacaagcugaagcagcccgaggacggcgccggcaaccagcccggcgccaacggcgccggcgaccagcccggcgccaacggcgccggcaaccagcccggcgccaacggcgccggcaaccagcccggcgccaacggcgccggcaaccagcccggcgccaacggcgccggcaaccagcccggcgccaacggcgccggcaaccagcccggcgccaacggcgccggcgaccagcccggcgccaacggcgccggcaaccagcccggcgccaacggcgccggcaaccagcccggcgccaacggcgccggcaaccagcccggcgccaacggcgccggcgaccagcccggcgccaacggcgccggcaaccagcccggcgccaacggcgccggcgaccagcccggcgccaacggcgccggcaaccagcccggcgccaacggcgccggcaaccagcccggcgccaacggcgccggcaaccagcccggcgccaacggcgccggcaaccagcccggcgccaacggcgccggcaaccagcccggcgccaacggcgccggcggccaggccgccggcggcaacgccgccaacaagaaggccggcgacgccggcgccggccagggccagaacaacgagggcgccaacgcccccaacgagaagagcgugaaggaguaccuggacaaggugagagccaccgugggcaccgaguggacccccugcagcgugaccugcggcgugggcgugagagugagaagaagagugaacgccgccaacaagaagcccgaggaccugacccugaacgaccuggagaccgacgugugcaccauggacaagugcgccggcaucuucaacguggugagcaacagccugggccuggugauccugcuggugcuggcccuguucaacuga

SEQ ID NO: 4878 - RNA, 1161 nt, Artificial Sequence
  derived and/or modified CDS sequence (opt4) from Pv(Nr01)__ADB92539.1__CSP
augaagaacuucauccugcuggccgugagcagcauccugcugguggaccuguuccccacccacugcggccacaacguggaccugagcaaggccaucaaccugaacggcgugggcuucaacaacguggacgccagcagccugggcgccgcccacgugggccagagcgccagcagaggcagaggccugggcgagaaccccgacgacgaggagggcgacgccaagaagaagaaggacggcaagaaggccgagcccaagaaccccagagagaacaagcugaagcagcccgaggacggcgccggcgaccagcccggcgccaacggcgccggcaaccagcccggcgccaacggcgccggcaaccagcccggcgccaacggcgccggcaaccagcccggcgccaacggcgccggcaaccagcccggcgccaacggcgccggcaaccagcccggcgccaacggcgccggcaaccagcccggcgccaacggcgccggcgaccagcccggcgccaacggcgccgacgaccagcccggcgccaacggcgccggcaaccagcccggcgccaacggcgccggcaaccagcccggcgccaacggcgccggcgaccagcccggcgccaacggcgccggcgaccagcccggcgccaacggcgccggcaaccagcccggcgccaacggcgccggcgaccagcccggcgccaacggcgccggcaaccagcccggcgccaacggcgccggcaaccagcccggcgccaacggcgccggcggccagcccggcgccaacggcgccggcaaccagcccggcgccaacggcgccggcggccaggccgccggcggcaacgccgccaacaagaaggccggcgacgccggcgccggccagggccagaacaacgagggcgccaacgcccccaacgagaagagcgugaaggaguaccuggacaaggugagagccaccgugggcaccgaguggacccccugcagcgugaccugcggcgugggcgugagagugagaagaagagugaacgccgccaacaagaagcccgaggaccugacccugaacgaccuggagaccgacgugugcaccauggacaagugcgccggcaucuucaacguggugagcaacagccugggccuggugauccugcuggugcuggcccuguucaacuga

SEQ ID NO: 4879 - RNA, 1161 nt, Artificial Sequence
  derived and/or modified CDS sequence (opt4) from Pv(Nr02)__ADB92540.1__CSP
augaagaacuucauccugcuggccgugagcagcauccugcugguggaccuguuccccacccacugcggccacaacguggaccugagcaaggccaucaaccugaacggcgugggcuucaacaacguggacgccagcagccugggcgccgcccacgugggccagagcgccagcagaggcagaggccugggcgagaaccccgacgacgaggagggcgacgccaagaagaagaaggacggcaagaaggccgagcccaagaaccccagagagaacaagcugaagcagcccgaggacggcgccggcgaccagcccggcgccaacggcgccggcaaccagcccggcgccaacggcgccggcaaccagcccggcgccaacggcgccggcaaccagcccggcgccaacggcgccggcaaccagcccggcgccaacggcgccggcaaccagcccggcgccaacggcgccggcaaccagcccggcgccaacggcgccggcgaccagcccggcgccaacggcgccggcgaccagcccggcgccaacggcgccggcaaccagcccggcgccaacggcgccggcaaccagcccggcgccaacggcgccggcgaccagcccggcgccaacggcgccggcgaccagcccggcgccaacggcgccggcaaccagcccggcgccaacggcgccggcgaccagcccggcgccaacggcgccggcaaccagcccggcgccaacggcgccggcaaccagcccggcgccaacggcgccggcaaccagcccggcgccaacggcgccggcaagcagcccggcgccaacggcgccggcggccaggccgccggcggcaacgccgccaacaagaaggccggcgacgccggcgccggccagggccagaacaacgagggcgccaacgcccccaacgagaagagcgugaaggaguaccuggacaaggugagagccaccgugggcaccgaguggacccccugcagcgugaccugcggcgugggcgugagagugagaagaagagugaacgccgccaacaagaagcccgaggaccugacccugaacgaccuggagaccgacgugugcaccauggacaagugcgccggcaucuucaacguggugagcaacagccugggccuggugauccugcuggugcuggcccuguucaacuga

SEQ ID NO: 4880 - RNA, 1161 nt, Artificial Sequence
  derived and/or modified CDS sequence (opt4) from Pv(Nr05)__ADB92543.1__CSP
augaagaacuucauccugcuggccgugagcagcauccugcugguggaccuguuccccacccacugcggccacaacguggaccugagcaaggccaucaaccugaacggcgugggcuucaacaacguggacgccagcagccugggcgccgcccacgugggccagagcgccagcagaggcagaggccugggcgagaaccccgacgacgaggagggcgacgccaagaagaagaaggacggcaagaaggccgagcccaagaaccccagagagaacaagcugaagcagcccgaggacggcgccggcgaccagcccggcgccaacggcgccggcaaccagcccggcgccaacggcgccggcaaccagcccggcgccaacggcgccggcaaccagcccggcgccaacggcgccggcaaccagcccggcgccaacggcgccggcaaccagcccggcgccaacggcgccggcaaccagcccggcgccaacggcgccggcaaccagcccggcgccaacggcgccgacgaccagcccggcgccaacggcgccggcaaccagcccggcgccaacggcgccggcaaccagcccggcgccaacggcgccggcaaccagcccggcgccaacggcgccggcgaccagcccggcgccaacggcgccggcaaccagcccggcgccaacggcgccggcgaccagcccggcgccaacggcgccggcaaccagcccggcgccaacggcgccggcaaccagcccggcgccaacggcgccggcaaccagcccggcgccaacggcgccggcaaccagcccggcgccaacggcgccggcggccaggccgccggcggcaacgccgccaacaagaaggccggcgacgccggcgccggccagggccagaacaacgagggcgccaacgcccccaacgagaagagcgugaaggaguaccuggacaaggugagagccaccgugggcaccgaguggacccccugcagcgugaccugcggcgugggcgugagagugagaagaagagugaacgccgccaacaagaagcccgaggaccugacccugaacgaccuggagaccgacgugugcaccauggacaagugcgccggcaucuucaacguggugagcaacagccugggccuggugauccugcuggugcuggcccuguucaacuga

SEQ ID NO: 4881 - RNA, 1161 nt, Artificial Sequence
  derived and/or modified CDS sequence (opt4) from Pv(Vc01)__ADB92544.1__CSP
augaagaacuucauccugcuggccgugagcagcauccugcugguggaccuguuccccacccacugcggccacaacguggaccugagcaaggccaucaaccugaacggcgugggcuucaacaacguggacgccagcagccugggcgccgcccacgugggccagagcgccagcagaggcagaggccugggcgagaaccccgacgacgaggagggcgacgccaagaagaagaaggacggcaagaaggccgagcccaagaaccccagagagaacaagcugaagcagcccgaggacggcgccggcgaccagcccggcgccaacggcgccggcaaccagcccggcgccaacggcgccggcaaccagcccggcgccaacggcgccggcaaccagcccggcgccaacggcgccggcaaccagcccggcgccaacggcgccggcaaccagcccggcgccaacggcgccggcaaccagcccggcgccaacggcgccggcaaccagcccggcgccaacggcgccgacgaccagcccggcgccaacggcgccggcaaccagcccggcgccaacggcgccggcaaccagcccggcgccaacggcgccggcaaccagcccggcgccaacggcgccggcgaccagcccggcgccaacggcgccggcaaccagcccggcgccaacggcgccggcgaccagcccggcgccaacggcgccggcaaccagcccggcgccaacggcgccggcaaccagcccggcgccaacggcgccggcaaccagcccggcgccaacggcgccggcaaccagcccggcgccaacggcgccggcggccaggccgccggcggcaacgccgccaacaagaaggccggcgacgccggcggcggccagggccagaacaacgagggcgccaacgcccccaacgagaagagcgugaaggaguaccuggacaaggugagagccaccgugggcaccgaguggacccccugcagcgugaccugcggcgugggcgugagagugagaagaagagugaacgccgccaacaagaagcccgaggaccugacccugaacgaccuggagaccgacgugugcaccauggacaagugcgccggcaucuucaacguggugagcaacagccugggccuggugauccugcuggugcuggcccuguucaacuga

SEQ ID NO: 4882 - RNA, 1161 nt, Artificial Sequence
  derived and/or modified CDS sequence (opt4) from Pv(Vc02)__ADB92545.1__CSP
augaagaacuucauccugcuggccgugagcagcauccugcugguggaccuguuccccacccacugcggccacaacguggaccugagcaaggccaucaaccugaacggcgugggcuucaacaacguggacgccagcagccugggcgccgcccacgugggccagagcgccagcagaggcagaggccugggcgagaaccccgacgacgaggagggcgacgccaagaagaagaaggacggcaagaaggccgagcccaagaaccccagagagaacaagcugaagcagcccgaggacggcgccggcgaccagcccggcgccaacggcgccggcaaccagcccggcgccaacggcgccggcaaccagcccggcgccaacggcgccggcaaccagcccggcgccaacggcgccggcaaccagcccggcgccaacggcgccggcaaccagcccggcgccaacggcgccggcaaccagcccggcgccaacggcgccggcgaccagcccggcgccaacggcgccgacgaccagcccggcgccaacggcgccggcaaccagcccggcgccaacggcgccggcaaccagcccggcgccaacggcgccggcgaccagcccggcgccaacggcgccggcgaccagcccggcgccaacggcgccggcaaccagcccggcgccaacggcgccggcgaccagcccggcgccaacggcgccggcaaccagcccggcgccaacggcgccggcaaccagcccggcgccaacggcgccggcaaccagcccggcgccaacggcgccggcaaccagcccggcgccaacggcgccggcggccaggccgccggcggcaacgccgccaacaagaaggccggcgacgccggcgccggccagggccagaacaacgagggcgccaacgcccccaacgagaagagcgugaaggaguaccuggacaaggugagagccaccgugggcaccgaguggacccccugcagcgugaccugcggcgugggcgugagagugagaagaagagugaacgccgccaacaagaagcccgaggaccugacccugaacgaccuggagaccgacgugugcaccauggacaagugcgccggcaucuucaacguggugagcaacagccugggccuggugauccugcuggugcuggcccuguucaacuga

SEQ ID NO: 4883 - RNA, 1158 nt, Artificial Sequence
  derived and/or modified CDS sequence (opt4) from Pv(Cam46)__AHL69652.1__CSP
augaagaacuucauccugcuggccgugagcagcauccugcugguggaccuguuccccacccacugcggccacaacguggaccugagcaaggccaucaaccugaacggcgugggcuucaacaacguggacgccagcagccugggcgccgcccacgugggccagagcgccagcagaggcagaggccugggcgagaaccccgacgacgaggagggcgacgccaagaagaagaaggacggcaagaaggccgagcccaagaaccccagagagaacaagcugaagcagcccgaggacggcgccggcaaccagcccggcgccaacggcgccggcaaccagcccggcgccaacggcgccggcaaccagcccggcgccaacggcgccgacgaccagcccggcgccaacggcgccggcaaccagcccggcgccaacggcgccggcaaccagcccggcgccaacggcgccggcaaccagcccggcgccaacggcgccggcaaccagcccggcgccaacggcgccgacgaccagcccggcgccaacggcgccggcaaccagcccggcgccaacggcgccggcaaccagcccggcgccaacggcgccggcaaccagcccggcgccaacggcgccggcgaccagcccggcgccaacggcgccggcaaccagcccggcgccaacggcgccggcaaccagcccggcgccaacggcgccggcaaccagcccggcgccaacggcgccggcaaccagcccggcgccaacggcgccggcaaccagcccggcgccaacggcgccggcaaccagcccggcgccaacggcgccggcggccaggccgccggcggcaacgccggcggcaacgccggcggcaacgccggcggccagggccagaacaacgagggcgccaacgcccccaacgagaagagcgugaaggaguaccuggacaaggugagagccaccgugggcaccgaguggacccccugcagcgugaccugcggcgugggcgugagagugagaagaagagugaacgccgccaacaagaagcccgaggaccugacccugaacgaccuggagaccgacgugugcaccauggacaagugcgccggcaucuucaacguggugagcaacagccugggccuggugauccugcuggugcuggcccuguucaacuga

SEQ ID NO: 4884 - RNA, 1143 nt, Artificial Sequence
  derived and/or modified CDS sequence (opt4) from Pv(Cam20)__AGN05250.1__CSP
augaagaacuucauccugcuggccgugagcagcauccugcugguggaccuguuccccacccacugcggccacaacguggaccugagcaaggccaucaaccugaacggcgugaacuucaacaacguggacgccagcagccugggcgccgcccacgugggccagagcgccagcagaggcagaggccugggcgagaaccccgacgacgaggagggcgacgccaagaagaagaaggacggcaagaaggccgagcccaagaaccccagagagaacaagcugaagcagcccggcgacagagccgacggccagcccgccggcgacagagccgacggccagcccgccggcgacagagccgacggccagcccgccggcgacagagccgccggccagcccgccggcgacagagccgacggccagcccgccggcgacagagccgccggccagcccgccggcgacagagccgacggccagcccgccggcgacagagccgccggccagcccgccggcgacagagccgacggccagcccgccggcgacagagccgccggccagcccgccggcgacagagccgacggccagcccgccggcgacagagccgccggccagcccgccggcgacagagccgccggccagcccgccggcgacagagccgccggccagcccgccggcgacagagccgacggccagcccgccggcgacagagccgccggccagcccgccggcgacagagccgccggccagcccgccggcgacagagccgccggccagcccgccggcaacggcgccggcggccaggccgccggcggcaacgccgccaacaagaaggccgaggacgccggcggcaacgccggcggccagggccagaacaacgagggcgccaacgcccccaacgagaagagcgugaaggaguaccuggacaaggugagagccaccgugggcaccgaguggacccccugcagcgugaccugcggcgugggcgugagagugagaagaagagugaacgccgccaacaagaagcccgaggaccugacccugaacgacaucgagaccgacgugugcaccauggacaagugcgccggcaucuucaacguggugagcaacagccugggccuggugauccugcuggugcuggcccuguucaacuga

SEQ ID NO: 4885 - RNA, 1143 nt, Artificial Sequence
  derived and/or modified CDS sequence (opt4) from Pv(Cam22)__AGN05252.1__CSP
augaagaacuucauccugcuggccgugagcagcauccugcugguggaccuguuccccacccacugcggccacaacguggaccugagcaaggccaucaaccugaacggcgugaacuucaacaacguggacgccagcagccugggcgccgcccacgugggccagagcgccagcagaggcagaggccugggcgagaaccccgacgacgaggagggcgacgccaagaagaagaaggacggcaagaaggccgagcccaagaaccccagagagaacaagcugaagcagcccggcgacagagccgacggccagcccgccggcgacagagccgacggccagcccgccggcgacagagccgacggccagcccgccggcgacagagccgccggccagcccgccggcgacagagccgacggccagcccgccggcgacagagccgccggccagcccgccggcgacagagccgacggccagcccgccggcgacagagccgccggccagcccgccggcgacagagccgccggccagcccgccggcgacagagccgacggccagcccgccggcgacagagccgccggccagcccgccggcgacagagccgacggccagcccgccggcgacagagccgccggccagcccgccggcgacagagccgccggccagcccgccggcgacagagccgacggccagcccgccggcgacagagccgccggccagcccgccggcgacagagccgccggccagcccgccggcgacagagccgccggccagcccgccggcaacggcgccggcggccaggccgccggcggcaacgccgccaacaagaaggccgaggacgccggcggcaacgccggcggccagggccagaacaacgagggcgccaacgcccccaacgagaagagcgugaaggaguaccuggacaaggugagagccaccgugggcaccgaguggacccccugcagcgugaccugcggcgugggcgugagagugagaagaagagugaacgccgccaacaagaagcccgaggaccugacccugaacgacaucgagaccgacgugugcaccauggacaagugcgccggcaucuucaacguggugagcaacagccugggccuggugauccugcuggugcuggcccuguucaacuga

SEQ ID NO: 4886 - RNA, 1143 nt, Artificial Sequence
  derived and/or modified CDS sequence (opt4) from Pv(Cam36)__AHL69651.1__CSP
augaagaacuucauccugcuggccgugagcagcauccugcugguggaccuguuccccacccacugcggccacaacguggaccugagcaaggccaucaaccugaacggcgugaacuucaacaacguggacgccagcagccugggcgccgcccacgugggccagagcgccagcagaggcagaggccugggcgagaaccccgacgacgaggagggcgacgccaagaagaagaaggacggcaagaaggccgagcccaagaaccccagagagaacaagcugaagcagcccgccggcgacggcgccgccgugcagcccgccggcgacggcgccgccgugcagcccgccggcgacggcgccgacggccagcccgccggcgacggcgccgccgugcagcccgccggcgacggcgccgccggccagcccgccggcgacagagccgccggccagcccgccggcaacagagccgccggccagcccgccggcgacagagccgacggccagcccgccggcgacagagccgccggccagcccgccggcgacagagccgccggccagcccgccggcgacagagccgacggccagcccgccggcgacagagccgccggccagcccgccggcgacagagccgccggccagcccgccggcgacagagccgccggccagcccgccggcgacagagccgacggccagcccgccggcgacagagccgccggccagcccgccggcgacagagccgccggccagcccgccggcgacagagccgccggccaggccgccggcggcaacgccggcggcaacgccggcggcaacgccggcggcaacgccggcggcaacgccggcggcaacgccggcggccagggccagaacaacgagggcgccaacgcccccaacgagaagagcgugaaggaguaccuggacaaggugagagccaccgugggcaccgaguggacccccugcagcgugaccugcggcgugggcgugagagugagaagaagagugaacgccgccaacaagaagcccgaggaccugacccugaacgaccuggagaccgacgugugcaccauggacaagugcgccggcaucuucaacguggugagcaacagccugggccuggugauccugcuggugcuggcccuguucaacuga

SEQ ID NO: 4887 - RNA, 1137 nt, Artificial Sequence
  derived and/or modified CDS sequence (opt4) from Pv(Pt01.7)__ADB92550.1__CSP
augaagaacuucauccugcuggccgugagcagcauccugcugguggaccuguuccccacccacugcggccacaacguggaccugagcaaggccaucaaccugaacggcgugggcuucaacaacguggacgccagcagccugggcgccgcccacgugggccagagcgccagcagaggcagaggccugggcgagaaccccgacgacgaggagggcgacgccaagaagaagaaggacggcaagaaggccgagcccaagaaccccagagagaacaagcugaagcagcccgaggacggcgccggcgaccagcccggcgccaacggcgccggcaaccagcccggcgccaacggcgccggcaaccagcccggcgccaacggcgccggcaaccagcccggcgccaacggcgccggcaaccagcccggcgccaacggcgccgacgaccagcccggcgccaacggcgccggcaaccagcccggcgccaacggcgccggcaaccagcccggcgccaacggcgccggcaaccagcccggcgccaacggcgccggcgaccagcccggcgccaacggcgccggcaaccagcccggcgccaacggcgccggcgaccagcccggcgccaacggcgccggcaaccagcccggcgccaacggcgccggcaaccagcccggcgccaacggcgccggcaaccagcccggcgccaacggcgccggcaaccagcccggcgccaacggcgccggcggccaggccgccggcggcaacgccgccaacaagaaggccggcgacgccggcgccggcggccaggccgccggcggcaacgccgccaacaagaaggccggcgacgccggcgccggccagggccagaacaacgagggcgccaacgcccccaacgagaagagcgugaaggaguaccuggacaaggugagagccaccgugggcaccgaguggacccccugcagcgugaccugcggcgugggcgugagagugagaagaagagugaacgccgccaacaagaagcccgaggaccugacccugaacgaccuggagaccgacgugugcaccauggacaagugcgccggcaucuucaacguggugagcaacagccugggccuggugauccugcuggugcuggcccuguucaacuga

SEQ ID NO: 4888 - RNA, 1134 nt, Artificial Sequence
  derived and/or modified CDS sequence (opt4) from Pv(Cam39)__AGN05267.1__CSP
augaagaacuucauccugcuggccgugagcagcauccugcugguggaccuguuccccacccacugcggccacaacguggaccugagcaaggccaucaaccugaacggcgugggcuucaacaacguggacgccagcagccugggcgccgcccacgugggccagagcgccagcagaggcagaggccugggcgagaaccccgacgacgaggagggcgacgccaagaagaagaaggacggcaagaaggccgagcccaagaaccccagagagaacaagcugaagcagcccgccggcgacagagccgacggccagcccgccggcgacagagccgacggccagcccgccggcgacagagccgacggccagcccgccggcgacagagccgccggccagcccgccggcgacagagccgacggccagcccgccggcgacagagccgccggccagcccgccggcgacagagccgacggccagcccgccggcgacagagccgccggccagcccgccggcgacagagccgacggccagcccgccggcgacagagccgccggccagcccgccggcgacagagccgccggccagcccgccggcgacagagccgccggccagcccgccggcgacagagccgacggccagcccgccggcgacagagccgccggccagcccgccggcgacagagccgacggccagcccgccggcgacagagccgccggccagcccgccggcgacagagccgccggccagcccgccggcgacagagccgccggccagcccgccggcaacggcgccggcggccaggccgccggcggcaacgccggcggcaacgccggcggcaacgccggcggccagggccagaacaacgagggcgccaacgcccccaacgagaagagcgugaaggaguaccuggacaaggugagagccaccgugggcaccgaguggacccccugcagcgugaccugcggcgugggcgugagagugagaagaagagugaacgccgccaacaagaagcccgaggaccugacccugaacgaccuggagaccgacgugugcaccauggacaagugcgccggcaucuucaacguggugagcaacagccugggccuggugauccugcuggugcuggcccuguucaacuga

SEQ ID NO: 4889 - RNA, 1134 nt, Artificial Sequence
  derived and/or modified CDS sequence (opt4) from Pv(Nr03)__ADB92541.1__CSP
augaagaacuucauccugcuggccgugagcagcauccugcugguggaccuguuccccacccacugcggccacaacguggaccugagcaaggccaucaaccugaacggcgugaacuucaacaacguggacgccagcagccugggcgccgcccacgugggccagagcgccagcagaggcagaggccugggcgagaaccccgacgacgaggagggcgacgccaagaagaagaaggacggcaagaaggccgagcccaagaaccccagagagaacaagcugaagcagcccggcgacagagccgacggccagcccgccggcgacagagccgacggccagcccgccggcgacagagccgacggccagcccgccggcgacagagccgacggccagcccgccggcgacagagccgacggccagcccgccggcgacagagccgacggccagcccgccggcgacagagccgacggccagcccgccggcgacagagccgacggccagcccgccggcgacagagccgacggccagcccgccggcgacagagccgacggccagcccgccggcgacagagccgacggccagcccgccggcgacagagccgacggccagcccgccggcgacagagccgacggccagcccgccggcgacagagccgacggccagcccgccggcgacagagccgacggccagcccgccggcgacagagccgacggccagcccgccggcgacagagccgccggccagcccgccggcgacagagccgccggccagcccgccggcgacagagccgccggccagcccgccggcaacggcgccggcggccaggccgccggcggcaacgccggcggccagggccagaacaacgagggcgccaacgcccccaacgagaagagcgugaaggaguaccuggacaaggugagagccaccgugggcaccgaguggacccccugcagcgugaccugcggcgugggcgugagagugagaagaagagugaacgccgccaacaagaagcccgaggaccugacccugaacgaccuggagaccgacgugugcaccauggacaagugcgccggcaucuucaacguggugagcaacagccugggccuggugauccugcuggugcuggcccuguucaacuga

SEQ ID NO: 4890 - RNA, 1134 nt, Artificial Sequence
  derived and/or modified CDS sequence (opt4) from Pv(Pt04.1)__ADB92554.1__CSP
augaagaacuucauccugcuggccgugagcagcauccugcugguggaccuguuccccacccacugcggccacaacguggaccugagcaaggccaucaaccugaacggcgugaacuucaacaacguggacgccagcagccugggcgccgcccacgugggccagagcgccagcagaggcagaggccugggcgagaaccccgacgacgaggagggcgacgccaagaagaagaaggacggcaagaaggccgagcccaagaaccccagagagaacaagcugaagcagcccggcgacagagccgacggccagcccgccggcgacagagccgacggccagcccgccggcgacagagccgacggccagcccgccggcgacagagccgccggccagcccgccggcgacagagccgccggccagcccgccggcgacagagccgacggccagcccgccggcgacagagccgacggccagcccgccggcgacagagccgacggccagcccgccggcgacagagccgacggccagcccgccggcgacagagccgccggccagcccgccggcgacagagccgccggccagcccgccggcgacagagccgacggccagcccgccggcgacagagccgccggccagcccgccggcgacagagccgacggccagcccgccggcgacagagccgccggccagcccgccggcgacagagccgacggccagcccgccggcgacagagccgccggccagcccgccggcgacagagccgccggccagcccgccggcgacagagccgccggccaggccgccggcgacagagccgccggccaggccgccggcggcaacgccggcggccagggccagaacaacgagggcgccaacgcccccaacgagaagagcgugaaggaguaccuggacaaggugagagccaccgugggcaccgaguggacccccugcagcgugaccugcggcgugggcgugagagugagaagaagagugaacgccgccaacaagaagcccgaggaccugacccugaacgaccuggagaccgacgugugcaccauggacaagugcgccggcaucuucaacguggugagcaacagccugggccuggugauccugcuggugcuggcccuguucaacuga

SEQ ID NO: 4891 - RNA, 1134 nt, Artificial Sequence; identical to SEQ ID NO: 4856
  derived and/or modified CDS sequence (opt4) from Pv(Sal1)__ADB92528.1__CSP

SEQ ID NO: 4892 - RNA, 1131 nt, Artificial Sequence
  derived and/or modified CDS sequence (opt4) from Pv(Cam27)__AGN05255.1__CSP
augaagaacuucauccugcuggccgugagcagcauccugcugguggaccuguuccccacccacugcggccacaacguggaccugagcaaggccaucaaccugaacggcgugggcuucaacaacguggacgccagcagccugggcgccgcccacgugggccagagcgccagcagaggcagaggccugggcgagaaccccgacgacgaggagggcgacgccaagaagaagaaggacggcaagaaggccgagcccaagaaccccagagagaacaagcugaagcagcccgccggcgccagagccgacggccagcccgccggcgacagagccgacggccagcccgccggcgacagagccgacggccagcccgccggcgacagagccgccggccagcccgccggcgacagagccgacggccagcccgccggcgacagagccgccggccagcccgccggcgacagagccgacggccagcccgccggcgacagagccgccggccagcccgccggcgacagagccgacggccagcccgccggcgacagagccgccggccagcccgccggcgacagagccgccggccagcccgccggcgacagagccgacggccagcccgccggcgacagagccgccggccagcccgccggcgacagagccgacggccagcccgccggcgacagagccgccggccagcccgccggcgacagagccgccggccagcccgccggcgacagagccgccggccagcccgccggcaacggcgccggcggccaggccgccggcggcaacgccggcggcaacgccggcggcaacgccggcggcaacgccggcggcaacgccggcggccagggccagaacaacgagggcgccaacgcccccaacgagaagagcgugaaggaguaccuggacaaggugagagccaccgugggcaccgaguggacccccugcagcgugaccugcggcgugggcgugagagugagaagaagagugaacgccgccaacaagaagcccgaggaccugacccugaacgaccuggagaccgacgugugcaccauggacaagugcgccggcaucuucaacguggugagcaacagccugggccuggugauccugcuggugcuggcccuguucaacuga

SEQ ID NO: 4893 - RNA, 1131 nt, Artificial Sequence
  derived and/or modified CDS sequence (opt4) from Pv(Cam46)__AGN05273.2__CSP
augaagaacuucauccugcuggccgugagcagcauccugcugguggaccuguuccccacccacugcggccacaacguggaccugagcaaggccaucaaccugaacggcgugaacuucaacaacguggacgccagcagccugggcgccgcccacgugggccagagcgccagcagaggcagaggccugggcgagaaccccgacgacgaggagggcgacgccaagaagaagaaggacggcaagaaggccgagcccaagaaccccagagagaacaagcugaagcagcccgccggcgacagagccgacggccagcccgccggcgacagagccgacggccagcccgccggcgacagagccgacggccagcccgccggcgacagagccgccggccagcccgccggcgacagagccgacggccagcccgccggcgacagagccgccggccagcccgccggcgacagagccgacggccagcccgccggcgacagagccgccggccagcccgccggcgacagagccgacggccagcccgccggcgacagagccgccggccagcccgccggcgacagagccgccggccagcccgccggcgacagagccgacggccagcccgccggcgacagagccgccggccagcccgccggcgacagagccgacggccagcccgccggcgacagagccgccggccagcccgccggcgacagagccgccggccagcccgccggcgacagagccgccggccagcccgccggcaacggcgccggcggccaggccgccggcggcaacgccggcggcaacgccggcggcaacgccggcggcaacgccggcggcaacgccggcggccagggccagaacaacgagggcgccaacgcccccaacgagaagagcgugaaggaguaccuggacaaggugagagccaccgugggcaccgaguggacccccugcagcgugaccugcggcgugggcgugagagugagaagaagagugaacgccgccaacaagaagcccgaggaccugacccugaacgaccuggagaccgacgugugcaccauggacaagugcgccggcaucuucaacguggugagcaacagccugggccuggugauccugcuggugcuggcccuguucaacuga

SEQ ID NO: 4894 - RNA, 1128 nt, Artificial Sequence
  derived and/or modified CDS sequence (opt4) from Pv(CSP10VK210)__ANS71590.1__CSP
augaagaacuucauccugcuggccgugagcagcauccugcugguggaccuguuccccacccacugcggccacaacguggaccugagcaaggccaucaaccugaacggcgugaacuucaacaacguggacgccagcagccugggcgccgcccacgugggccagagcgccagcagaggcagaggccugggcgagaaccccgacgacgaggagggcgacgccaagaagaagaaggacggcaagaaggccgagcccaagaaccccagagagaacaagcugaagcagcccggcgacagagccgacggccagcccgccggcgacagagccgacggccagcccgccggcgacagagccgacggccagcccgccggcgacagagccgacggccagcccgccggcgacagagccgccggccagcccgccggcgacagagccgccggccagcccgccggcgacagagccgacggccagcccgccggcgacagagccgccggccagcccgccggcgacagagccgacggccagcccgccggcgacagagccgccggccagcccgccggcgacagagccgccggccagcccgccggcgacagagccgccggccagcccgccggcgacagagccgacggccagcccgccggcgacagagccgccggccagcccgccggcgacagagccgccggccagcccgccggcgacagagccgccggccagcccgccggcgacagagccgccggccagcccgccggcaacggcgccggcggccaggccgccggcggcaacgccgccaacaagaaggccgaggacgccggcggcaacgccggcggcaacgccggcggccagggccagaacaacgagggcgccaacgcccccaacgagaagagcgugaaggaguaccuggacaaggugagagccaccgugggcaccgaguggacccccugcagcgugaccugcggcgugggcgugagagugagaagaagagugaacgccgccaacaagaagcccgaggaccugacccugaacgaccuggagaccgacgugugcaccauggacaagugcgccggcaucuucaacguggugagcaacagccugggccuggugauccugcuggugcuggcccuguucaacuga

SEQ ID NO: 4895 - RNA, 1122 nt, Artificial Sequence
  derived and/or modified CDS sequence (opt4) from Pv(Cam19)__AGN05249.1__CSP
augaagaacuucauccugcuggccgugagcagcauccugcugguggaccuguuccccacccacugcggccacaacguggaccugagcaaggccaucaaccugaacggcgugggcuucaacaacguggacgccagcagccugggcgccgcccacgugggccagagcgccagcagaggcagaggccugggcgagaaccccgacgacgaggagggcgacgccaagaagaagaaggacggcaagaaggccgagcccaagaaccccagagagaacaagcugaagcagcccgccggcgacagagccgacggccagcccgccggcgacagagccgacggccagcccgccggcgacagagccgacggccagcccgccggcgacagagccgacggccagcccgccggcgacagagccgacggccagcccgccggcgacagagccgccggccagcccgccggcgacagagccgacggccagcccgccggcgacagagccgccggccagcccgccggcgacagagccgacggccagcccgccggcgacagagccgacggccagcccgccggcgacagagccgccggccagcccgccggcgacagagccgacggccagcccgccggcgacagagccgccggccagcccgccggcgacagagccgacggccagcccgccggcgacagagccgccggccagcccgccggcgacagagccgccggccagcccgccggcgacagagccgccggccagcccgccggcaacggcgccggcggccaggccgccggcggcaacgccggcggcaacgccggcggcaacgccggcggcaacgccggcgccggccagggccagaacaacgagggcgccaacgcccccaacgagaagagcgugaaggaguaccuggacaaggugagagccaccgugggcaccgaguggacccccugcagcgugaccugcggcgugggcgugagagugagaagaagagugaacgccgccaacaagaagcccgaggaccugacccugaacgaccuggagaccgacgugugcaccauggacaagugcgccggcaucuucaacguggugagcaacagccugggccuggugauccugcuggugcuggcccuguucaacuga

SEQ ID NO: 4896 - RNA, 1119 nt, Artificial Sequence
  derived and/or modified CDS sequence (opt4) from Pv(Cam10)__AGN05241.2__CSP
augaagaacuucauccugcuggccgugagcagcauccugcugguggaccuguuccccacccacugcggccacaacguggaccugagcaaggccaucaaccugaacggcgugggcuucaacaacguggacgccagcagccugggcgccgcccacgugggccagagcgccagcagaggcagaggccugggcgagaaccccgacgacgaggagggcgacgccaagaagaagaaggacggcaagaaggccgagcccaagaaccccagagagaacaagcugaagcagcccgccggcgacagagccgacggccagcccgccggcgacagagccgacggccagcccgccggcgacagagccgacggccagcccgccggcgacagagccgccggccagcccgccggcgacagagccgacggccagcccgccggcgacagagccgccggccagcccgccggcgacagagccgacggccagcccgccggcgacagagccgccggccagcccgccggcgacagagccgacggccagcccgccggcgacagagccgccggccagcccgccggcgacagagccgccggccagcccgccggcgacagagccgacggccagcccgccggcgacagagccgccggccagcccgccggcgacagagccgacggccagcccgccggcgacagagccgccggccagcccgccggcgacagagccgccggccagcccgccggcgacagagccgccggccagcccgccggcaacggcgccggcggccaggccgccggcggcaacgccggcggcaacgccggcggcaacgccggcggcaacgccggcggccagggccagaacaacgagggcgccaacgcccccaacgagaagagcgugaaggaguaccuggacaaggugagagccaccgugggcaccgaguggacccccugcagcgugaccugcggcgugggcgugagagugagaagaagagugaacgccgccaacaagaagcccgaggaccugacccugaacgaccuggagaccgacgugugcaccauggacaagugcgccggcaucuucaacguggugagcaacagccugggccuggugauccugcuggugcuggcccuguucaacuga

SEQ ID NO: 4897 - RNA, 1119 nt, Artificial Sequence
  derived and/or modified CDS sequence (opt4) from Pv(Cam3)__AGN05234.2__CSP
augaagaacuucauccugcuggccgugagcagcauccugcugguggaccuguuccccacccacugcggccacaacguggaccugagcaaggccaucaaccugaacggcgugaacuucaacaacguggacgccagcagccugggcgccgcccacgugggccagagcgccagcagaggcagaggccugggcgagaaccccgacgacgaggagggcgacgccaagaagaagaaggacggcaagaaggccgagcccaagaaccccagagagaacaagcugaagcagcccgccggcgacagagccgacggccagcccgccggcgacagagccgacggccagcccgccggcgacagagccgacggccagcccgccggcgacagagccgccggccagcccgccggcgacagagccgacggccagcccgccggcgacagagccgccggccagcccgccggcgacagagccgacggccagcccgccggcgacagagccgccggccagcccgccggcgacagagccgacggccagcccgccggcgacagagccgccggccagcccgccggcgacagagccgccggccagcccgccggcgacagagccgacggccagcccgccggcgacagagccgccggccagcccgccggcgacagagccgacggccagcccgccggcgacagagccgccggccagcccgccggcgacagagccgccggccagcccgccggcgacagagccgccggccagcccgccggcaacggcgccggcggccaggccgccggcggcaacgccggcggcaacgccggcggcaacgccggcggcaacgccggcggccagggccagaacaacgagggcgccaacgcccccaacgagaagagcgugaaggaguaccuggacaaggugagagccaccgugggcaccgaguggacccccugcagcgugaccugcggcgugggcgugagagugagaagaagagugaacgccgccaacaagaagcccgaggaccugacccugaacgaccuggagaccgacgugugcaccauggacaagugcgccggcaucuucaacguggugagcaacagccugggccuggugauccugcuggugcuggcccuguucaacuga

SEQ ID NO: 4898 - RNA, 1119 nt, Artificial Sequence
  derived and/or modified CDS sequence (opt4) from Pv(Cam30)__AGN05258.1__CSP
augaagaacuucauccugcuggccgugagcagcauccugcugguggaccuguuccccacccacugcggccacaacguggaccugagcaaggccaucaaccugaacggcgugaacuucaacaacguggacgccagcagccugggcgccgcccacgugggccagagcgccagcagaggcagaggccugggcgagaaccccgacgacgaggagggcgacgccaagaagaagaaggacggcaagaaggccgagcccaagaaccccagagagaacaagcugaagcagcccgccggcgacggcgccgccgugcagcccgccggcgacggcgccgccgugcagcccgccggcgacggcgccgacggccagcccgccggcgacggcgccgccggccagcccgccggcgacagagccgacggccagcccgccggcgacagagccgccggccagcccgccggcgacagagccgacggccagcccgccggcgacagagccgccggccagcccgccggcgacagagccgacggccagcccgccggcgacagagccgccggccagcccgccggcgacagagccgccggccagcccgccggcgacagagccgacggccagcccgccggcgacagagccgccggccagcccgccggcgacagagccgacggccagcccgccggcgacagagccgccggccagcccgccggcgacagagccgccggccagcccgccggcgacagagccgccggccagcccgccggcaacggcgccggcggccaggccgccggcggcaacgccggcggcaacgccggcggcaacgccggcggcaacgccggcggccagggccagaacaacgagggcgccaacgcccccaacgagaagagcgugaaggaguaccuggacaaggugagagccaccgugggcaccgaguggacccccugcagcgugaccugcggcgugggcgugagagugagaagaagagugaacgccgccaacaagaagcccgaggaccugacccugaacgaccuggagaccgacgugugcaccauggacaagugcgccggcaucuucaacguggugagcaacagccugggccuggugauccugcuggugcuggcccuguucaacuga

SEQ ID NO: 4899 - RNA, 1119 nt, Artificial Sequence
  derived and/or modified CDS sequence (opt4) from Pv(Cam43)__AGN05271.1__CSP
augaagaacuucauccugcuggccgugagcagcauccugcugguggaccuguuccccacccacugcggccacaacguggaccugagcaaggccaucaaccugaacggcgugggcuucaacaacguggacgccagcagccugggcgccgcccacgugggccagagcgccagcagaggcagaggccugggcgagaaccccgacgacgaggagggcgacgccaagaagaagaaggacggcaagaaggccgagcccaagaaccccagagagaacaagcugaagcagcccgccggcgacagagccgacggccagcccgccggcgacagagccgacggccagcccgccggcgacagagccgacggccagcccgccggcgacagagccgacggccagcccgccggcgacagagccgacggccagcccgccggcgacagagccgccggccagcccgccggcgacagagccgacggccagcccgccggcgacagagccgccggccagcccgccggcgacagagccgacggccagcccgccggcgacagagccgacggccagcccgccggcgacagagccgccggccagcccgccggcgacagagccgacggccagcccgccggcgacagagccgccggccagcccgccggcgacagagccgacggccagcccgccggcgacagagccgccggccagcccgccggcgacagagccgccggccagcccgccggcaacggcgccggcggccaggccgccggcggcaacgccggcggcaacgccggcggcaacgccggcggcaacgccggcggcaacgccggcggcaacgccggcgccggccagggccagaacaacgagggcgccaacgcccccaacgagaagagcgugaaggaguaccuggacaaggugagagccaccgugggcaccgaguggacccccugcagcgugaccugcggcgugggcgugagagugagaagaagagugaacgccgccaacaagaagcccgaggaccugacccugaacgaccuggagaccgacgugugcaccauggacaagugcgccggcaucuucaacguggugagcaacagccugggccuggugauccugcuggugcuggcccuguucaacuga

SEQ ID NO: 4900 - RNA, 1116 nt, Artificial Sequence
  derived and/or modified CDS sequence (opt4) from Pv(Cam40)__AGN05268.1__CSP
augaagaacuucauccugcuggccgugagcagcauccugcugguggaccuguuccccacccacugcggccacaacguggaccugagcaaggccaucaaccugaacggcgugggcuucaacaacguggacgccagcagccugggcgccgcccacgugggccagagcgccagcagaggcagaggccugggcgagaaccccgacgacgaggagggcgacgccaagaagaagaaggacggcaagaagaccgagcccaagaaccccagagagaacaagcugaagcagcccggcgacagagccgacggccagcccgccggcgacagagccgacggccagcccgccggcgacagagccgccggccagcccgccggcgacagagccgacggccagcccgccggcgacagagccgacggccagcccgccggcgacagagccgccggccagcccgccggcgacagagccgacggccagcccgccggcgacagagccgccggccagcccgccggcgacagagccgacggccagcccgccggcgacagagccgccggccagcccgccggcgacagagccgccggccagcccgccggcgacagagccgacggccagcccgccggcgacagagccgccggccagcccgccggcgacagagccgacggccagcccgccggcgacagagccgccggccagcccgccggcgacagagccgccggccagcccgccggcgacagagccgccggccagcccgccggcaacggcgccggcggccaggccgccggcggcaacgccggcggcaacgccggcggcaacgccggcggcaacgccggcggccagggccagaacaacgagggcgccaacgcccccaacgagaagagcgugaaggaguaccuggacaaggugagagccaccgugggcaccgaguggacccccugcagcgugaccugcggcgugggcgugagagugagaagaagagugaacgccgccaacaagaagcccgaggaccugacccugaacgaccuggagaccgacgugugcaccauggacaagugcgccggcaucuucaacguggugagcaacagccugggccuggugauccugcuggugcuggcccuguucaacuga

SEQ ID NO: 4901 - RNA, 1116 nt, Artificial Sequence
  derived and/or modified CDS sequence (opt4) from Pv(CSP14VK210)__ANS71594.1__CSP
augaagaacuucauccugcuggccgugagcagcauccugcugguggaccuguuccccacccacugcggccacaacguggaccugagcaaggccaucaaccugaacggcgugaacuucaacaacguggacgccagcagccugggcgccgcccacgugggccagagcgccagcagaggcagaggccugggcgagaaccccgacgacgaggagggcgacgccaagaagaagaaggacggcaagaaggccgagcccaagaaccccagagagaacaagcugaagcagcccggcgacagagccgacggccagcccgccggcgacagagccgacggccagcccgccggcgacagagccgccggccagcccgccggcgacagagccgacggccagcccgccggcgacagagccgccggccagcccgccggcgacagagccgacggccagcccgccggcgacagagccgccggccagcccgccggcgacagagccgacggccagcccgccggcgacagagccgccggccagcccgccggcgacagagccgacggccagcccgccggcgacagagccgccggccagcccgccggcgacagagccgccggccagcccgccggcgacagagccgacggccagcccgccggcgacagagccgacggccagcccgccggcgacagagccgccggccagcccgccggcgacagagccgccggccagcccgccggcgacagagccgccggccagcccgccggcaacggcgccggcggccaggccgccggcggcaacgccgccaacaagaaggccgaggacgccggcggcaacgccggcggccagggccagaacaacgagggcgccaacgcccccaacgagaagagcgugaaggaguaccuggacaaggugagagccaccgugggcaccgaguggacccccugcagcgugaccugcggcgugggcgugagagugagaagaagagugaacgccgccaacaagaagcccgaggaccugacccugaacgacaucgagaccgacgugugcaccauggacaagugcgccggcaucuucaacguggugagcaacagccugggccuggugauccugcuggugcuggcccuguucaacuga

SEQ ID NO: 4902 - RNA, 1116 nt, Artificial Sequence
  derived and/or modified CDS sequence (opt4) from Pv(CSP22VK210)__ANS71602.1__CSP
augaagaacuucauccugcuggccgugagcagcauccugcugguggaccuguuccccacccacugcggccacaacguggaccugagcaaggccaucaaccugaacggcgugaacuucaacaacguggacgccagcagccugggcgccgcccacgugggccagagcgccagcagaggcagaggccugggcgagaaccccgacgacgaggagggcgacgccaagaagaagaaggacggcaagaaggccgagcccaagaaccccagagagaacaagcugaagcagcccggcgacagagccgacggccagcccgccggcgacagagccgacggccagcccgccggcgacagagccgacggccagcccgccggcgacagagccgccggccagcccgccggcgacagagccgacggccagcccgccggcgacagagccgccggccagcccgccggcgacagagccgacggccagcccgccggcgacagagccgccggccagcccgccggcgacagagccgccggccagcccgccggcgacagagccgacggccagcccgccggcgacagagccgccggccagcccgccggcgacagagccgccggccagcccgccggcgacagagccgacggccagcccgccggcgacagagccgccggccagcccgccggcgacagagccgccggccagcccgccggcgacagagccgccggccagcccgccggcgacagagccgccggccagcccgccggcaacggcgccggcggccaggccgccggcggcaacgccgccaacaagaaggccgaggacgccggcggcaacgccggcggccagggccagaacaacgagggcgccaacgcccccaacgagaagagcgugaaggaguaccuggacaaggugagagccaccgugggcaccgaguggacccccugcagcgugaccugcggcgugggcgugagagugagaagaagagugaacgccgccaacaagaagcccgaggaccugacccugaacgacaucgagaccgacgugugcaccauggacaagugcgccggcaucuucaacguggugagcaacagccugggccuggugauccugcuggugcuggcccuguucaacuga

SEQ ID NO: 4903 - RNA, 1116 nt, Artificial Sequence
  derived and/or modified CDS sequence (opt4) from Pv(CSP28VK210)__ANS71608.1__CSP
augaagaacuucauccugcuggccgugagcagcauccugcugguggaccuguuccccacccacugcggccacaacguggaccugagcaaggccaucaaccugaacggcgugaacuucaacaacguggacgccagcagccugggcgccgcccacgugggccagagcgccagcagaggcagaggccugggcgagaaccccgacgacgaggagggcgacgccaagaagaagaaggacggcaagaaggccgagcccaagaaccccagagagaacaagcugaagcagcccggcgacagagccgacggccagcccgccggcgacagagccgacggccagcccgccggcgacagagccgacggccagcccgccggcgacagagccgccggccagcccgccggcgacagagccgacggccagcccgccggcgacagagccgccggccagcccgccggcgacagagccgacggccagcccgccggcgacagagccgccggccagcccgccggcgacagagccgacggccagcccgccggcgacagagccgccggccagcccgccggcgacagagccgacggccagcccgccggcgacagagccgccggccagcccgccggcgacagagccgccggccagcccgccggcgacagagccgacggccagcccgccggcgacagagccgccggccagcccgccggcgacagagccgccggccagcccgccggcgacagagccgccggccagcccgccggcaacggcgccggcggccaggccgccggcggcaacgccgccaacaagaaggccgaggacgccggcggcaacgccggcggccagggccagaacaacgagggcgccaacgcccccaacgagaagagcgugaaggaguaccuggacaaggugagagccaccgugggcaccgaguggacccccugcagcgugaccugcggcgugggcgugagagugagaagaagagugaacgccgccaacaagaagcccgaggaccugacccugaacgacaucgagaccgacgugugcaccauggacaagugcgccggcaucuucaacguggugagcaacagccugggccuggugauccugcuggugcuggcccuguucaacuga

SEQ ID NO: 4904 - RNA, 1116 nt, Artificial Sequence
  derived and/or modified CDS sequence (opt4) from Pv(CSP31VK210)__ANS71611.1__CSP
augaagaacuucauccugcuggccgugagcagcauccugcugguggaccuguuccccacccacugcggccacaacguggaccugagcaaggccaucaaccugaacggcgugaacuucaacaacguggacgccagcagccugggcgccgcccacgugggccagagcgccagcagaggcagaggccugggcgagaaccccgacgacgaggagggcgacgccaagaagaagaaggacggcaagaaggccgagcccaagaaccccagagagaacaagcugaagcagcccggcgacagagccgacggccagcccgccggcgacagagccgacggccagcccgccggcgacagagccgccggccagcccgccggcgacagagccgacggccagcccgccggcgacagagccgccggccagcccgccggcgacagagccgacggccagcccgccggcgacagagccgccggccagcccgccggcgacagagccgacggccagcccgccggcgacagagccgacggccagcccgccggcgacagagccgccggccagcccgccggcgacagagccgccggccagcccgccggcgacagagccgccggccagcccgccggcgacagagccgacggccagcccgccggcgacagagccgccggccagcccgccggcgacagagccgccggccagcccgccggcgacagagccgccggccagcccgccggcgacagagccgccggccagcccgccggcaacggcgccggcggccaggccgccggcggcaacgccgccaacaagaaggccgaggacgccggcggcaacgccggcggccagggccagaacaacgagggcgccaacgcccccaacgagaagagcgugaaggaguaccuggacaaggugagagccaccgugggcaccgaguggacccccugcagcgugaccugcggcgugggcgugagagugagaagaagagugaacgccgccaacaagaagcccgaggaccugacccugaacgacaucgagaccgacgugugcaccauggacaagugcgccggcaucuucaacguggugagcaacagccugggccuggugauccugcuggugcuggcccuguucaacuga

SEQ ID NO: 4905 - RNA, 1116 nt, Artificial Sequence
  derived and/or modified CDS sequence (opt4) from Pv(CSP37VK210)__ANS71617.1__CSP
augaagaacuucauccugcuggccgugagcagcauccugcugguggaccuguuccccacccacugcggccacaacguggaccugagcaaggccaucaaccugaacggcgugaacuucaacaacguggacgccagcagccugggcgccgcccacgugggccagagcgccagcagaggcagaggccugggcgagaaccccgacgacgaggagggcgacgccaagaagaagaaggacggcaagaaggccgagcccaagaaccccagagagaacaagcugaagcagcccggcgacagagccgacggccagcccgccggcgacagagccgacggccagcccgccggcgacagagccgacggccagcccgccggcgacagagccgccggccagcccgccggcgacagagccgccggccagcccgccggcgacagagccgccggccagcccgccggcgacagagccgacggccagcccgccggcgacagagccgccggccagcccgccggcgacagagccgacggccagcccgccggcgacagagccgccggccagcccgccggcgacagagccgacggccagcccgccggcgacagagccgccggccagcccgccggcgacagagccgccggccagcccgccggcgacagagccgacggccagcccgccggcgacagagccgccggccagcccgccggcgacagagccgccggccagcccgccggcgacagagccgccggccagcccgccggcaacggcgccggcggccaggccgccggcggcaacgccgccaacaagaaggccgaggacgccggcggcaacgccggcggccagggccagaacaacgagggcgccaacgcccccaacgagaagagcgugaaggaguaccuggacaaggugagagccaccgugggcaccgaguggacccccugcagcgugaccugcggcgugggcgugagagugagaagaagagugaacgccgccaacaagaagcccgaggaccugacccugaacgacaucgagaccgacgugugcaccauggacaagugcgccggcaucuucaacguggugagcaacagccugggccuggugauccugcuggugcuggcccuguucaacuga

SEQ ID NO: 4906 - RNA, 1116 nt, Artificial Sequence
  derived and/or modified CDS sequence (opt4) from Pv(CSP50VK210)__ANS71630.1__CSP
augaagaacuucauccugcuggccgugagcagcauccugcugguggaccuguuccccacccacugcggccacaacguggaccugagcaaggccaucaaccugaacggcgugaacuucaacaacguggacgccagcagccugggcgccgcccacgugggccagagcgccagcagaggcagaggccugggcgagaaccccgacgacgaggagggcgacgccaagaagaagaaggacggcaagaaggccgagcccaagaaccccagagagaacaagcugaagcagcccggcgacagagccgacggccagcccgccggcgacagagccgacggccagcccgccggcgacagagccgccggccagcccgccggcgacagagccgacggccagcccgccggcgacagagccgccggccagcccgccggcgacagagccgacggccagcccgccggcgacagagccgccggccagcccgccggcgacagagccgacggccagcccgccggcgacagagccgccggccagcccgccggcgacagagccgacggccagcccgccggcgacagagccgccggccagcccgccggcgacagagccgccggccagcccgccggcgacagagccgacggccagcccgccggcgacagagccgccggccagcccgccggcgacagagccgccggccagcccgccggcgacagagccgccggccagcccgccggcgacagagccgccggccagcccgccggcaacggcgccggcggccaggccgccggcggcaacgccgccaacaagaaggccgaggacgccggcggcaacgccggcggccagggccagaacaacgagggcgccaacgcccccaacgagaagagcgugaaggaguaccuggacaaggugagagccaccgugggcaccgaguggacccccugcagcgugaccugcggcgugggcgugagagugagaagaagagugaacgccgccaacaagaagcccgaggaccugacccugaacgacaucgagaccgacgugugcaccauggacaagugcgccggcaucuucaacguggugagcaacagccugggccuggugauccugcuggugcuggcccuguucaacuga

SEQ ID NO: 4907 - RNA, 1107 nt, Artificial Sequence
  derived and/or modified CDS sequence (opt4) from Pv(Cam16)__AGN05247.1__CSP
augaagaacuucauccugcuggccgugagcagcauccugcugguggaccuguuccccacccacugcggccacaacguggaccugagcaaggccaucaaccugaacggcgugaacuucaacaacguggacgccagcagccugggcgccgcccacgugggccagagcgccagcagaggcagaggccugggcgagaaccccgacgacgaggagggcgacgccaagaagaagaaggacggcaagaaggccgagcccaagaaccccagagagaacaagcugaagcagcccgccggcgacagagccgacggccagcccgccggcgacagagccgacggccagcccgccggcgacagagccgccggccagcccgccggcgacagagccgacggccagcccgccggcgacagagccgacggccagcccgccggcgacagagccgccggccagcccgccggcgacagagccgacggccagcccgccggcgacagagccgccggccagcccgccggcgacagagccgacggccagcccgccggcgacagagccgacggccagcccgccggcgacagagccgccggccagcccgccggcgacagagccgacggccagcccgccggcgacagagccgccggccagcccgccggcgacagagccgacggccagcccgccggcgacagagccgccggccagcccgccggcgacagagccgccggccagcccgccggcgacagagccgccggccagcccgccggcaacggcgccggcggccaggccgccggcggcaacgccggcggcaacgccggcggcaacgccggcggccagggccagaacaacgagggcgccaacgcccccaacgagaagagcgugaaggaguaccuggacaaggugagagccaccgugggcaccgaguggacccccugcagcgugaccugcggcgugggcgugagagugagaagaagagugaacgccgccaacaagaagcccgaggaccugacccugaacgaccuggagaccgacgugugcaccauggacaagugcgccggcaucuucaacguggugagcaacagccugggccuggugauccugcuggugcuggcccuguucaacuga

SEQ ID NO: 4908 - RNA, 1107 nt, Artificial Sequence
  derived and/or modified CDS sequence (opt4) from Pv(Cam32)__AGN05260.1__CSP
augaagaacuucauccugcuggccgugagcagcauccugcugguggaccuguuccccacccacugcggccacaacguggaccugagcaaggccaucaaccugaacggcgugggcuucaacaacguggacgccagcagccugggcgccgcccacgugggccagagcgccagcagaggcagaggccugggcgagaaccccgacgacgaggagggcgacgccaagaagaagaaggacggcaagaaggccgagcccaagaaccccagagagaacaagcugaagcagcccgccggcgacagagccgacggccagcccgccggcgacagagccgacggccagcccgccggcgacagagccgacggccagcccgccggcgacagagccgccggccagcccgccggcgacagagccgacggccagcccgccggcgacagagccgccggccagcccgccggcgacagagccgacggccagcccgccggcgacagagccgccggccagcccgccggcgacagagccgacggccagcccgccggcgacagagccgccggccagcccgccggcgacagagccgccggccagcccgccggcgacagagccgacggccagcccgccggcgacagagccgccggccagcccgccggcgacagagccgacggccagcccgccggcgacagagccgccggccagcccgccggcgacagagccgccggccagcccgccggcgacagagccgccggccagcccgccggcaacggcgccggcggccaggccgccggcggcaacgccggcggcaacgccggcggcaacgccggcggccagggccagaacaacgagggcgccaacgcccccaacgagaagagcgugaaggaguaccuggacaaggugagagccaccgugggcaccgaguggacccccugcagcgugaccugcggcgugggcgugagagugagaagaagagugaacgccgccaacaagaagcccgaggaccugacccugaacgaccuggagaccgacgugugcaccauggacaagugcgccggcaucuucaacguggugagcaacagccugggccuggugauccugcuggugcuggcccuguucaacuga

SEQ ID NO: 4909 - RNA, 1107 nt, Artificial Sequence
  derived and/or modified CDS sequence (opt4) from Pv(Cam38)__AGN05266.1__CSP
augaagaacuucauccugcuggccgugagcagcauccugcugguggaccuguuccccacccacugcggccacaacguggaccugagcaaggccaucaaccugaacggcgugaacuucaacaacguggacgccagcagccugggcgccgcccacgugggccagagcgccagcagaggcagaggccugggcgagaaccccgacgacgaggagggcgacgccaagaagaagaaggacggcaagaaggccgagcccaagaaccccagagagaacaagcugaagcagcccggcgacagagccgacggccagcccgccggcgacagagccgacggccagcccgccggcgacagagccgccggccagcccgccggcgacagagccgacggccagcccgccggcgacagagccgccggccagcccgccggcgacagagccgacggccagcccgccggcgacagagccgccggccagcccgccggcgacagagccgacggccagcccgccggcgacagagccgccggccagcccgccggcgacagagccgacggccagcccgccggcgacagagccgccggccagcccgccggcgacagagccgacggccagcccgccggcgacagagccgccggccagcccgccggcgacagagccgccggccagcccgccggcgacagagccgacggccagcccgccggcgacagagccgccggccagcccgccggcgacagagccgccggccagcccgccggcgacagagccgccggccagcccgccggcaacggcgccggcggccaggccgccggcggcaacgccggcggccagggccagaacaacgagggcgccaacgcccccaacgagaagagcgugaaggaguaccuggacaaggugagagccaccgugggcaccgaguggacccccugcagcgugaccugcggcgugggcgugagagugagaagaagagugaacgccgccaacaagaagcccgaggaccugacccugaacgaccuggagaccgacgugugcaccauggacaagugcgccggcaucuucaacguggugagcaacagccugggccuggugauccugcuggugcuggcccuguucaacuga

SEQ ID NO: 4910 - RNA, 1104 nt, Artificial Sequence
  derived and/or modified CDS sequence (opt4) from Pv(CSP19VK210)__ANS71599.1__CSP
augaagaacuucauccugcuggccgugagcagcauccugcugguggaccuguuccccacccacugcggccacaacguggaccugagcaaggccaucaaccugaacggcgugaacuucaacaacguggacgccagcagccugggcgccgcccacgugggccagagcgccagcagaggcagaggccugggcgagaaccccgacgacgaggagggcgacgccaagaagaagaaggacggcaagaaggccgagcccaagaaccccagagagaacaagcugaagcagcccggcgacagagccgacggccagcccgccggcgacagagccgacggccagcccgccggcgacagagccgacggccagcccgccggcgacagagccgccggccagcccgccggcgacagagccgacggccagcccgccggcgacagagccgccggccagcccgccggcgacagagccgacggccagcccgccggcgacagagccgccggccagcccgccggcgacagagccgacggccagcccgccggcgacagagccgccggccagcccgccggcgacagagccgacggccagcccgccggcgacagagccgccggccagcccgccggcgacagagccgccggccagcccgccggcgacagagccgacggccagcccgccggcgacagagccgccggccagcccgccggcgacagagccgccggccagcccgccggcgacagagccgccggccagcccgccggcaacggcgccggcggccaggccgccggcggcaacgccgccaacaagaaggccgaggacgccggcggccagggccagaacaacgagggcgccaacgcccccaacgagaagagcgugaaggaguaccuggacaaggugagagccaccgugggcaccgaguggacccccugcagcgugaccugcggcgugggcgugagagugagaagaagagugaacgccgccaacaagaagcccgaggaccugacccugaacgacaucgagaccgacgugugcaccauggacaagugcgccggcaucuucaacguggugagcaacagccugggccuggugauccugcuggugcuggcccuguucaacuga

SEQ ID NO: 4911 - RNA, 1089 nt, Artificial Sequence
  derived and/or modified CDS sequence (opt4) from Pv(CSP24VK210)__ANS71604.1__CSP
augaagaacuucauccugcuggccgugagcagcauccugcugguggaccuguuccccacccacugcggccacaacguggaccugagcaaggccaucaaccugaacggcgugaacuucaacaacguggacgccagcagccugggcgccgcccacgugggccagagcgccagcagaggcagaggccugggcgagaaccccgacgacgaggagggcgacgccaagaagaagaaggacggcaagaaggccgagcccaagaaccccagagagaacaagcugaagcagcccggcgacagagccgacggccagcccgccggcgacagagccgacggccagcccgccggcgacagagccgacggccagcccgccggcgacagagccgccggccagcccgccggcgacagagccgacggccagcccgccggcgacagagccgccggccagcccgccggcgacagagccgacggccagcccgccggcgacagagccgccggccagcccgccggcgacagagccgacggccagcccgccggcgacagagccgccggccagcccgccggcgacagagccgacggccagcccgccggcgacagagccgccggccagcccgccggcgacagagccgccggccagcccgccggcgacagagccgacggccagcccgccggcgacagagccgccggccagcccgccggcgacagagccgccggccagcccgccggcaacggcgccggcggccaggccgccggcggcaacgccgccaacaagaaggccgaggacgccggcggcaacgccggcggccagggccagaacaacgagggcgccaacgcccccaacgagaagagcgugaaggaguaccuggacaaggugagagccaccgugggcaccgaguggacccccugcagcgugaccugcggcgugggcgugagagugagaagaagagugaacgccgccaacaagaagcccgaggaccugacccugaacgacaucgagaccgacgugugcaccauggacaagugcgccggcaucuucaacguggugagcaacagccugggccuggugauccugcuggugcuggcccuguucaacuga

SEQ ID NO: 4912 - RNA, 1089 nt, Artificial Sequence
  derived and/or modified CDS sequence (opt4) from Pv(CSP35VK210)__ANS71615.1__CSP
augaagaacuucauccugcuggccgugagcagcauccugcugguggaccuguuccccacccacugcggccacaacguggaccugagcaaggccaucaaccugaacggcgugaacuucaacaacguggacgccagcagccugggcgccgcccacgugggccagagcgccagcagaggcagaggccugggcgagaaccccgacgacgaggagggcgacgccaagaagaagaaggacggcaagaaggccgagcccaagaaccccagagagaacaagcugaagcagcccggcgacagagccgacggccagcccgccggcgacagagccgacggccagcccgccggcgacagagccgccggccagcccgccggcgacagagccgacggccagcccgccggcgacagagccgccggccagcccgccggcgacagagccgacggccagcccgccggcgacagagccgccggccagcccgccggcgacagagccgacggccagcccgccggcgacagagccgccggccagcccgccggcgacagagccgacggccagcccgccggcgacagagccgccggccagcccgccggcgacagagccgccggccagcccgccggcgacagagccgacggccagcccgccggcgacagagccgccggccagcccgccggcgacagagccgccggccagcccgccggcgacagagccgccggccagcccgccggcaacggcgccggcggccaggccgccggcggcaacgccgccaacaagaaggccgaggacgccggcggcaacgccggcggccagggccagaacaacgagggcgccaacgcccccaacgagaagagcgugaaggaguaccuggacaaggugagagccaccgugggcaccgaguggacccccugcagcgugaccugcggcgugggcgugagagugagaagaagagugaacgccgccaacaagaagcccgaggaccugacccugaacgacaucgagaccgacgugugcaccauggacaagugcgccggcaucuucaacguggugagcaacagccugggccuggugauccugcuggugcuggcccuguucaacuga

SEQ ID NO: 4913 - RNA, 1062 nt, Artificial Sequence
  derived and/or modified CDS sequence (opt4) from Pv(CSP9VK210)__ANS71589.1__CSP
augaagaacuucauccugcuggccgugagcagcauccugcugguggaccuguuccccacccacugcggccacaacguggaccugagcaaggccaucaaccugaacggcgugaacuucaacaacguggacgccagcagccugggcgccgcccacgugggccagagcgccagcagaggcagaggccugggcgagaaccccgacgacgaggagggcgacgccaagaagaagaaggacggcaagaaggccgagcccaagaaccccagagagaacaagcugaagcagcccggcgacagagccgacggccagcccgccggcgacagagccgacggccagcccgccggcgacagagccgccggccagcccgccggcgacagagccgacggccagcccgccggcgacagagccgccggccagcccgccggcgacagagccgacggccagcccgccggcgacagagccgccggccagcccgccggcgacagagccgacggccagcccgccggcgacagagccgccggccagcccgccggcgacagagccgccggccagcccgccggcgacagagccgacggccagcccgccggcgacagagccgccggccagcccgccggcgacagagccgccggccagcccgccggcgacagagccgccggccagcccgccggcgacagagccgccggccagcccgccggcaacggcgccggcggccaggccgccggcggcaacgccgccaacaagaaggccgaggacgccggcggcaacgccggcggccagggccagaacaacgagggcgccaacgcccccaacgagaagagcgugaaggaguaccuggacaaggugagagccaccgugggcaccgaguggacccccugcagcgugaccugcggcgugggcgugagagugagaagaagagugaacgccgccaacaagaagcccgaggaccugacccugaacgacaucgagaccgacgugugcaccauggacaagugcgccggcaucuucaacguggugagcaacagccugggccuggugauccugcuggugcuggcccuguucaacuga

SEQ ID NO: 4914 - RNA, 894 nt, Artificial Sequence
  derived and/or modified CDS sequence (opt4) from Pv(Pt02.2)__ADB92552.1__CSP
augaagaacuucauccugcuggccgugagcagcauccugcugguggaccuguuccccacccacugcggccacaacguggaccugagcaaggccaucaaccugaacggcgugggcuucaacaacguggacgccagcagccugggcgccgcccacgugggccagagcgccagcagaggcagaggccugggcgagaaccccgacgacgaggagggcgacgccaagaagaagaaggacggcaagaaggccgagcccaagaaccccagagagaacaagcugaagcagcccgaggacggcgccggcgaccagcccggcgccaacggcgccggcaaccagcccggcgccaacggcgccggcaaccagcccggcgccaacggcgccggcaaccagcccggcgccaacggcgccggcaaccagcccggcgccaacggcgccggcaaccagcccggcgccaacggcgccggcaaccagcccggcgccaacggcgccggcggccaggccgccggcggcaacgccgccaacaagaaggccggcgacgccggcgccggcggccaggccgccggcggcaacgccgccaacaagaaggccggcgacgccggcgccggccagggccagaacaacgagggcgccaacgcccccaacgagaagagcgugaaggaguaccuggacaaggugagagccaccgugggcaccgaguggacccccugcagcgugaccugcggcgugggcgugagagugagaagaagagugaacgccgccaacaagaagcccgaggaccugacccugaacgaccuggagaccgacgugugcaccauggacaagugcgccggcaucuucaacguggugagcaacagccugggccuggugauccugcuggugcuggcccuguucaacuga

SEQ ID NO: 4915 - RNA, 840 nt, Artificial Sequence
  derived and/or modified CDS sequence (opt4) from Pv(Pt04.5)__ADB92555.1__CSP
augaagaacuucauccugcuggccgugagcagcauccugcugguggaccuguuccccacccacugcggccacaacguggaccugagcaaggccaucaaccugaacggcgugggcuucaacaacguggacgccagcagccugggcgccgcccacgugggccagagcgccagcagaggcagaggccugggcgagaaccccgacgacgaggagggcgacgccaagaagaagaaggacggcaagaaggccgagcccaagaaccccagagagaacaagcugaagcagcccgaggacggcgccggcgaccagcccggcgccaacggcgccggcaaccagcccggcgccaacggcgccggcaaccagcccggcgccaacggcgccggcaaccagcccggcgccaacggcgccggcaaccagcccggcgccaacggcgccggcggccaggccgccggcggcaacgccgccaacaagaaggccggcgacgccggcgccggcggccaggccgccggcggcaacgccgccaacaagaaggccggcgacgccggcgccggccagggccagaacaacgagggcgccaacgcccccaacgagaagagcgugaaggaguaccuggacaaggugagagccaccgugggcaccgaguggacccccugcagcgugaccugcggcgugggcgugagagugagaagaagagugaacgccgccaacaagaagcccgaggaccugacccugaacgaccuggagaccgacgugugcaccauggacaagugcgccggcaucuucaacguggugagcaacagccugggccuggugauccugcuggugcuggcccuguucaacuga

SEQ ID NO: 4916 - RNA, 1023 nt, Artificial Sequence; identical to SEQ ID NO: 215
  derived and/or modified CDS sequence (opt4) from Pb(ANKA)__XP_022712148.1__CSP

SEQ ID NO: 4917 - RNA, 1194 nt, Artificial Sequence; identical to SEQ ID NO: 221
  derived and/or modified CDS sequence (opt5) from Pf(3D7)__XP_001351122.1__CSP

SEQ ID NO: 4918 - RNA, 1335 nt, Artificial Sequence
  derived and/or modified CDS sequence (opt5) from Pf(Pal97-089)__BAM84949.1__CSP
augaugagaaagcuggccauccucagcguguccucuuuccuguuugucgaggcucuuuuccaggaauaccaaugcuauggcagcuccucuaacacccggguucugaaugagcucaacuacgacaaugccgggacaaaccuguauaaugaacuugagaugaacuacuauggaaaacaggaaaauugguacagccugaagaaaaacucccgcucucucggcgagaaugaugacggggauaacgacaauggagauaacggcagagaggggaaggacgaagauaaacgggacggaaauaacgaggauaaugaaaagcugcgcaagcccaaacacaagaaacugaagcagccuggcgacggcaacccggaucccaacgcgaauccuaacguggaccccaaugcuaacccuaauguggaucccaacgccaauccuaacgccaauccgaacgcuaaucccaacgccaauccuaacgcuaaucccaacgccaacccuaaugcgaaccccaaugccaacccgaaugcuaacccuaaugccaaccccaaugcuaacccuaaugccaaccccaaugcgaaccccaaugccaacccuaacgcuaauccgaacgccaaucccaacgcuaauccuaacgccaaucccaacgccaauccuaacgcuaaucccaacgcgaauccgaacgccaauccuaacgcuaaccccaaugccaacccuaaugccaaccccaaugcuaacccuaaugccaaccccaaugcgaacccgaaugcuaacccuaaugccaaccccaaugccaaccccaaugcuaacccuaacgccaauccgaacgcuaaucccaacgccaauccuaacgcgaaucccaacgccaauccuaacgcuaaucccaacgccaauccuaacgcuaaucccaacgccaacccgaaugcgaacccuaaugccaaccccaaugcuaacccuaaugccaaccccaauaaaaacaaucaggggaacggacaaggccauaauaugccgaacgacccuaauagaaacgucgacgagaacgcuaaugccaacaaugccgugaagaacaauaacaaugaggaacccagcgauaagcacauugagcaguaucucaaaaagauccaguacucccugagcacggaauggucuccuugcuccguuaccugcgggaacggcauucaggugcggaucaaacccggaagcgcugacaagcccaaagaucaacuugacuacgagaaugauauugaaaagaaaaucuguaagauggagaaguguucuuccgucuuuaacgugguuaauagcucuaucgggcugauuauggugcucuccuuccuguuucuuaacuga

SEQ ID NO: 4919 - RNA, 1329 nt, Artificial Sequence
  derived and/or modified CDS sequence (opt5) from Pf(T9/94)__BAD73956.1__CSP
augaugagaaagcuggccauccucagcguguccucuuuccuguuugucgaggcucuuuuccaggaauaccaaugcuauggcagcuccucuaacacccggguucugaaugagcucaacuacgacaaugccgggacaaaccuguauaaugaacuugagaugaacuacuauggaaaacaggaaaauugguacagccugaagaaaaacucccgcucucucggcgagaaugaugacggggauaacgacaauggaaacaauaacaauggcaacaacaauaacggggauaauggaagagagggcaaggacgaagauaaacgggacggcaacaaugaggauaacgaaaagcugcgcaagcccaaacacaagaaacugaagcagccuggggacgauaauccggaccccaacgcgaauccuaacguggaucccaaugcuaacccuaauguggaccccaacgccaauccuaacgccaacccgaaugcuaaccccaaugccaacccuaaugcuaaccccaaugccaacccuaaugcgaaccccaaugccaacccgaaugcuaacccuaaugccaaccccaacgcuaauccuaacgccaaucccaacgcgaaucccaacgccaauccuaacgcuaauccgaacgucgaccccaaugccaacccuaaugcuaaccccaaugccaacccuaacgccaaucccaacgcuaauccgaacgcgaauccuaacgccaaucccaacgcuaauccuaacgccaaucccaacgccaauccuaacgcuaaucccaacgccaauccgaacgcgaacccuaaugcuaaccccaaugccaaccccaaugccaacccuaaugcuaacccgaaugccaaccccaaugcuaacccuaaugccaaccccaaugcgaacccuaacgccaaucccaacgcuaauccuaacgccaaucccaacgcuaauccgaacgccaauccuaacaaaaauaaccagggaaauggccaagggcauaacaugcccaaugauccuaacagaaacguggacgagaaugcgaacgccaauaacgcuguuaagaauaacaauaacgaggaacccagcgauaagcacauugagcaguaucucaaaaagauccaaaauucccugagcacggaauggucuccgugcuccgugaccugcggaaacggcauucagguccggaucaaaccugggagcgccgacaagcccaaagaucagcuugacuacgagaaugauauugaaaagaaaaucuguaagauggagaaguguucuuccguguuuaacguugugaauagcucuaucggacugauuaugguccucuccuuccuguuucuuaacuga

SEQ ID NO: 4920 - RNA, 1329 nt, Artificial Sequence
  derived and/or modified CDS sequence (opt5) from Pf(Tq/94)__AAA29551.1__CSP
augaugagaaagcuggccauccucagcguguccucuuuccuguuugucgaggcucuuuuccaggaauaccaaugcuauggcagcuccucuaacacccggguucugaaugagcucaacuacgacaaugccgggauuaaccuguauaaugaacuugagaugaacuacuauggaaaacaggaaaauugguacagccugaagaaaaacucccgcucucucggcgagaaugaugacggggauaacgacaauggaaacaauaacaauggcaacaacaauaacggggauaauggaagagagggcaaggacgaagauaaacgggacggcaacaaugaggauaacgaaaagcugcgcaagcccaaacacaagaaacugaagcagccuggggacggaaauccggaucccaacgcgaauccuaacguggaccccaaugcuaacccuaauguggaucccaacgccaauccuaacgccaacccgaaugcuaaccccaaugccaacccuaaugcuaaccccaaugccaacccuaaugcgaaccccaaugccaacccgaaugcuaacccuaaugccaaccccaacgcuaauccuaacgccaaucccaacgcgaaucccaacgccaauccuaacgcuaauccgaacgucgaccccaaugccaacccuaaugcuaaccccaaugccaacccuaacgccaaucccaacgcuaauccgaacgcgaauccuaacgccaaucccaacgcuaauccuaacgccaaucccaacgccaauccuaacgcuaaucccaacgccaauccgaacgcgaacccuaaugcuaaccccaaugccaaccccaaugccaacccuaaugcuaacccgaaugccaaccccaaugcuaacccuaaugccaaccccaaugcgaacccuaacgccaaucccaacgcuaauccuaacgccaaucccaacgcuaauccgaacgccaauccuaacaaaaauaaccagggcaaugggcaaggacauaacaugcccaaugacccuaacagaaacguggaugagaaugcgaacgccaauaacgcuguuaagaauaacaauaacgaggaacccagcgacaagcacaucgagcaguaucucaaaaagauucaaaauucccugagcacagaauggucuccgugcuccgugacgugcggcaacgggauccagguccggauuaaaccuggaagcgccgauaagcccaaagaccagcuugauuacgagaaugacaucgaaaagaaaaucuguaagauggagaaguguucuuccguguuuaacguugugaauagcucuauuggccugaucaugguccucuccuuccuguuucuuaacuga

SEQ ID NO: 4921 - RNA, 1329 nt, Artificial Sequence
  derived and/or modified CDS sequence (opt5) from Pf(Wellcome)__AAA29554.1__CSP
augaugagaaagcuggccauccucagcguguccucuuuccuguuugucgaggcucuuuuccaggaauaccaaugcuauggcagcuccucuaacacccggguucugaaugagcucaacuacgacaaugccgggacaaaccuguauaaugaacuugagaugaacuacuauggaaaacaggaaaauugguacagccugaagaaaaacucccgcucucucggcgagaaugaugacggggauaacgacaauggaaacaauaacaauggcaacaacaauaacggggauaauggaagagagggcaaggacgaagauaaacgggacggcaacaaugaggauaacgaaaagcugcgcaagcccaaacacaagaaacugaagcagccuggggacggaaauccggaucccaacgcgaauccuaacguggaccccaaugcuaacccuaauguggaucccaacgccaauccuaacgccaacccgaaugcuaaccccaaugccaacccuaaugcuaaccccaaugccaacccuaaugcgaaccccaaugccaacccgaaugcuaacccuaaugccaaccccaacgcuaauccuaacgccaaucccaacgcgaaucccaacgccaauccuaacgcuaauccgaacgucgaccccaaugccaacccuaaugcuaaccccaaugccaacccuaacgccaaucccaacgcuaauccgaacgcgaauccuaacgccaaucccaacgcuaauccuaacgccaaucccaacgccaauccuaacgcuaaucccaacgccaauccgaacgcgaacccuaaugcuaaccccaaugccaaccccaaugccaacccuaaugcuaacccgaaugccaaccccaaugcuaacccuaaugccaaccccaaugcgaacccuaacgccaaucccaacgcuaauccuaacgccaaucccaacgcuaauccgaacgccaauccuaacaaaaauaaccagggcaaugggcaaggacauaacaugcccaaugacccuaacagaaacguggaugagaaugcgaacgccaauaacgcuguuaagaauaacaauaacgaggaacccagcgacaagcacauugagcaguaucucaaaaagauccaaaauucccugagcacggaauggucuccgugcuccgugaccugcggcaacgggauucagguccggaucaaaccuggaagcgccgauaagcccaaagaccagcuugauuacgagaaugacauugaaaagaaaaucuguaagauggagaaguguucuuccguguuuaacguugugaauagcucuaucggccugauuaugguccucuccuuccuguuucuuaacuga

SEQ ID NO: 4922 - RNA, 1323 nt, Artificial Sequence
  derived and/or modified CDS sequence (opt5) from Pf(Pal97-115)__BAM84958.1__CSP
augaugagaaagcuggccauccucagcguguccucuuuccuguuugucgaggcucuuuuccaggaauaccaaugcuauggcagcuccucuaacacccggguucugaaugagcucaacuacgacaaugccgggacaaaccuguauaaugaacuugagaugaacuacuauggaaaacaggaaaauugguacagccugaagaaaaacucccgcucucucggcgagaaugaugacgggaacaauaacaauggagauaacggcagagaggggaaggacgaagauaaacgggacggaaauaacgaggauaacgaaaagcugcgcaagcccaaacacaagaaacugaagcagccuggcgacggcaauccggaucccaacgcgaauccuaacguggaccccaaugcuaacccuaauguggaucccaacgccaauccuaacgucgacccgaaugccaaccccaaugcuaacccuaaugccaaccccaacgcuaauccuaacgccaaucccaacgcgaauccgaacgccaauccuaacgcuaaucccaacgccaauccuaacgcuaaucccaacgccaaucccaacgcgaacccuaaugccaacccgaaugcuaaccccaaugccaacccuaaugcuaaccccaaugccaacccuaaugccaaccccaaugcuaacccgaaugcgaacccuaacgccaaucccaacgcuaauccuaacguggaucccaaugccaacccuaaugccaaccccaaugcuaacccgaaugccaacccuaaugcgaaccccaaugcuaaccccaaugccaacccuaacgccaauccgaacgcuaaucccaacgccaauccuaacgcuaaucccaacgccaauccuaacgcgaaucccaacgccaauccuaacgcuaaucccaacgccaacccgaaugcuaacccuaaugccaaccccaaugcgaacccuaauaaaaacaaucaggggaacggacaaggccauaauaugcccaacgacccgaauagaaacguugacgagaaugccaacgcuaacaaugccgugaagaacaauaacaaugaggaaccuagcgaucagcacauugagaaguaucucaaaaucauucagaacucccugagcacggaauggucucccugcuccgugaccugcgggaauggaauccagguccggauuaagccuggcagcgcugacaaacccaaggaucaacuugacuacgccaacgauaucgagaaaaagaucuguaaaauggaaaaguguucuuccguuuuuaauguggucaacagcucuauugggcugaucauggugcucuccuuccuguuucuuaauuga

SEQ ID NO: 4923 - RNA, 1323 nt, Artificial Sequence
  derived and/or modified CDS sequence (opt5) from Pf(PMS5)__BAN59428.1__CSP
augaugagaaagcuggccauccucagcguguccucuuuccuguuugucgaggcucuuuuccaggaauaccaaugcuauggcagcuccucuaacacccggguucugaaugagcucaacuacgacaaugccgggacaaaccuguauaaugaacuugagaugaacuacuauggaaaacaggaaaauugguacagccugaagaaaaacucccgcucucucggcgagaaugaugacgggaacaauaacaauggagauaacggcagagaggggaaggacgaagauaaacgggacggaaauaacgaggauaacgaaaagcugcgcaagcccaaacacaagaaacugaagcagccuggcgacggcaauccggaucccaacgcgaauccuaacguggaccccaaugcuaacccuaauguggaucccaacgccaauccuaacgucgacccgaaugccaaccccaaugcuaacccuaaugccaaccccaacgcuaauccuaacgccaaucccaacgcgaauccgaacgccaauccuaacgcuaaucccaacgccaauccuaacgcuaaucccaacgccaaucccaacgcgaacccuaaugccaacccgaaugcuaaccccaaugccaacccuaaugcuaaccccaaugccaacccuaaugccaaccccaaugcuaacccgaaugcgaacccuaacgccaaucccaacgcuaauccuaacgccaaucccaacgccaauccuaacgcuaaucccaacgccaauccgaacgcgaauccuaacgcuaaucccaacgccaaucccaacgccaacccuaaugcuaacccgaaugccaaccccaaugcuaacccuaaugccaaccccaaugcgaacccuaaugccaaccccaaugcuaacccuaaugccaaccccaacgcuaauccgaacgccaauccuaacgcgaaucccaacgccaauccuaacaaaaauaaccaggggaauggacaaggccauaacaugcccaaugauccgaacagaaauguggacgagaacgcuaacgccaauaacgacguuaagaauaacaauaacgaggaaccuagcgauaagcacauugagcaguaucucaaaaagauccaguacucccugagcacggaauggucucccugcuccgugaccugcgggaauggcauucagguccggaucaaaccuggaagcgcugacaagcccaaagaucaacuugacuacgagaacgauauugaaaagaaaaucuguaagauggagaaguguucuuccguguuuaauguugugaacagcucuaucgggcugauuaugguccucuccuuccuguuucuuaauuga

SEQ ID NO: 4924 - RNA, 1320 nt, Artificial Sequence
  derived and/or modified CDS sequence (opt5) from Pf(J2)__ACO49408.1__CSP
augagaaagcuggccauccucagcguguccucuuuccuguuugucgaggcucuuuuccaggaauaccaaugcuauggcagcuccucuaacacccggguucugaaugagcucaacuacgacaaugccgggacaaaccuguauaaugaacuugagaugaacuacuauggaaaacaggaaaauugguacagccugaagaaaaacucccgcucucucggcgagaaugaugacgggaacaauaacaauggagauaacggcagagaggggaaggacgaagauaaacgggacggaaauaacgaggauaacgaaaagcugcgcaagcccaaacacaagaaacugaagcagccuggcgacggcaauccggaucccaacgcgaauccuaacguggaccccaaugcuaacccuaauguggaucccaacgccaauccuaacgucgacccgaaugccaaccccaaugcuaacccuaaugccaaccccaacgcuaauccuaacgccaaucccaacgcgaauccgaacgccaauccuaacgcuaaucccaacgccaauccuaacgcuaaucccaacgccaaucccaacgcgaacccuaaugccaacccgaaugcuaaccccaaugccaacccuaaugcuaaccccaauguggauccuaacgccaaucccaacgccaauccgaacgcuaauccuaacgcgaaccccaaugccaacccuaaugcuaaccccaaugccaacccuaaugccaaccccaaugcuaacccgaaugccaacccuaaugcgaaccccaaugcuaaccccaaugccaacccuaacgccaauccgaacgcuaaucccaacgccaauccuaacgcuaaucccaacgccaauccuaacgcgaaucccaacgccaauccuaacgcuaaucccaacgccaacccgaaugcuaacccuaaugccaaccccaaugcgaacccuaauaaaaacaaucaggggaacggacaaggccauaauaugcccaacgacccgaauagaaacguugacgagaaugccaacgcuaacaaugaugugaagaacaauaacaaugaggaaccuagcgacaagcacauugagcaguaucucaaaaagauccaguacucccugagcacggaauggucucccugcuccgugaccugcgggaacggcauucagguccggaucaaaccuggaagcgccgauaagcccaaagaccaacuugauuacgagaaugacauugaaaagaaaaucuguaagauggagaaguguucuuccguuuuuaacguggucaauagcucuaucgggcugauuauggugcucuccuuccuguuucuuaacuga

SEQ ID NO: 4925 - RNA, 1320 nt, Artificial Sequence
  derived and/or modified CDS sequence (opt5) from Pf(M4)__ACO49420.1__CSP
augagaaagcuggccauccucagcguguccucuuuccuguuugucgaggcucuuuuccaggaauaccagugcuauggcagcuccucuaacacccggguucugaaugagcucaacuacgacaaugccgggacaaaccuguauaaugaacuugagaugaacuacuauggaaaacaggaaaauugguacagccugaagaaaaacucccgcucucucggcgagaaugaugacgggaacaauaacaauggagauaacggcagagaggggaaggacgaagauaaacgggacggaaauaacgaggauaacgaaaagcugcgcaagcccaaacacaagaaacugaagcagccuggcgacggcaauccggaucccaacgcgaauccuaacguggaccccaaugcuaacccuaauguggaucccaacgccaauccuaacgccaauccgaacgcuaaucccaacgccaauccuaacgcuaaccccaaugccaacccuaaugcgaaccccaaugccaacccgaaugcuaacccuaaugccaaccccaaugcuaacccuaaugccaaccccaaugcgaaccccaacgccaauccuaacgcuaauccgaacgccaaucccaacgucgacccuaaugcuaaccccaaugccaacccuaaugccaaccccaaugcuaacccgaaugcgaacccuaacgccaaucccaacgcuaauccuaacgccaaucccaacgccaauccuaacgcuaaucccaacgccaauccgaacgcgaauccuaacgcuaaucccaacgccaaucccaacgccaacccuaaugcuaacccgaaugccaaccccaaugcuaacccuaaugccaaccccaaugcgaacccuaaugccaaccccaaugcuaacccuaaugccaaccccaacgcuaauccgaacgccaauccuaacgcgaaucccaacgccaauccuaacaaaaauaaccaggggaauggacaaggccauaacaugcccaaugauccgaacagaaauguggacgagaacgcuaacgccaauaacgcuguuaagaauaacaauaacgaggaaccuagcgacaagcacauuacggaguaucucaaaaagauccaaaauucccugagcaccgaauggucucccuguuccgugacaugcgggaacggcauucagguccggaucaaaccuggaagcgccgggaagucuaaagaugagcuugacuacgaaaaugauauugagaagaaaaucuguaagauggagaagugcuccagcguguuuaacguugucaauucuuccaucggacugauuauggugcucagcuuccuguuucuuaacuga

SEQ ID NO: 4926 - RNA, 1320 nt, Artificial Sequence
  derived and/or modified CDS sequence (opt5) from Pf(TMS121)__ACO49498.1__CSP
augagaaagcuggccauccucagcguguccucuuuccuguuugucgaggcucuuuuccaggaauaccagugcuauggcagcuccucuaacacccggguucugaaugagcucaacuacgacaaugccgggacaaaccuguauaaugaacuugagaugaacuacuauggaaaacaggaaaauugguacagccugaagaaaaacucccgcucucucggcgagaaugaugacgggaacaauaacaauggagauaacggcagagaggggaaggacgaagauaaacgggacggaaauaacgaggauaacgaaaagcugcgcaagcccaaacacaagaaacugaagcagccuggcgacggcaauccggaucccaacgcgaauccuaacguggaccccaaugcuaacccuaauguggaucccaacgccaauccuaacgucgacccgaaugccaaccccaaugcuaacccuaaugccaaccccaacgcuaauccuaacgccaaucccaacgcgaauccgaacgccaauccuaacgcuaaucccaacgccaauccuaacgcuaaucccaacgccaaucccaacgcgaacccuaaugccaacccgaaugcuaaccccaaugccaacccuaaugcuaaccccaaugccaacccuaaugccaaccccaaugcuaacccgaaugcgaacccuaacgccaaucccaacgcuaauccuaacgccaaucccaacgccaauccuaacgcuaaucccaacgccaauccgaacgcgaauccuaacgcuaaucccaacgccaaucccaacgccaacccuaaugcuaacccgaaugccaaccccaaugcuaacccuaaugccaaccccaaugcgaacccuaaugccaaccccaaugcuaacccuaaugccaaccccaacgcuaauccgaacgccaauccuaacgcgaaucccaacgccaauccuaacaaaaauaaccaggggaauggacaaggccauaacaugcccaaugauccgaacagaaauguggacgagaacgcuaacgccaauaacgacguuaagaauaacaauaacgaggaaccuagcgauaagcacauugagcaguaucucaaaaagauccaaaauucccugagcacggaauggucucccugcuccgugaccugcgggaacggcauucagguccggaucaaaccuggaagcgcuaauaagcccaaagacgagcuugauuacgaaaacgacauugagaagaaaaucuguaagauggagaaguguucuuccguguuuaauguugugaacagcucuaucgggcugauuaugguccucuccuuccuguuucuuaauuga

SEQ ID NO: 4927 - RNA, 1320 nt, Artificial Sequence
  derived and/or modified CDS sequence (opt5) from Pf(TMS180)__ACO49505.1__CSP
augagaaagcuggccauccucagcguguccucuuuccuguuugucgaggcucuuuuccaggaauaccaaugcuauggcagcuccucuaacacccggguucugaaugagcucaacuacgacaaugccgggacaaaccuguauaaugaacuugagaugaacuacuauggaaaacaggaaaauugguacagccugaagaaaaacucccgcucucucggcgagaaugaugacgggaacaauaacaauggagauaacggcagagaggggaaggacgaagauaaacgggacggaaauaacgaggauaacgaaaagcugcgcaagcccaaacacaagaaacugaagcagccuggcgacggcaauccggaucccaacgcgaauccuaacguggaccccaaugcuaacccuaauguggaucccaacgccaauccuaacgucgacccgaaugccaaccccaaugcuaacccuaaugccaaccccaacgcuaauccuaacgccaaucccaacgcgaauccgaacgccaauccuaacgcuaaucccaacgccaauccuaacgcuaaucccaacgccaaucccaacgcgaacccuaaugccaacccgaaugcuaaccccaaugccaacccuaaugcuaaccccaaugccaacccuaaugccaaccccaaugcuaacccgaaugcgaacccuaacgccaaucccaacgcuaauccuaacgccaaucccaacgccaauccuaacgcuaaucccaacgccaauccgaacgcgaauccuaacgcuaaucccaacgccaaucccaacgccaacccuaaugcuaacccgaaugccaaccccaaugcuaacccuaaugccaaccccaaugcgaacccuaaugccaaccccaaugcuaacccuaaugccaaccccaacgcuaauccgaacgccaauccuaacgcgaaucccaacgccaauccuaacaaaaauaaccaggggaauggacaaggccauaacaugcccaaugauccgaacagaaauguggacgagaacgcuaacgccaauaacgacguuaagaauaacaauaacgaggaaccuagcgauaagcacauugagcaguaucucaaaaagauccaguacucccugagcacggaauggucucccugcuccgugaccugcgggaauggcauucagguccggaucaaaccuggaagcgcugacaagcccaaagaucaacuugacuacgagaacgauauugaaaagaaaaucuguaagauggagaaguguucuuccguguuuaauguugugaacagcucuaucgggcugauuaugguccucuccuuccuguuucuuaauuga

SEQ ID NO: 4928 - RNA, 1311 nt, Artificial Sequence
  derived and/or modified CDS sequence (opt5) from Pf(836)__AAA29576.1__CSP
augaugagaaagcuggccauccucagcguguccucuuuccuguuugucgaggcucuuuuccaggaauaccagugcuauggcagcuccucuaacacccggguucugaaugagcucaacuacgacaaugccgggauuaaccuguauaaugaacuugagaugaacuacuauggaaaacaggaaaauugguacagccugaagaaaaacucccgcucucucggcgagaaugaugacgggaacaauaacaauggagauaacggcagagaggggaaggacgaagauaaacgggacggaaauaacgaggauaacgaaaagcugcgcaagcccaaacacaagaaacugaagcagccuggcgacggcaauccggaucccaacgcgaauccuaacguggaccccaaugcuaacccuaauguggaucccaacgccaauccuaacgccaauccgaacgcuaaucccaacgccaauccuaacgcuaaccccaaugccaacccuaaugcgaaccccaaugccaacccgaaugcuaacccuaaugccaaccccaaugcuaacccuaaugccaaccccaaugcgaaccccaacgccaauccuaacgcuaauccgaacgucgaccccaaugccaacccuaaugcuaaccccaaugccaacccuaaugccaaccccaaugcuaacccgaaugcgaacccuaacgccaaucccaacgcuaauccuaacgccaaucccaacgccaauccuaacgcuaaucccaacgccaauccgaacgcgaauccuaacgcuaaucccaacgccaaucccaacgccaacccuaaugcuaacccgaaugccaaccccaaugcuaacccuaaugccaaccccaaugcgaacccuaaugccaaccccaaugcuaacccuaaugccaaccccaacgcuaauccgaacgccaauccuaacgcgaaucccaacaaaaauaaccaggggaauggacaaggccauaacaugccuaaugaucccaacagaaauguggacgagaacgccaaugcuaacaacgccguuaagaauaacaauaacgaggaaccgagcgacaagcacaucacagaguaucucaaaaagauucaaaauucccugagcacggaauggucuccuuguuccgugaccugcgggaacggaauccagguccggauuaaacccggcagcgcugggaagucuaaagaugagcuugacuacgaaaaugauaucgagaagaaaaucuguaagauggagaagugcuccagcguguuuaacguugucaauucuuccauuggacugaucauggugcucagcuuccuguuucuuaacuga

SEQ ID NO: 4929 - RNA, 1311 nt, Artificial Sequence
  derived and/or modified CDS sequence (opt5) from Pf(842)__AAA29545.1__CSP
augaugagaaagcuggccauccucagcguguccucuuuccuguuugucgaggcucuuuuccaggaauaccaaugcuauggcagcuccucuaacacccggguucugaaugagcucaacuacgacaaugccgggauuaaccuguauaaugaacuugagaugaacuacuauggaaaacaggaaaauugguacagccugaagaaaaacucccgcucucucggcgagaaugaugacgggaacaauaacaauggagauaacggcagagaggggaaggacgaagauaaacgggacggaaauaacgaggauaacgaaaagcugcgcaagcccaaacacaagaaacugaagcagccuggcgacggcaauccggaucccaacgcgaauccuaacguggaccccaaugcuaacccuaauguggaucccaacgccaauccuaacgucgacccgaaugccaaccccaaugcuaacccuaaugccaaccccaacgcuaauccuaacgccaaucccaacgcgaauccgaacgccaauccuaacgcuaaucccaacgccaauccuaacgcuaaucccaacgccaaucccaacgcgaacccuaaugccaacccgaaugcuaaccccaaugccaacccuaaugcuaaccccaaugccaacccuaaugccaaccccaaugcuaacccgaaugcgaacccuaacgccaaucccaacgcuaauccuaacgccaaucccaacgccaauccuaacgcuaaucccaacgccaauccgaacgcgaauccuaacgcuaaucccaacgccaaucccaacgccaacccuaaugcuaacccgaaugccaaccccaaugcuaacccuaaugccaaccccaaugcgaacccuaaugccaaccccaaugcuaacccuaaugccaaccccaacgcuaauccgaacgccaauccuaacgcgaaucccaacaaaaauaaccaggggaauggacaaggccauaacaugccuaaugaucccaacagaaauguggacgagaacgccaaugcuaacaacgacguuaagaauaacaauaacgaggaaccgagcgauaagcacaucgagcaguaucucaaaaagauucaguacucccugagcacagaauggucuccuugcuccgugacgugcgggaauggaauccagguccggauuaaacccggcagcgccgacaagccuaaagaucaacuugacuacgagaacgauaucgaaaagaaaaucuguaagauggagaaguguucuuccguguuuaauguugugaacagcucuauugggcugaucaugguccucuccuuccuguuucuuaauuga

SEQ ID NO: 4930 - RNA, 1311 nt, Artificial Sequence
  derived and/or modified CDS sequence (opt5) from Pf(India)__AAN87576.1__CSP
augaugagaaagcuggccauccucagcguguccucuuuccuguuugucgaggcucuuuuccaggaauaccaaugcuauggcagcuccucuaacacccggguucugaaugagcucaacuacgacaaugccgggacaaaccuguauaaugaacuugagaugaacuacuauggaaaacaggaaaauugguacagccugaagaaaaacucccgcucucucggcgagaaugaugacgggaacaauaacaauggagauaacggcagagaggggaaggacgaagauaaacgggacggaaauaacgaggauaacgaaaagcugcgcaagcccaaacacaagaaacugaagcagccuggcgacggcaauccggaucccaacgcgaauccuaacguggaccccaaugcuaacccuaauguggaucccaacgccaauccuaacgccaauccgaacgcuaaucccaacgccaauccuaacgcuaaccccaaugccaacccuaaugcgaaccccaaugccaacccgaaugcuaacccuaaugccaaccccaaugcuaacccuaaugccaaccccaaugcgaaccccaacgccaauccuaacgcuaauccgaacgccaaucccaacgcuaauccuaacgccaaucccaacgccaauccuaacgcuaaucccaacgcgaauccgaacgccaacccuaaugcuaaccccaaugccaacccuaaugccaaccccaaugcuaacccuaaugccaaccccaaugcgaacccgaaugcuaacccuaaugccaaccccaaugccaaccccaacgcuaauccuaacgccaauccgaacgcuaaucccaacgccaauccuaacgcgaaucccaacgccaauccuaacgcuaaucccaacgccaauccuaacgcuaaccccaaugccaacccgaaugcgaacccuaaugccaaccccaauaaaaacaaucaggggaacggacaaggccauaauaugccuaacgaccccaauagaaacgucgaugagaaugcuaacgccaacaaugacgugaagaacaauaacaaugaggaaccgagcgacaagcacauugaggaauaucucaaaaagauccagaacucccugagcacggaguggucuccuugcuccguuaccugcgggaauggcauucaggugcggaucaaacccggaagcgcuaacaagccuaaagaugaacuuaauuacgagaacgacauugagaagaaaaucuguaagauggaaaaguguucuuccgucuuuaaugugguuaacagcucuaucgggcugauuauggugcucuccuuccuguuucuuaauuga

SEQ ID NO: 4931 - RNA, 1311 nt, Artificial Sequence
  derived and/or modified CDS sequence (opt5) from Pf(India)__AAN87620.1__CSP
augaugagaaagcuggccauccucagcguguccucuuuccuguuugucgaggcucuuuuccaggaauaccaaugcuauggcagcuccucuaacacccggguucugaaugagcucaacuacgacaaugccgggacaaaccuguauaaugaacuugagaugaacuacuauggaaaacaggaaaauugguacagccugaagaaaaacucccgcucucucggcgagaaugaugacgggaacaauaacaauggagauaacggcagagaggggaaggacgaagauaaacgggacggaaauaacgaggauaacgaaaagcugcgcaagcccaaacacaagaaacugaagcagccuggcggcgacaauccggaucccaacgcgaauccuaacguggaccccaaugcuaacccuaaugccaaccccaaugccaacccuaaugcuaacccgaaugugaaccccaaugccaacccuaacgcuaaucccaacgccaauccuaacgcgaaucccaacgccaauccgaacgcuaauccuaacgccaaucccaacgcuaauccuaacgucgaucccaaugccaaccccaacgcgaauccuaacgccaauccgaacgcuaaucccaacgccaauccuaacgcuaaucccaacgccaauccuaacgccaaucccaacgcuaauccgaacgcgaacccuaaugccaaccccaaugcuaacccuaaugccaaccccaaugccaacccuaaugcuaaccccaaugccaacccgaaugcgaacccuaaugcuaaccccaaugccaaccccaacgccaauccuaacgcuaauccgaacgccaaucccaacgcuaauccuaacgccaaucccaacgcgaauccuaacgccaaucccaacgcuaauccuaacgccaaccccaaugcuaacccgaaugccaacccuaaugcgaaccccaauaaaaacaaucaggggaacggacaaggccauaauaugccuaacgaccccaauagaaacguggaugagaaugccaacgcuaacaaugccguuaagaacaauaacaaugaggaaccgagcgacaagcacauugagcaguaucucaaaaagauccagaacucccugagcacggaauggucuccuugcuccgugaccugcgggaauggcauucagguccggaucaaacccggaagcgcuaacaagccuaaagacgagcuugauuacgaaaaugacauugagaagaaaaucuguaagauggagaaguguucuuccguguuuaacguugugaauagcucuaucgggcugauuaugguccucuccuuccuguuucuuaacuga

SEQ ID NO: 4932 - RNA, 1311 nt, Artificial Sequence
  derived and/or modified CDS sequence (opt5) from Pf(PFS19)__BAN59401.1__CSP
augaugagaaagcuggccauccucagcguguccucuuuccuguuugucgaggcucuuuuccaggaauaccagugcuauggcagcuccucuaacacccggguucugaaugagcucaacuacgacaaugccgggacaaaccuguauaaugaacuugagaugaacuacuauggaaaacaggaaaauugguacagccugaagaaaaacucccgcucucucggcgagaaugaugacgggaacaauaacaauggagauaacggcagagaggggaaggacgaagauaaacgggacggaaauaacgaggauaacgaaaagcugcgcaagcccaaacacaagaaacugaagcagccuggcgacggcaauccggaucccaacgcgaauccuaacguggaccccaaugcuaacccuaauguggaucccaacgccaauccuaacgucgacccgaaugccaaccccaaugcuaacccuaaugccaaccccaacgcuaauccuaacgccaaucccaacgcgaauccgaacgccaauccuaacgcuaaucccaacgccaauccuaacgcuaaucccaacgccaaucccaacgcgaacccuaaugccaacccgaaugcuaaccccaaugccaacccuaaugcuaaccccaaugccaacccuaaugccaaccccaaugcuaacccgaaugcgaacccuaacgccaaucccaacgcuaauccuaacgccaaucccaacgccaauccuaacgcuaaucccaacgccaauccgaacgcgaauccuaacgcuaaucccaacgccaaucccaacgccaacccuaaugcuaacccgaaugccaaccccaaugcuaacccuaaugccaaccccaaugcgaacccuaaugccaaccccaaugcuaacccuaaugccaaccccaacgcuaauccgaacgccaauccuaacgcgaaucccaacaaaaauaaccaggggaauggacaaggccauaacaugccuaaugaucccaacagaaauguggacgagaacgccaaugcuaacaacgccguuaagaauaacaauaacgaggaaccgagcgacaagcacauugagcaguaucucaaaaagauccaaaauucccugagcacggaauggucuccuugcuccgugaccugcgggaacggcauucagguccggaucaaacccggaagcgcuaauaagccuaaagaugagcuugacuacgaaaacgauauugagaagaaaaucuguaagauggagaaguguucuuccguguuuaauguugugaacagcucuaucgggcugauuaugguccucuccuuccuguuucuuaauuga

SEQ ID NO: 4933 - RNA, 1311 nt, Artificial Sequence
  derived and/or modified CDS sequence (opt5) from Pf(Sol95-121)__BAM85068.1__CSP
augaugagaaagcuggccauccucagcguguccucuuuccuguuugucgaggcucuuuuccaggaauaccaaugcuauggcagcuccucuaacacccggguucugaaugagcucaacuacgacaaugccgggacaaaccuguauaaugaacuugagaugaacuacuauggaaaacaggaaaauugguacagccugaagaaaaacucccgcucucucggcgagaaugaugacgggaacaauaacaauggagauaacggcagagaggggaaggacgaagauaaacgggacggaaauaacgaggauaacgaaaagcugcgcaagcccaaacacaagaaacugaagcagccuguggacggcaauccggaucccaacgcgaauccuaacguggaccccaaugcuaacccuaaugucgaucccaacgccaauccuaacguggacccgaaugccaaccccaaugcuaacccuaaugccaaccccaacgcuaauccuaacgccaaucccaacgcgaauccgaacgccaauccuaacgcuaaucccaacgccaauccuaacgcuaaucccaacgccaaucccaacgcgaacccuaaugccaacccgaaugcuaaccccaaugccaacccuaaugcuaaccccaaugccaacccuaaugccaaccccaaugcuaacccgaaugcgaacccuaacgccaaucccaacgcuaauccuaacgccaaucccaacgccaauccuaacgcuaaucccaacgccaauccgaacgcgaauccuaacgcuaaucccaacgccaaucccaacgccaacccuaaugcuaacccgaaugccaaccccaaugcuaacccuaaugccaaccccaaugcgaacccuaaugccaaccccaaugcuaacccuaaugccaaccccaacgcuaauccgaacgccaaaccuaaugcgaaccccaauaagaacaaucagggcaacgggcaaggacauaauaugccuaacgaucccaauagaaacguugacgagaaugccaacgcuaauaacgccgugaagaacaauaacaaugaggaaccgagcgacaaacacauugagcaguaucucaagaaaauccagaacucccugagcacggaauggucuccuugcuccgugaccugcggcaaugggauucagguccggaucaagcccggaagcgcugauaaaccuaaggaccaacuugauuacgagaacgacauugagaaaaagaucuguaagauggaaaaauguucuuccguuuuuaauguggucaacagcucuaucggccugauuauggugcucuccuuccuguuucuuaauuga

SEQ ID NO: 4934 - RNA, 1311 nt, Artificial Sequence
  derived and/or modified CDS sequence (opt5) from Pf(T837)__BAM84914.1__CSP
augaugagaaagcuggccauccucagcguguccucuuuccuguuugucgaggcucuuuuccaggaauaccagugcuauggcagcuccucuaacacccggguucugaaugagcucaacuacgacaaugccgggacaaaccuguauaaugaacuugagaugaacuacuauggaaaacaggaaaauugguacagccugaagaaaaacucccgcucucucggcgagaaugaugacgggaacaauaacaauggagauaacggcagagaggggaaggacgaagauaaacgggacggaaauaacgaggauaacgaaaagcugcgcaagcccaaacacaagaaacugaagcagccuggcgacggcaauccggaucccaacgcgaauccuaacguggaccccaaugcuaacccuaauguggaucccaacgccaauccuaacgccaauccgaacgcuaaucccaacgccaauccuaacgcuaaccccaaugccaacccuaaugcgaaccccaaugccaacccgaaugcuaacccuaaugccaaccccaaugcuaacccuaaugccaaccccaaugcgaaccccaacgccaauccuaacgcuaauccgaacgucgaccccaaugccaacccuaaugcuaaccccaaugccaacccuaaugccaaccccaaugcuaacccgaaugcgaacccuaacgccaaucccaacgcuaauccuaacgccaaucccaacgccaauccuaacgcuaaucccaacgccaauccgaacgcgaauccuaacgcuaaucccaacgccaaucccaacgccaacccuaaugcuaacccgaaugccaaccccaaugcuaacccuaaugccaaccccaaugcgaacccuaaugccaaccccaaugcuaacccuaaugccaaccccaacgcuaauccgaacgccaauccuaacgcgaaucccaacaaaaauaaccaggggaauggacaaggccauaacaugccuaaugaucccaacagaaauguggacgagaacgccaaugcuaacaacgccguuaagaauaacaauaacgaggaaccgagcgacaagcacauuacggaguaucucaaaaagauccaaaauucccugagcaccgaauggucuccuuguuccgugacaugcgggaacggcauucagguccggaucaaacccggaagcgcugggaagucuaaagaugagcuugacuacgaaaaugauauugagaagaaaaucuguaagauggagaagugcuccagcguguuuaacguugucaauucuuccaucggacugauuauggugcucagcuuccuguuucuuaacuga

SEQ ID NO: 4935 - RNA, 1311 nt, Artificial Sequence
  derived and/or modified CDS sequence (opt5) from Pf(TiMS95-071)__BAM84865.1__CSP
augaugagaaagcuggccauccucagcguguccucuuuccuguuugucgaggcucuuuuccaggaauaccaaugcuauggcagcuccucuaacacccggguucugaaugagcucaacuacgacaaugccgggacaaaccuguauaaugaacuugagaugaacuacuauggaaaacaggaaaauugguacagccugaagaaaaacucccgcucucucggcgagaaugaugacgggaacaauaacaauggagauaacggcagagaggggaaggacgaagauaaacgggacggaaauaacgaggauaacgaaaagcugcgcaagcccaaacacaagaaacugaagcagccuggcgacggcaauccggaucccaacgcgaauccuaacguggaccccaaugcuaacccuaauguggaucccaacgccaauccuaacgucgacccgaaugccaaccccaaugcuaacccuaaugccaaccccaacgcuaauccuaacgccaaucccaacgcgaauccgaacgccaauccuaacgcuaaucccaacgccaauccuaacgcuaaucccaacgccaaucccaacgcgaacccuaaugccaacccgaaugcuaaccccaaugccaacccuaaugcuaaccccaaugccaacccuaaugccaaccccaaugcuaacccgaaugcgaacccuaacgccaaucccaacgcuaauccuaacgccaaucccaacgccaauccuaacgcuaaucccaacgccaauccgaacgcgaauccuaacgcuaaucccaacgccaaucccaacgccaacccuaaugcuaacccgaaugccaaccccaaugcuaacccuaaugccaaccccaaugcgaacccuaaugccaaccccaaugcuaacccuaaugccaaccccaacgcuaauccgaacgccaauccuaacgcgaaucccaacaaaaauaaccaggggaauggacaaggccauaacaugccuaaugaucccaacagaaauguggacgagaacgccaaugcuaacaacgacguuaagaauaacaauaacgaggaaccgagcgauaagcacauugagcaguaucucaaaaagauccaguacucccugagcacggaauggucuccuugcuccgugaccugcgggaauggcauucagguccggaucaaacccggaagcgccgacaagccuaaagaucaacuugacuacgagaacgauauugaaaagaaaaucuguaagauggagaaguguucuuccguguuuaauguugugaacagcucuaucgggcugauuaugguccucuccuuccuguuucuuaauuga

SEQ ID NO: 4936 - RNA, 1308 nt, Artificial Sequence
  derived and/or modified CDS sequence (opt5) from Pf(TM69)__ACO49446.1__CSP
augagaaagcuggccauccucagcguguccucuuuccuguuugucgaggcucuuuuccaggaauaccaaugcuauggcagcuccucuaacacccggguucugaaugagcucaacuacgacaaugccgggacaaaccuguauaaugaacuugagaugaacuacuauggaaaacaggaaaauugguacagccugaagaaaaacucccgcucucucggcgagaaugaugacgggaacaauaacaauggagauaacggcagagaggggaaggacgaagauaaacgggacggaaauaacgaggauaacgaaaagcugcgcaagcccaaacacaagaaacugaagcagccuggcgacggcaauccggaucccaacgcgaauccuaacguggaccccaaugcuaacccuaauguggaucccaacgccaauccuaacgucgacccgaaugccaaccccaaugcuaacccuaaugccaaccccaacgcuaauccuaacgccaaucccaacgcgaauccgaacgccaauccuaacgcuaaucccaacgccaauccuaacgcuaaucccaacgccaaucccaacgcgaacccuaaugccaacccgaaugcuaaccccaaugccaacccuaaugcuaaccccaaugccaacccuaaugccaaccccaaugcuaacccgaaugcgaacccuaacgccaaucccaacgcuaauccuaacgccaaucccaacgccaauccuaacgcuaaucccaacgccaauccgaacgcgaauccuaacgcuaaucccaacgccaaucccaacgccaacccuaaugcuaacccgaaugccaaccccaaugcuaacccuaaugccaaccccaaugcgaacccuaaugccaaccccaaugcuaacccuaaugccaaccccaacgcuaauccgaacgccaauccuaacgcgaaucccaacaaaaauaaccaggggaauggacaaggccauaacaugccuaaugaucccaacagaaauguggacgagaacgccaaugcuaacaacgacguuaagaauaacaauaacgaggaaccgagcgauaagcacauugagcaguaucucaaaaagauccaguacucccugagcacggaauggucuccuugcuccgugaccugcgggaauggcauucagguccggaucaaacccggaagcgccgacaagccuaaagaucaacuugacuacgagaacgauauugaaaagaaaaucuguaagauggagaaguguucuuccguguuuaauguugugaacagcucuaucgggcugauuaugguccucuccuuccuguuucuuaauuga

SEQ ID NO: 4937 - RNA, 1308 nt, Artificial Sequence
  derived and/or modified CDS sequence (opt5) from Pf(TMS177)__ACO49503.1__CSP
augagaaagcuggccauccucagcguguccucuuuccuguuugucgaggcucuuuuccaggaauaccagugcuauggcagcuccucuaacacccggguucugaaugagcucaacuacgacaaugccgggacaaaccuguauaaugaacuugagaugaacuacuauggaaaacaggaaaauugguacagccugaagaaaaacucccgcucucucggcgagaaugaugacgggaacaauaacaauggagauaacggcagagaggggaaggacgaagauaaacgggacggaaauaacgaggauaacgaaaagcugcgcaagcccaaacacaagaaacugaagcagccuggcgacggcaauccggaucccaacgcgaauccuaacguggaccccaaugcuaacccuaauguggaucccaacgccaauccuaacgucgacccgaaugccaaccccaaugcuaacccuaaugccaaccccaacgcuaauccuaacgccaaucccaacgcgaauccgaacgccaauccuaacgcuaaucccaacgccaauccuaacgcuaaucccaacgccaaucccaacgcgaacccuaaugccaacccgaaugcuaaccccaaugccaacccuaaugcuaaccccaaugccaacccuaaugccaaccccaaugcuaacccgaaugcgaacccuaacgccaaucccaacgcuaauccuaacgccaaucccaacgccaauccuaacgcuaaucccaacgccaauccgaacgcgaauccuaacgcuaaucccaacgccaaucccaacgccaacccuaaugcuaacccgaaugccaaccccaaugcuaacccuaaugccaaccccaaugcgaacccuaaugccaaccccaaugcuaacccuaaugccaaccccaacgcuaauccgaacgccaauccuaacgcgaaucccaacaaaaauaaccaggggaauggacaaggccauaacaugccuaaugaucccaacagaaauguggacgagaacgccaaugcuaacaacgccguuaagaauaacaauaacgaggaaccgagcgacaagcacauugagcaguaucucaaaaagauccaaaauucccugagcacggaauggucuccuugcuccgugaccugcgggaacggcauucagguccggaucaaacccggaagcgcuaauaagccuaaagaugagcuugacuacgaaaacgauauugagaagaaaaucuguaagauggagaaguguucuuccguguuuaauguugugaacagcucuaucgggcugauuaugguccucuccuuccuguuucuuaauuga

SEQ ID NO: 4938 - RNA, 1308 nt, Artificial Sequence
  derived and/or modified CDS sequence (opt5) from Pf(TMS178)__ACO49504.1__CSP
augagaaagcuggccauccucagcguguccucuuuccuguuugucgaggcucuuuuccaggaauaccagugcuauggcagcuccucuaacacccggguucugaaugagcucaacuacgacaaugccgggacaaaccuguauaaugaacuugagaugaacuacuauggaaaacaggaaaauugguacagccugaagaaaaacucccgcucucucggcgagaaugaugacgggaacaauaacaauggagauaacggcagagaggggaaggacgaagauaaacgggacggaaauaacgaggauaacgaaaagcugcgcaagcccaaacacaagaaacugaagcagccuggcgacggcaauccggaucccaacgcgaauccuaacguggaccccaaugcuaacccuaauguggaucccaacgccaauccuaacgccaauccgaacgcuaaucccaacgccaauccuaacgcuaaccccaaugccaacccuaaugcgaaccccaaugccaacccgaaugcuaacccuaaugccaaccccaaugcuaacccuaaugccaaccccaaugcgaaccccaacgccaauccuaacgcuaauccgaacgucgaccccaaugccaacccuaaugcuaaccccaaugccaacccuaaugccaaccccaaugcuaacccgaaugcgaacccuaacgccaaucccaacgcuaauccuaacgccaaucccaacgccaauccuaacgcuaaucccaacgccaauccgaacgcgaauccuaacgcuaaucccaacgccaaucccaacgccaacccuaaugcuaacccgaaugccaaccccaaugcuaacccuaaugccaaccccaaugcgaacccuaaugccaaccccaaugcuaacccuaaugccaaccccaacgcuaauccgaacgccaauccuaacgcgaaucccaacaaaaauaaccaggggaauggacaaggccauaacaugccuaaugaucccaacagaaauguggacgagaacgccaaugcuaacaacgccguuaagaauaacaauaacgaggaaccgagcgacaagcacauuacggaguaucucaaaaagauccaaaauucccugagcaccgaauggucuccuuguuccgugacaugcgggaacggcauucagguccggaucaaacccggaagcgcugggaagucuaaagaugagcuugacuacgaaaaugauauugagaagaaaaucuguaagauggagaagugcuccagcguguuuaacguugucaauucuuccaucggacugauuauggugcucagcuuccuguuucuuaacuga

SEQ ID NO: 4939 - RNA, 1305 nt, Artificial Sequence
  derived and/or modified CDS sequence (opt5) from Pf(YL864)__ADF48458.1__CSP
augagaaagcuggccauccucagcguguccucuuuccuguuugucgaggcucuuuuccaggaauaccaaugcuauggcagcuccucuaacacccggguucugaaugagcucaacuacgacaaugccgggacaaaccuguauaaugaacuugagaugaacuacuauggaaaacaggaaaauugguacagccugaagaaaaacucccgcucucucggcgagaaugaugacgggaacaauaacaauggagauaacggcagagaggggaaggacgaagauaaacgggacggaaauaacgaggauaacgaaaagcugcgcaagcccaaacacaagaaacugaagcagccuggcgacggcaauccggaucccaacgcgaauccuaacguggaccccaaugcuaacccuaauguggaucccaacgccaauccuaacgucgacccgaaugccaaccccaaugcuaacccuaaugccaaccccaacgcuaauccuaacgccaaucccaacgcgaauccgaacgccaauccuaacgcuaaucccaacgccaauccuaacgcuaaucccaacgccaaucccaacgcgaacccuaaugccaacccgaaugcuaaccccaaugccaacccuaauguggaucccaacgcuaauccuaacgccaaucccaacgccaauccgaacgcuaauccuaacgcgaaccccaaugccaacccuaaugcuaaccccaaugccaacccuaaugccaaccccaaugcuaacccgaaugccaacccuaaugcgaaccccaaugcuaaccccaaugccaacccuaacgccaauccgaacgcuaaucccaacgccaauccuaacgcuaaucccaacgccaauccuaacgcgaaucccaacgccaauccuaacgcuaaucccaacgccaacccgaaugcuaacccuaaugccaaccccaauaaaaacaaucaggggaacggacaaggccauaauaugccuaacgaccccaauagaaacguugacgagaaugcgaacgccaauaacgaugagaacaauaacaaugaggaaccgagcgacaagcacauugaacaguaucucaagaaaauccaguacucccugagcacggaguggucuccuugcuccgugaccugcgggaacggcauucagguccggaucaagcccggaagcgcugauaaaccuaaggaccaacuugauuacgaaaaugacauugagaaaaagaucuguaaaauggagaaguguucuuccguguuuaacguugugaauagcucuaucgggcugauuaugguccucuccuuccuguuucuuaacuga

SEQ ID NO: 4940 - RNA, 1299 nt, Artificial Sequence
  derived and/or modified CDS sequence (opt5) from Pf(838)__AAA29543.1__CSP
augaugagaaagcuggccauccucagcguguccucuuuccuguuugucgaggcucuuuuccaggaauaccagugcuauggcagcuccucuaacacccggguucugaaugagcucaacuacgacaaugccgggauuaaccuguauaaugaacuugagaugaacuacuauggaaaacaggaaaauugguacagccugaagaaaaacucccgcucucucggcgagaaugaugacgggaacaauaacaauggagauaacggcagagaggggaaggacgaagauaaacgggacggaaauaacgaggauaacgaaaagcugcgcaagcccaaacacaagaaacugaagcagccuggcgacggcaauccggaucccaacgcgaauccuaacguggaccccaaugcuaacccuaauguggaucccaacgccaauccuaacgucgacccgaaugccaaccccaaugcuaacccuaaugccaaccccaacgcuaauccuaacgccaaucccaacgcgaauccgaacgccaauccuaacgcuaaucccaacgccaauccuaacgcuaaucccaacgccaaucccaacgcgaacccuaaugccaacccgaaugcuaaccccaaugccaacccuaaugcuaaccccaaugccaacccuaaugccaaccccaaugcuaacccgaaugcgaacccuaacgccaaucccaacgcuaauccuaacgccaaucccaacgccaauccuaacgcuaaucccaacgccaauccgaacgcgaauccuaacgcuaaucccaacgccaaucccaacgccaacccuaaugcuaacccgaaugccaaccccaaugcuaacccuaaugccaaccccaaugcgaacccuaaugccaaccccaaugcuaacccuaaugccaaccccaacgcuaauccgaacgccaauccuaacaaaaauaaccaggggaauggacaaggccauaacaugcccaaugauccuaacagaaauguggacgagaacgcgaaugccaacaaugcuguuaagaacaacaauaacgaggaacccagcgacaagcacaucgagcaguaucucaaaaagauucaaaauucccugagcacagaauggucuccgugcuccgugacgugcgggaacggaauccagguccggauuaaaccuggcagcgccaauaagcccaaagaugagcuugacuacgaaaacgauaucgagaagaaaaucuguaagauggagaaguguucuuccguguuuaauguugugaacagcucuauugggcugaucaugguccucuccuuccuguuucuuaauuga

SEQ ID NO: 4941 - RNA, 1299 nt, Artificial Sequence
  derived and/or modified CDS sequence (opt5) from Pf(834a)__AAA29571.1__CSP
augaugagaaagcuggccauccucagcguguccucuuuccuguuugucgaggcucuuuuccaggaauaccaaugcuauggcagcuccucuaacacccggguucugaaugagcucaacuacgacaaugccgggauuaaccuguauaaugaacuugagaugaacuacuauggaaaacaggaaaauugguacagccugaagaaaaacucccgcucucucggcgagaaugaugacgggaacaauaacaauggagauaacggcagagaggggaaggacgaagauaaacgggacggaaauaacgaggauaacgaaaagcugcgcaagcccaaacacaagaaacugaagcagccuggcgacggcaauccggaucccaacgcgaauccuaacguggaccccaaugcuaacccuaauguggaucccaacgccaauccuaacgucgacccgaaugccaaccccaauguggauccuaacgcuaaucccaacgccaacccuaaugcuaaccccaaugccaacccgaaugcgaacccuaaugccaaccccaaugcuaacccuaaugccaaccccaaugcuaaccccaaugccaacccuaacgcgaauccgaacgccaaucccaacgcuaauccuaacgccaaucccaacgcuaauccuaacgccaaucccaacgccaauccgaacgcuaauccuaacgcgaaccccaaugccaacccuaaugcuaaccccaaugccaacccuaaugccaaccccaaugcuaacccgaaugccaacccuaaugcgaaccccaaugcuaaccccaaugccaacccuaacgccaauccgaacgcuaaucccaacgccaauccuaacgcuaaucccaacgccaauccuaacgcgaaucccaacgccaauccuaacgcuaaucccaacgccaacccgaaugcuaacccuaauaaaaacaaucaggggaacggacaaggccauaauaugcccaacgacccuaauagaaacguugacgagaaugccaacgcgaauaacgccgugaagaauaacaacaaugaggaacccagcgauaagcacaucgagcaguaucucaaaaagauucagaacucccugagcacagaauggucuccgugcuccgucacgugcgggaauggaauccaggugcggauuaaaccuggcagcgcuaacaagcccaaagacgagcuugauuacgaaaaugacaucgagaagaaaaucuguaagauggagaaguguucuuccguuuuuaacguggucaauagcucuauugggcugaucauggugcucuccuuccuguuucuuaacuga

SEQ ID NO: 4942 - RNA, 1299 nt, Artificial Sequence
  derived and/or modified CDS sequence (opt5) from Pf(India)__AAN87622.1__CSP
augaugagaaagcuggccauccucagcguguccucuuuccuguuugucgaggcucuuuuccaggaauaccaaugcuauggcagcuccucuaacacccggguucugaaugagcucaacuacgacaaugccgggacaaaccuguauaaugaacuugagaugaacuacuauggaaaacaggaaaauugguacagccugaagaaaaacucccgcucucucggcgagaaugaugacgggaacaauaacaauggagauaacggcagagaggggaaggacgaagauaaacgggacggaaauaacgaggauaacgaaaagcugcgcaagcccaaacacaagaaacugaagcagccugcggacggcaauccggaucccaacgcuaauccuaacguggaccccaaugccaacccuaaugccaaccccaaugcuaacccuaaugccaacccgaaugcuaaccccaaugccaacccuaacgcgaaucccaacgccaauccuaacgcuaaucccaacgccaauccgaacgcuaauccuaacgccaaucccaacguggauccuaaugcgaaccccaaugccaaccccaacgcuaauccuaacgccaauccgaacgcuaaucccaacgccaauccuaacgccaaucccaacgcuaauccuaacgcgaaucccaacgccaauccgaacgcuaacccuaaugccaaccccaaugccaacccuaaugcuaaccccaaugccaacccuaaugcgaaccccaaugcuaacccgaaugccaacccuaaugccaaccccaaugcuaaccccaacgccaauccuaacgcuaauccgaacgccaaucccaacgcgaauccuaacgccaaucccaacgcuaauccuaacgccaaucccaacgcuaauccuaacgccaaccccaaugcgaacccgaaugccaacccuaauaaaaacaaucagggcaacgggcaaggacauaauaugcccaacgacccuaauagaaacgucgaugagaaugcuaacgccaauaacgcugugaagaacaauaacaaugaggaacccagcgacaagcacauugagcaguaucucaaaaagauccagaacucccugagcacggaauggucuccgugcuccguuaccugcggcaaugggauucaggugcggaucaaaccuggaagcgccaacaagcccaaagacgagcuugauuacgaaaaugacauugagaagaaaaucuguaagauggagaaguguucuuccgucuuuaacgugguuaauagcucuaucggccugauuauggugcucuccuuccuguuucuuaacuga

SEQ ID NO: 4943 - RNA, 1299 nt, Artificial Sequence
  derived and/or modified CDS sequence (opt5) from Pf(PFS31)__BAN59407.1__CSP
augaugagaaagcuggccauccucagcguguccucuuuccuguuugucgaggcucuuuuccaggaauaccagugcuauggcagcuccucuaacacccggguucugaaugagcucaacuacgacaaugccgggacaaaccuguauaaugaacuugagaugaacuacuauggaaaacaggaaaauugguacagccugaagaaaaacucccgcucucucggcgagaaugaugacgggaacaauaacaauggagauaacggcagagaggggaaggacgaagauaaacgggacggaaauaacgaggauaacgaaaagcugcgcaagcccaaacacaagaaacugaagcagccuggcgacggcaauccggaucccaacgcgaauccuaacguggaccccaaugcuaacccuaauguggaucccaacgccaauccuaacgucgacccgaaugccaaccccaaugcuaacccuaaugccaaccccaacgcuaauccuaacgccaaucccaacgcgaauccgaacgccaauccuaacgcuaaucccaacgccaauccuaacgcuaaucccaacgccaaucccaacgcgaacccuaaugccaacccgaaugcuaaccccaaugccaacccuaaugcuaaccccaaugccaacccuaaugccaaccccaaugcuaacccgaaugcgaacccuaacgccaaucccaacgcuaauccuaacgccaaucccaacgccaauccuaacgcuaaucccaacgccaauccgaacgcgaauccuaacgcuaaucccaacgccaaucccaacgccaacccuaaugcuaacccgaaugccaaccccaaugcuaacccuaaugccaaccccaaugcgaacccuaaugccaaccccaaugcuaacccuaaugccaaccccaacgcuaauccgaacgccaauccuaacaaaaauaaccaggggaauggacaaggccauaacaugcccaaugauccuaacagaaauguggacgagaacgcgaaugccaacaaugacguuaagaacaacaauaacgaggaacccagcgauaagcacauugaggaauaucucaaaaagauccaaaauucccugagcacggaguggucuccgugcuccgugaccugcgggaacggcauucagguccggaucaaaccuggaagcgcuaauaagcccaaagacgaacuuaacuacgagaaugauauugagaagaaaaucuguaagauggaaaaguguucuuccguguuuaacguugugaauagcucuaucgggcugauuaugguccucuccuuccuguuucuuaacuga

SEQ ID NO: 4944 - RNA, 1299 nt, Artificial Sequence
  derived and/or modified CDS sequence (opt5) from Pf(PNG912-070)__BAM85010.1__CSP
augaugagaaagcuggccauccucagcguguccucuuuccuguuugucgaggcucuuuuccaggaauaccaaugcuauggcagcuccucuaacacccggguucugaaugagcucaacuacgacaaugccgggacaaaccuguauaaugaacuugagaugaacuacuauggaaaacaggaaaauugguacagccugaagaaaaacucccgcucucucggcgagaaugaugacgggaacaauaacaauggagauaacggcagagaggggaaggacgaagauaaacgggacggaaauaacgaggauaacgaaaagcugcgcaagcccaaacacaagaaacugaagcagccuguggacggcaauccggaucccaacgcgaauccuaacguggaccccaaugcuaacccuaaugucgaucccaacgccaauccuaacguggacccgaaugccaaccccaaugcuaacccuaaugccaaccccaacgcuaauccuaacgccaaucccaacgcgaauccgaacgccaauccuaacgcuaaucccaacgccaauccuaacgcuaaucccaacgccaaucccaacgcgaacccuaaugccaacccgaaugcuaaccccaaugccaacccuaaugcuaaccccaaugccaacccuaaugccaaccccaaugcuaacccgaaugcgaacccuaacgccaaucccaacgcuaauccuaacgccaaucccaacgccaauccuaacgcuaaucccaacgccaauccgaacgcgaauccuaacgcuaaucccaacgccaaucccaacgccaacccuaaugcuaacccgaaugccaaccccaaugcuaacccuaaugccaaccccaaugcgaacccuaaugccaaccccaaugcuaacccuaaugccaaccccaacgcuaauccgaacgccaauccuaacaaaaauaaccagggcaaugggcaaggacauaacaugcccaaugauccuaacagaaauguugacgagaacgcgaaugccaacaaugcugugaagaacaacaauaacgaggaacccagcgacaagcacauugagcaguaucucaaaaagauccaaaauucccugagcacggaauggucuccgugcuccgugaccugcggcaacgggauucagguccggaucaaaccuggaagcgccgauaagcccaaagaccagcuugauuacgagaaugacauugaaaagaaaaucuguaagauggagaaguguucuuccguuuuuaacguggucaauagcucuaucggccugauuauggugcucuccuuccuguuucuuaacuga

SEQ ID NO: 4945 - RNA, 1299 nt, Artificial Sequence
  derived and/or modified CDS sequence (opt5) from Pf(PVS20)__BAN59429.1__CSP
augaugagaaagcuggccauccucagcguguccucuuuccuguuugucgaggcucuuuuccaggaauaccagugcuauggcagcuccucuaacacccggguucugaaugagcucaacuacgacaaugccgggacaaaccuguauaaugaacuugagaugaacuacuauggaaaacaggaaaauugguacagccugaagaaaaacucccgcucucucggcgagaaugaugacgggaacaauaacaauggagauaacggcagagaggggaaggacgaagauaaacgggacggaaauaacgaggauaacgaaaagcugcgcaagcccaaacacaagaaacugaagcagccuggcgacggcaauccggaucccaacgcgaauccuaacguggaccccaaugcuaacccuaauguggaucccaacgccaauccuaacgucgacccgaaugccaaccccaaugcuaacccuaaugccaaccccaacgcuaauccuaacgccaaucccaacgcgaauccgaacgccaauccuaacgcuaaucccaacgccaauccuaacgcuaaucccaacgccaaucccaacgcgaacccuaaugccaacccgaaugcuaaccccaaugccaacccuaaugcuaaccccaaugccaacccuaaugccaaccccaaugcuaacccgaaugcgaacccuaacgccaaucccaacgcuaauccuaacgccaaucccaacgccaauccuaacgcuaaucccaacgccaauccgaacgcgaauccuaacgcuaaucccaacgccaaucccaacgccaacccuaaugcuaacccgaaugccaaccccaaugcuaacccuaaugccaaccccaaugcgaacccuaaugccaaccccaaugcuaacccuaaugccaaccccaacgcuaauccgaacgccaauccuaacaaaaauaaccaggggaauggacaaggccauaacaugcccaaugauccuaacagaaauguggacgagaacgcgaaugccaacaaugcuguuaagaacaacaauaacgaggaacccagcgacaagcacauugagcaguaucucaaaaagauccaaaauucccugagcacggaauggucuccgugcuccgugaccugcgggaacggcauucagguccggaucaaaccuggaagcgccaauaagcccaaagaugagcuugacuacgaaaacgauauugagaagaaaaucuguaagauggagaaguguucuuccguguuuaauguugugaacagcucuaucgggcugauuaugguccucuccuuccuguuucuuaauuga

SEQ ID NO: 4946 - RNA, 1299 nt, Artificial Sequence
  derived and/or modified CDS sequence (opt5) from Pf(Sol95-241)__BAM85085.1__CSP
augaugagaaagcuggccauccucagcguguccucuuuccuguuugucgaggcucuuuuccaggaauaccaaugcuauggcagcuccucuaacacccggguucugaaugagcucaacuacgacaaugccgggacaaaccuguauaaugaacuugagaugaacuacuauggaaaacaggaaaauugguacagccugaagaaaaacucccgcucucucggcgagaaugaugacgggaacaauaacaauggagauaacggcagagaggggaaggacgaagauaaacgggacggaaauaacgaggauaacgaaaagcugcgcaagcccaaacacaagaaacugaagcagccuggcgacggcaauccggaucccaacgcgaauccuaacguggaccccaaugcuaacccuaauguggaucccaacgccaauccuaacgucgacccgaaugccaaccccaauguggauccuaacgcuaaucccaacgccaacccuaaugcuaaccccaaugccaacccgaaugcgaacccuaaugccaaccccaaugcuaacccuaaugccaaccccaaugcuaaccccaaugccaacccuaacgcgaauccgaacgccaaucccaacgcuaauccuaacgccaaucccaacgcuaauccuaacgccaaucccaacgccaauccgaacgcuaauccuaacgcgaaccccaaugccaacccuaaugcuaaccccaaugccaacccuaaugccaaccccaaugcuaacccgaaugccaacccuaaugcgaaccccaaugcuaaccccaaugccaacccuaacgccaauccgaacgcuaaucccaacgccaauccuaacgcuaaucccaacgccaauccuaacgcgaaucccaacgccaauccuaacgcuaaucccaacgccaacccgaaugcuaacccuaauaaaaacaaucaggggaacggacaaggccauaauaugcccaacgacccuaauagaaacguugacgagaaugccaacgcgaauaacgccgugaagaauaacaacaaugaggaacccagcgauaagcacauugagcaguaucucaaaaagauccagaacucccugagcacggaauggucuccgugcuccgugaccugcgggaauggcauucagguccggaucaaaccuggaagcgcuaacaagcccaaagacgagcuugauuacgaaaaugacauugagaagaaaaucuguaagauggagaaguguucuuccguuuuuaacguggucaauagcucuaucgggcugauuauggugcucuccuuccuguuucuuaacuga

SEQ ID NO: 4947 - RNA, 1299 nt, Artificial Sequence
  derived and/or modified CDS sequence (opt5) from Pf(TiMS95-198)__BAM84895.1__CSP
augaugagaaagcuggccauccucagcguguccucuuuccuguuugucgaggcucuuuuccaggaauaccaaugcuauggcagcuccucuaacacccggguucugaaugagcucaacuacgacaaugccgggacaaaccuguauaaugaacuugagaugaacuacuauggaaaacaggaaaauugguacagccugaagaaaaacucccgcucucucggcgagaaugaugacgggaacaauaacaauggagauaacggcagagaggggaaggacgaagauaaacgggacggaaauaacgaggauaacgaaaagcugcgcaagcccaaacacaagaaacugaagcagccuggcgacggcaauccggaucccaacgcgaauccuaacguggaccccaaugcuaacccuaauguggaucccaacgccaauccuaacgucgacccgaaugccaaccccaaugcuaacccuaaugccaaccccaacgcuaauccuaacgccaaucccaacgcgaauccgaacgccaauccuaacgcuaaucccaacgccaauccuaacgcuaaucccaacgccaaucccaacgcgaacccuaaugccaacccgaaugcuaaccccaaugccaacccuaaugcuaaccccaaugccaacccuaaugccaaccccaaugcuaacccgaaugcgaacccuaacgccaaucccaacgcuaauccuaacgccaaucccaacgccaauccuaacgcuaaucccaacgccaauccgaacgcgaauccuaacgcuaaucccaacgccaaucccaacgccaacccuaaugcuaacccgaaugccaaccccaaugcuaacccuaaugccaaccccaaugcgaacccuaaugccaaccccaaugcuaacccuaaugccaaccccaacgcuaauccgaacgccaauccuaacaaaaauaaccaggggaauggacaaggccauaacaugcccaaugauccuaacagaaauguggacgagaacgcgaaugccaacaaugcuguuaagaacaacaauaacgaggaacccagcgacaagcacauugagcaguaucucaaaaauauccagaacucccugagcacggaauggucuccgugcuccgugaccugcgggaauggcauucagguccggaucaagccuggaagcgccaacaaacccaaggaugagcuugacuacgaaaaugauauugagaaaaagaucuguaaaauggagaaguguucuuccguguuuaacguugugaauagcucuaucgggcugauuaugguccucuccuuccuguuucuuaacuga

SEQ ID NO: 4948 - RNA, 1296 nt, Artificial Sequence
  derived and/or modified CDS sequence (opt5) from Pf(D164)__ACO49368.1__CSP
augagaaagcuggccauccucagcguguccucuuuccuguuugucgaggcucuuuuccaggaauaccaaugcuauggcagcuccucuaacacccggguucugaaugagcucaacuacgacaaugccgggacaaaccuguauaaugaacuugagaugaacuacuauggaaaacaggaaaauugguacagccugaagaaaaacucccgcucucucggcgagaaugaugacgggaacaauaacaauggagauaacggcagagaggggaaggacgaagauaaacgggacggaaauaacgaggauaacgaaaagcugcgcaagcccaaacacaagaaacugaagcagccuggcgacggcaauccggaucccaacgcgaauccuaacguggaccccaaugcuaacccuaauguggaucccaacgccaauccuaacgucgacccgaaugccaaccccaauguggauccuaacgcuaaucccaacgccaacccuaaugcuaaccccaaugccaacccgaaugcgaacccuaaugccaaccccaaugcuaacccuaaugccaaccccaaugcuaaccccaaugccaacccuaacgcgaauccgaacgccaaucccaacgcuaauccuaacgccaaucccaacgcuaauccuaacgccaaucccaacgccaauccgaacgcuaauccuaacgcgaaccccaaugccaacccuaaugcuaaccccaaugccaacccuaaugccaaccccaaugcuaacccgaaugccaacccuaaugcgaaccccaaugcuaaccccaaugccaacccuaacgccaauccgaacgcuaaucccaacgccaauccuaacgcuaaucccaacgccaauccuaacgcgaaucccaacgccaauccuaacgcuaaucccaacgccaacccgaaugcuaacccuaauaaaaacaaucaggggaacggacaaggccauaauaugcccaacgacccuaauagaaacguugacgagaaugccaacgcgaauaacgccgugaagaauaacaacaaugaggaacccagcgauaagcacauugagcaguaucucaaaaagauccagaacucccugagcacggaauggucuccgugcuccgugaccugcgggaauggcauucagguccggaucaaaccuggaagcgcuaacaagcccaaagacgagcuugauuacgaaaaugacauugagaagaaaaucuguaagauggagaaguguucuuccguuuuuaacguggucaauagcucuaucgggcugauuauggugcucuccuuccuguuucuuaacuga

SEQ ID NO: 4949 - RNA, 1296 nt, Artificial Sequence
  derived and/or modified CDS sequence (opt5) from Pf(E28)__ACO49378.1__CSP
augagaaagcuggccauccucagcguguccucuuuccuguuugucgaggcucuuuuccaggaauaccaaugcuauggcagcuccucuaacacccggguucugaaugagcucaacuacgacaaugccgggacaaaccuguauaaugaacuugagaugaacuacuauggaaaacaggaaaauugguacagccugaagaaaaacucccgcucucucggcgagaaugaugacgggaacaauaacaauggagauaacggcagagaggggaaggacgaagauaaacgggacggaaauaacgaggauaacgaaaagcugcgcaagcccaaacacaagaaacugaagcagccuggcgacggcaauccggaucccaacgcgaauccuaacguggaccccaaugcuaacccuaauguggaucccaacgccaauccuaacgucgacccgaaugccaaccccaaugcuaacccuaaugccaaccccaacgcuaauccuaacgccaaucccaacgcgaauccgaacgccaauccuaacgcuaaucccaacgccaauccuaacgcuaaucccaacgccaaucccaacgcgaacccuaaugccaacccgaaugcuaaccccaaugccaacccuaaugcuaaccccaaugccaacccuaaugccaaccccaaugcuaacccgaaugcgaacccuaacgccaaucccaacgcuaauccuaacgccaaucccaacgccaauccuaacgcuaaucccaacgccaauccgaacgcgaauccuaacgcuaaucccaacgccaaucccaacgccaacccuaaugcuaacccgaaugccaaccccaaugcuaacccuaaugccaaccccaaugcgaacccuaaugccaaccccaaugcuaacccuaaugccaaccccaacgcuaauccgaacgccaauccuaacaaaaauaaccaggggaauggacaaggccauaacaugcccaaugauccuaacagaaauguggacgagaacgcgaaugccaacaaugcuguuaagaacaacaauaacgaggaacccagcgacaagcacauugagcaguaucucaaaaauauccagaacucccugagcacggaauggucuccgugcuccgugaccugcgggaauggcauucagguccggaucaagccuggaagcgccaacaaacccaaggaugagcuugacuacgaaaaugauauugagaaaaagaucuguaaaauggagaaguguucuuccguguuuaacguugugaauagcucuaucgggcugauuaugguccucuccuuccuguuucuuaacuga

SEQ ID NO: 4950 - RNA, 1296 nt, Artificial Sequence
  derived and/or modified CDS sequence (opt5) from Pf(TM121)__ACO49457.1__CSP
augagaaagcuggccauccucagcguguccucuuuccuguuugucgaggcucuuuuccaggaauaccaaugcuauggcagcuccucuaacacccggguucugaaugagcucaacuacgacaaugccgggacaaaccuguauaaugaacuugagaugaacuacuauggaaaacaggaaaauugguacagccugaagaaaaacucccgcucucucggcgagaaugaugacgggaacaauaacaauggagauaacggcagagaggggaaggacgaagauaaacgggacggaaauaacgaggauaacgaaaagcugcgcaagcccaaacacaagaaacugaagcagccuggcgacggcaauccggaucccaacgcgaauccuaacguggaccccaaugcuaacccuaauguggaucccaacgccaauccuaacgucgacccgaaugccaaccccaaugcuaacccuaaugccaaccccaacgcuaauccuaacgccaaucccaacgcgaauccgaacgccaauccuaacgcuaaucccaacgccaauccuaacgcuaaucccaacgccaaucccaacgcgaacccuaaugccaacccgaaugcuaaccccaaugccaacccuaaugcuaaccccaaugccaacccuaaugccaaccccaaugcuaacccgaaugcgaacccuaacgccaaucccaacgcuaauccuaacgccaaucccaacgccaauccuaacgcuaaucccaacgccaauccgaacgcgaauccuaacgcuaaucccaacgccaaucccaacgccaacccuaaugcuaacccgaaugccaaccccaaugcuaacccuaaugccaaccccaaugcgaacccuaaugccaaccccaaugcuaacccuaaugccaaccccaacgcuaauccgaacgccaauccuaacaaaaauaaccaggggaauggacaaggccauaacaugcccaaugauccuaacagaaauguggacgagaacgcgaaugccaacaaugacguuaagaacaacaauaacgaggaacccagcgauaagcacauugagcaguaucucaaaaagauccaguacucccugagcacggaauggucuccgugcuccgugaccugcgggaauggcauucagguccggaucaaaccuggaagcgcuaacaagcccaaagacgagcuugauuacgaaaaugacauugagaagaaaaucuguaagauggagaaguguucuuccguguuuaacguugugaauagcucuaucgggcugauuaugguccucuccuuccuguuucuuaacuga

SEQ ID NO: 4951 - RNA, 1296 nt, Artificial Sequence
  derived and/or modified CDS sequence (opt5) from Pf(TM176)__ACO49467.1__CSP
augagaaagcuggccauccucagcguguccucuuuccuguuugucgaggcucuuuuccaggaauaccaaugcuauggcagcuccucuaacacccggguucugaaugagcucaacuacgacaaugccgggacaaaccuguauaaugaacuugagaugaacuacuauggaaaacaggaaaauugguacagccugaagaaaaacucccgcucucucggcgagaaugaugacgggaacaauaacaauggagauaacggcagagaggggaaggacgaagauaaacgggacggaaauaacgaggauaacgaaaagcugcgcaagcccaaacacaagaaacugaagcagccuggcgacggcaauccggaucccaacgcgaauccuaacguggaccccaaugcuaacccuaauguggaucccaacgccaauccuaacgucgacccgaaugccaaccccaaugcuaacccuaaugccaaccccaacgcuaauccuaacgccaaucccaacgcgaauccgaacgccaauccuaacgcuaaucccaacgccaauccuaacgcuaaucccaacgccaaucccaacgcgaacccuaaugccaacccgaaugcuaaccccaaugccaacccuaaugcuaaccccaaugccaacccuaaugccaaccccaaugcuaacccgaaugcgaacccuaacgccaaucccaacgcuaauccuaacgccaaucccaacgccaauccuaacgcuaaucccaacgccaauccgaacgcgaauccuaacgcuaaucccaacgccaaucccaacgccaacccuaaugcuaacccgaaugccaaccccaaugcuaacccuaaugccaaccccaaugcgaacccuaaugccaaccccaaugcuaacccuaaugccaaccccaacgcuaauccgaacgccaauccuaacaaaaauaaccaggggaauggacaaggccauaacaugcccaaugauccuaacagaaauguggacgagaacgcgaaugccaacaaugacguuaagaacaacaauaacgaggaacccagcgauaagcacauugagcaguaucucaaaaagauccaguacucccugagcacggaauggucuccgugcuccgugaccugcgggaauggcauucagguccggaucaaaccuggaagcgcugacaagcccaaagaucaacuugacuacgagaacgauauugaaaagaaaaucuguaagauggagaaguguucuuccguguuuaauguugugaacagcucuaucgggcugauuaugguccucuccuuccuguuucuuaauuga

SEQ ID NO: 4952 - RNA, 1296 nt, Artificial Sequence
  derived and/or modified CDS sequence (opt5) from Pf(TSY650)__ACO49541.1__CSP
augagaaagcuggccauccucagcguguccucuuuccuguuugucgaggcucuuuuccaggaauaccagugcuauggcagcuccucuaacacccggguucugaaugagcucaacuacgacaaugccgggacaaaccuguauaaugaacuugagaugaacuacuauggaaaacaggaaaauugguacagccugaagaaaaacucccgcucucucggcgagaaugaugacgggaacaauaacaauggagauaacggcagagaggggaaggacgaagauaaacgggacggaaauaacgaggauaacgaaaagcugcgcaagcccaaacacaagaaacugaagcagccuggcgacggcaauccggaucccaacgcgaauccuaacguggaccccaaugcuaacccuaauguggaucccaacgccaauccuaacgucgacccgaaugccaaccccaaugcuaacccuaaugccaaccccaacgcuaauccuaacgccaaucccaacgcgaauccgaacgccaauccuaacgcuaaucccaacgccaauccuaacgcuaaucccaacgccaaucccaacgcgaacccuaaugccaacccgaaugcuaaccccaaugccaacccuaaugcuaaccccaaugccaacccuaaugccaaccccaaugcuaacccgaaugcgaacccuaacgccaaucccaacgcuaauccuaacgccaaucccaacgccaauccuaacgcuaaucccaacgccaauccgaacgcgaauccuaacgcuaaucccaacgccaaucccaacgccaacccuaaugcuaacccgaaugccaaccccaaugcuaacccuaaugccaaccccaaugcgaacccuaaugccaaccccaaugcuaacccuaaugccaaccccaacgcuaauccgaacgccaauccuaacaaaaauaaccaggggaauggacaaggccauaacaugcccaaugauccuaacagaaauguggacgagaacgcgaaugccaacaaugcuguuaagaacaacaauaacgaggaacccagcgacaagcacauugagcaguaucucaaaaagauccaaaauucccugagcacggaauggucuccgugcuccgugaccugcgggaacggcauucagguccggaucaaaccuggaagcgccaauaagcccaaagaugagcuugacuacgaaaacgauauugagaagaaaaucuguaagauggagaaguguucuuccguguuuaauguugugaacagcucuaucgggcugauuaugguccucuccuuccuguuucuuaauuga

SEQ ID NO: 4953 - RNA, 1296 nt, Artificial Sequence
  derived and/or modified CDS sequence (opt5) from Pf(TSY682)__ACO49544.1__CSP
augagaaagcuggccauccucagcguguccucuuuccuguuugucgaggcucuuuuccaggaauaccagugcuauggcagcuccucuaacacccggguucugaaugagcucaacuacgacaaugccgggacaaaccuguauaaugaacuugagaugaacuacuauggaaaacaggaaaauugguacagccugaagaaaaacucccgcucucucggcgagaaugaugacgggaacaauaacaauggagauaacggcagagaggggaaggacgaagauaaacgggacggaaauaacgaggauaacgaaaagcugcgcaagcccaaacacaagaaacugaagcagccuggcgacggcaauccggaucccaacgcgaauccuaacguggaccccaaugcuaacccuaauguggaucccaacgccaauccuaacgucgacccgaaugccaaccccaaugcuaacccuaaugccaaccccaacgcuaauccuaacgccaaucccaacgcgaauccgaacgccaauccuaacgcuaaucccaacgccaauccuaacgcuaaucccaacgccaaucccaacgcgaacccuaaugccaacccgaaugcuaaccccaaugccaacccuaaugcuaaccccaaugccaacccuaaugccaaccccaaugcuaacccgaaugcgaacccuaacgccaaucccaacgcuaauccuaacgccaaucccaacgccaauccuaacgcuaaucccaacgccaauccgaacgcgaauccuaacgcuaaucccaacgccaaucccaacgccaacccuaaugcuaacccgaaugccaaccccaaugcuaacccuaaugccaaccccaaugcgaacccuaaugccaaccccaaugcuaacccuaaugccaaccccaacgcuaauccgaacgccaauccuaacaaaaauaaccaggggaauggacaaggccauaacaugcccaaugauccuaacagaaauguggacgagaacgcgaaugccaacaaugacguuaagaacaacaauaacgaggaacccagcgauaagcacauugaggaauaucucaaaaagauccaaaauucccugagcacggaguggucuccgugcuccgugaccugcgggaacggcauucagguccggaucaaaccuggaagcgcuaauaagcccaaagacgaacuuaacuacgagaaugauauugagaagaaaaucuguaagauggaaaaguguucuuccguguuuaacguugugaauagcucuaucgggcugauuaugguccucuccuuccuguuucuuaacuga

SEQ ID NO: 4954 - RNA, 1287 nt, Artificial Sequence
  derived and/or modified CDS sequence (opt5) from Pf(India)__AAN87575.1__CSP
augaugagaaagcuggccauccucagcguguccucuuuccuguuugucgaggcucuuuuccaggaauaccaaugcuauggcagcuccucuaacacccggguucugaaugagcucaacuacgacaaugccgggacaaaccuguauaaugaacuugagaugaacuacuauggaaaacaggaaaauugguacagccugaagaaaaacucccgcucucucggcgagaaugaugacgggaacaauaacaauggagauaacggcagagaggggaaggacgaagauaaacgggacggaaauaacgaggauaacgaaaagcugcgcaagcccaaacacaagaaacugaagcagccuggcgacggcaauccggaucccaacgcgaauccuaacguggaccccaaugcuaacccuaauguggaucccaacgccaauccuaacgccaauccgaacgcuaaucccaacgccaauccuaacgcuaaccccaaugccaacccuaaugcgaaccccaaugccaacccgaaugcuaacccuaaugccaaccccaaugcuaacccuaaugccaaccccaaugcgaaccccaacgccaauccuaacgcuaauccgaacgccaaucccaacgcuaauccuaacgccaaucccaacgccaauccuaacgcuaaucccaacgcgaauccgaacgccaacccuaaugcuaaccccaaugccaacccuaaugccaaccccaaugcuaacccuaaugccaaccccaaugcgaacccgaaugcuaacccuaaugccaaccccaaugccaaccccaacgcuaauccuaacgccaauccgaacgcuaaucccaacgccaauccuaacgcgaaucccaacgccaauccuaacgcuaaucccaacgccaauccuaacgcuaaccccaaugccaacccgaauaaaaacaaucaggggaacggaagaggccauaauaugccuaacgaccccaaucggaacgucgaugagaaugcgaacgccaauaacgacgugaagaauaacaacaaugaggaaccuagcgacaagcacauugaggaauaucucaaaaagauccaaaacucccugagcacggaguggucucccugcuccguuaccugcgggaauggcauucaggugcgcaucaaaccgggaagcgcuaacaagccuaaagaugaacuuaauuacgagaacgacauugagaagaaaaucuguaagauggaaaaguguucuuccgucuuuaaugugguuaacagcucuaucgggcugauuauggugcucuccuuccuguuucuuaauuga

SEQ ID NO: 4955 - RNA, 1287 nt, Artificial Sequence
  derived and/or modified CDS sequence (opt5) from Pf(Pal97-082)__BAM84946.1__CSP
augaugagaaagcuggccauccucagcguguccucuuuccuguuugucgaggcucuuuuccaggaauaccaaugcuauggcagcuccucuaacacccggguucugaaugagcucaacuacgacaaugccgggacaaaccuguauaaugaacuugagaugaacuacuauggaaaacaggaaaauugguacagccugaagaaaaacucccgcucucucggcgagaaugaugacgggaacaauaacaauggagauaacggcagagaggggaaggacgaagauaaacgggacggaaauaacgaggauaacgaaaagcugcgcaagcccaaacacaagaaacugaagcagccuggcgacggcaauccggaucccaacgcgaauccuaacguggaccccaaugcuaacccuaauguggaucccaacgccaauccuaacgucgacccgaaugccaaccccaaugcuaacccuaaugccaaccccaacgcuaauccuaacgccaaucccaacgcgaauccgaacgccaauccuaacgcuaaucccaacgccaauccuaacgcuaaucccaacgccaaucccaacgcgaacccuaaugccaacccgaaugcuaaccccaaugccaacccuaaugcuaaccccaaugccaacccuaaugccaaccccaaugcuaacccgaauguggauccuaacgcgaaccccaaugccaacccuaaugcuaaccccaaugccaacccuaaugccaaccccaaugcuaacccgaaugccaacccuaaugcgaaccccaaugcuaaccccaaugccaacccuaacgccaauccgaacgcuaaucccaacgccaauccuaacgcuaaucccaacgccaauccuaacgcgaaucccaacgccaauccuaacgcuaaucccaacgccaacccgaauaaaaacaaucaggggaacggacaaggccauaauaugccuaacgaccccaauagaaacguugacgagaaugcuaacgccaauaacgcggugaagaauaacaauaacgaggaaccuagcgauaagcacauugagcaguaucucaaaaagauccagaacucccugagcacggaauggucucccuguuccgugaccugcgggaauggcauucagguccggaucaaaccgggaagcgccgggaagucuaaagacgagcuugauuacgaaaacgacauugagaagaaaaucuguaagauggagaagugcuccagcguuuuuaauguggucaacucuuccaucggacugauuauggugcucagcuuccuguuucuuaauuga

SEQ ID NO: 4956 - RNA, 1287 nt, Artificial Sequence
  derived and/or modified CDS sequence (opt5) from Pf(Pal97-084)__BAM84947.1__CSP
augaugagaaagcuggccauccucagcguguccucuuuccuguuugucgaggcucuuuuccaggaauaccaaugcuauggcagcuccucuaacacccggguucugaaugagcucaacuacgacaaugccgggacaaaccuguauaaugaacuugagaugaacuacuauggaaaacaggaaaauugguacagccugaagaaaaacucccgcucucucggcgagaaugaugacgggaacaauaacaauggagauaacggcagagaggggaaggacgaagauaaacgggacggaaauaacgaggauaacgaaaagcugcgcaagcccaaacacaagaaacugaagcagccuggcgacggcaauccggaucccaacgcgaauccuaacguggaccccaaugcuaacccuaauguggaucccaacgccaauccuaacgucgacccgaaugccaaccccaaugcuaacccuaaugccaaccccaacgcuaauccuaacgccaaucccaacgcgaauccgaacgccaauccuaacgcuaaucccaacgccaauccuaacgcuaaucccaacgccaaucccaacgcgaacccuaaugccaacccgaaugcuaaccccaaugccaacccuaaugcuaaccccaaugccaacccuaaugccaaccccaaugcuaacccgaaugcgaacccuaacgccaaucccaacgcuaauccuaacgccaaucccaacgccaauccuaacgcuaaucccaacgccaauccgaacgcgaauccuaacgcuaaucccaacgccaaucccaacgccaacccuaaugcuaacccgaaugccaaccccaaugcuaacccuaaugccaaccccaaugcgaacccuaaugccaaccccaaugcuaacccuaaugccaaccccaacgcuaauccgaacaaaaauaaccaggggaauggacaaggccauaacaugccuaaugaucccaacagaaauguggacgagaacgccaaugcgaacaaugccguuaagaacaauaacaacgaggaaccuagcgaccagcacauugagaaguaucucaaaaucauucaaaauucccugagcacggaauggucucccugcuccgugaccugcgggaacggaauccagguccggauuaagccgggcagcgcugauaaaccuaaggaccagcuugauuacgccaaugacaucgagaaaaagaucuguaaaauggaaaaguguucuuccguguuuaacguugugaauagcucuauugggcugaucaugguccucuccuuccuguuucuuaacuga

SEQ ID NO: 4957 - RNA, 1287 nt, Artificial Sequence
  derived and/or modified CDS sequence (opt5) from Pf(PFS54)__BAN59412.1__CSP
augaugagaaagcuggccauccucagcguguccucuuuccuguuugucgaggcucuuuuccaggaauaccaaugcuauggcagcuccucuaacacccggguucugaaugagcucaacuacgacaaugccgggacaaaccuguauaaugaacuugagaugaacuacuauggaaaacaggaaaauugguacagccugaagaaaaacucccgcucucucggcgagaaugaugacgggaacaauaacaauggagauaacggcagagaggggaaggacgaagauaaacgggacggaaauaacgaggauaacgaaaagcugcgcaagcccaaacacaagaaacugaagcagccuggcgacgauaauccggaccccaacgcgaauccuaacguggaucccaaugcuaacccuaauguggaccccaacgccaauccuaacgccaauccgaacgcuaaucccaacgccaauccuaacgcuaaccccaaugccaacccuaaugcgaaccccaaugccaacccgaaugcuaacccuaaugccaaccccaaugcuaacccuaaugccaaccccaaugcgaaccccaacgccaauccuaacgucgauccgaaugcuaaccccaaugccaacccuaaugcuaaccccaaugccaacccuaaugccaaccccaaugcuaacccgaaugcgaacccuaacgccaaucccaacgcuaauccuaacgccaaucccaacgccaauccuaacgcuaaucccaacgccaauccgaacgcgaauccuaacgcuaaucccaacgccaaucccaacgccaacccuaaugcuaacccgaaugccaaccccaaugcuaacccuaaugccaaccccaaugcgaacccuaaugccaaccccaaugcuaacccuaaugccaaccccaacgcuaauccgaacaaaaauaaccagggcaaugggcaaggacauaacaugccuaaugaccccaacagaaauguggacgagaacgccaaugcgaacaaugccguuaagaacaauaacaacgaggaaccuagcgauaagcacauugagcaguaucucaaaaagauccaguacucccugagcacggaauggucucccugcuccgugaccugcggcaaugggauucagguccggaucaaaccgggaagcgcugacaagccuaaagaucaacuugacuacgagaacgauauugaaaagaaaaucuguaagauggagaaguguucuuccguguuuaauguugugaacagcucuaucggccugauuaugguccucuccuuccuguuucuuaauuga

SEQ ID NO: 4958 - RNA, 1287 nt, Artificial Sequence
  derived and/or modified CDS sequence (opt5) from Pf(PFS79)__BAN59422.1__CSP
augaugagaaagcuggccauccucagcguguccucuuuccuguuugucgaggcucuuuuccaggaauaccagugcuauggcagcuccucuaacacccggguucugaaugagcucaacuacgacaaugccgggacaaaccuguauaaugaacuugagaugaacuacuauggaaaacaggaaaauugguacagccugaagaaaaacucccgcucucucggcgagaaugaugacgggaacaauaacaauggagauaacggcagagaggggaaggacgaagauaaacgggacggaaauaacgaggauaacgaaaagcugcgcaagcccaaacacaagaaacugaagcagccuggcgacggcaauccggaucccaacgcgaauccuaacguggaccccaaugcuaacccuaauguggaucccaacgccaauccuaacgucgacccgaaugccaaccccaaugcuaacccuaaugccaaccccaacgcuaauccuaacgccaaucccaacgcgaauccgaacgccaauccuaacgcuaaucccaacgccaauccuaacgcuaaucccaacgccaaucccaacgcgaacccuaaugccaacccgaaugcuaaccccaaugccaacccuaaugcuaaccccaaugccaacccuaaugccaaccccaaugcuaacccgaaugcgaacccuaacgccaaucccaacgcuaauccuaacgccaaucccaacgccaauccuaacgcuaaucccaacgccaauccgaacgcgaauccuaacgcuaaucccaacgccaaucccaacgccaacccuaaugcuaacccgaaugccaaccccaaugcuaacccuaaugccaaccccaaugcgaacccuaaugccaaccccaaugcuaacccuaaugccaaccccaacgcuaauccgaacaaaaauaaccaggggaauggacaaggccauaacaugccuaaugaucccaacagaaauguggacgagaacgccaaugcgaacaaugccguuaagaacaauaacaacgaggaaccuagcgacaagcacauugagcaguaucucaaaaagauccaaaauucccugagcacggaauggucucccugcuccgugaccugcgggaacggcauucagguccggaucaaaccgggaagcgcuaauaagccuaaagaugagcuugacuacgaaaacgauauugagaagaaaaucuguaagauggagaaguguucuuccguguuuaauguugugaacagcucuaucgggcugauuaugguccucuccuuccuguuucuuaauuga

SEQ ID NO: 4959 - RNA, 1287 nt, Artificial Sequence
  derived and/or modified CDS sequence (opt5) from Pf(PFS83)__BAN59424.1__CSP
augaugagaaagcuggccauccucagcguguccucuuuccuguuugucgaggcucuuuuccaggaauaccaaugcuauggcagcuccucuaacacccggguucugaaugagcucaacuacgacaaugccgggacaaaccuguauaaugaacuugagaugaacuacuauggaaaacaggaaaauugguacagccugaagaaaaacucccgcucucucggcgagaaugaugacgggaacaauaacaauggagauaacggcagagaggggaaggacgaagauaaacgggacggaaauaacgaggauaacgaaaagcugcgcaagcccaaacacaagaaacugaagcagccuggcgacggcaauccggaucccaacgcgaauccuaacguggaccccaaugcuaacccuaauguggaucccaacgccaauccuaacgucgacccgaaugccaaccccaauguggauccuaacgcuaaucccaacgccaacccuaaugcuaaccccaaugccaacccgaaugcgaacccuaaugccaaccccaaugcuaacccuaaugccaaccccaaugcuaaccccaaugccaacccuaacgcgaauccgaacgccaaucccaacgcuaauccuaacgccaaucccaacgcuaauccuaacgccaaucccaacgccaauccgaacgcuaauccuaacgcgaaccccaaugccaacccuaaugcuaaccccaaugccaacccuaaugccaaccccaaugcuaacccgaaugccaacccuaaugcgaaccccaaugcuaaccccaaugccaacccuaacgccaauccgaacgcuaaucccaacgccaauccuaacgcuaaucccaacgccaauccuaacgcgaaucccaacgccaauccuaacgcuaaucccaacgccaacccgaauaaaaacaaucaggggaacggacaaggccauaauaugccuaacgaccccaauagaaacguugacgagaaugcuaacgccaauaacgcggugaagaauaacaauaacgaggaaccuagcgauaagcacauugagcaguaucucaaaaagauccagaacucccugagcacggaauggucucccugcuccgugaccugcgggaauggcauucagguccggaucaaaccgggaagcgccaacaagccuaaagacgagcuugauuacgaaaaugacauugagaagaaaaucuguaagauggagaaguguucuuccguuuuuaacguggucaauagcucuaucgggcugauuauggugcucuccuuccuguuucuuaacuga

SEQ ID NO: 4960 - RNA, 1287 nt, Artificial Sequence
  derived and/or modified CDS sequence (opt5) from Pf(TiMS95-112)__BAM84878.1__CSP
augaugagaaagcuggccauccucagcguguccucuuuccuguuugucgaggcucuuuuccaggaauaccaaugcuauggcagcuccucuaacacccggguucugaaugagcucaacuacgacaaugccgggacaaaccuguauaaugaacuugagaugaacuacuauggaaaacaggaaaauugguacagccugaagaaaaacucccgcucucucggcgagaaugaugacgggaacaauaacaauggagauaacggcagagaggggaaggacgaagauaaacgggacggaaauaacgaggauaacgaaaagcugcgcaagcccaaacacaagaaacugaagcagccuggcgacggcaauccggaucccaacgcgaauccuaacguggaccccaaugcuaacccuaauguggaucccaacgccaauccuaacgucgacccgaaugccaaccccaaugcuaacccuaaugccaaccccaacgcuaauccuaacgccaaucccaacgcgaauccgaacgccaauccuaacgcuaaucccaacgccaauccuaacgcuaaucccaacgccaaucccaacgcgaacccuaaugccaacccgaaugcuaaccccaaugccaacccuaaugcuaaccccaaugccaacccuaaugccaaccccaaugcuaacccgaaugcgaacccuaacgccaaucccaacgcuaauccuaacgccaaucccaacgccaauccuaacgcuaaucccaacgccaauccgaacgcgaauccuaacgcuaaucccaacgccaaucccaacgccaacccuaaugcuaacccgaaugccaaccccaaugcuaacccuaaugccaaccccaaugcgaacccuaaugccaaccccaaugcuaacccuaaugccaaccccaacgcuaauccgaacaaaaauaaccaggggaauggacaaggccauaacaugccuaaugaucccaacagaaauguggacgagaacgccaaugcgaacaaugacguuaagaacaauaacaacgaggaaccuagcgauaagcacauugagcaguaucucaaaaagauccaguacucccugagcacggaauggucucccugcuccgugaccugcgggaauggcauucagguccggaucaaaccgggaagcgccgacaagccuaaagaucaacuugacuacgagaacgauauugaaaagaaaaucuguaagauggagaaguguucuuccguguuuaauguugugaacagcucuaucgggcugauuaugguccucuccuuccuguuucuuaauuga

SEQ ID NO: 4961 - RNA, 1284 nt, Artificial Sequence
  derived and/or modified CDS sequence (opt5) from Pf(E103)__ACO49384.1__CSP
augagaaagcuggccauccucagcguguccucuuuccuguuugucgaggcucuuuuccaggaauaccaaugcuauggcagcuccucuaacacccggguucugaaugagcucaacuacgacaaugccgggacaaaccuguauaaugaacuugagaugaacuacuauggaaaacaggaaaauugguacagccugaagaaaaacucccgcucucucggcgagaaugaugacgggaacaauaacaauggagauaacggcagagaggggaaggacgaagauaaacgggacggaaauaacgaggauaacgaaaagcugcgcaagcccaaacacaagaaacugaagcagccuggcgacggcaauccggaucccaacgcgaauccuaacguggaccccaaugcuaacccuaauguggaucccaacgccaauccuaacgucgacccgaaugccaaccccaaugcuaacccuaaugccaaccccaacgcuaauccuaacgccaaucccaacgcgaauccgaacgccaauccuaacgcuaaucccaacgccaauccuaacgcuaaucccaacgccaaucccaacgcgaacccuaaugccaacccgaaugcuaaccccaaugccaacccuaaugcuaaccccaaugccaacccuaaugccaaccccaaugcuaacccgaaugcgaacccuaacgccaaucccaacgcuaauccuaacgccaaucccaacgccaauccuaacgcuaaucccaacgccaauccgaacgcgaauccuaacgcuaaucccaacgccaaucccaacgccaacccuaaugcuaacccgaaugccaaccccaaugcuaacccuaaugccaaccccaaugcgaacccuaaugccaaccccaaugcuaacccuaaugccaaccccaacgcuaauccgaacaaaaauaaccaggggaauggacaaggccauaacaugccuaaugaucccaacagaaauguggacgagaacgccaaugcgaacaaugccguuaagaacaauaacaacgaggaaccuagcgacaagcacauugagcaguaucucaaaaauauccagaacucccugagcacggaauggucucccugcuccgugaccugcgggaauggcauucagguccggaucaagccgggaagcgcuaacaaaccuaaggaugagcuugacuacgaaaaugauauugagaaaaagaucuguaaaauggagaaguguucuuccguguuuaacguugugaauagcucuaucgggcugauuaugguccucuccuuccuguuucuuaacuga

SEQ ID NO: 4962 - RNA, 1284 nt, Artificial Sequence
  derived and/or modified CDS sequence (opt5) from Pf(TMS75)__ACO49490.1__CSP
augagaaagcuggccauccucagcguguccucuuuccuguuugucgaggcucuuuuccaggaauaccaaugcuauggcagcuccucuaacacccggguucugaaugagcucaacuacgacaaugccgggacaaaccuguauaaugaacuugagaugaacuacuauggaaaacaggaaaauugguacagccugaagaaaaacucccgcucucucggcgagaaugaugacgggaacaauaacaauggagauaacggcagagaggggaaggacgaagauaaacgggacggaaauaacgaggauaacgaaaagcugcgcaagcccaaacacaagaaacugaagcagccuggcgacggcaauccggaucccaacgcgaauccuaacguggaccccaaugcuaacccuaauguggaucccaacgccaauccuaacgucgacccgaaugccaaccccaauguggauccuaacgcuaaucccaacgccaacccuaaugcuaaccccaaugccaacccgaaugcgaacccuaaugccaaccccaaugcuaacccuaaugccaaccccaaugcuaaccccaaugccaacccuaacgcgaauccgaacgccaaucccaacgcuaauccuaacgccaaucccaacgcuaauccuaacgccaaucccaacgccaauccgaacgcuaauccuaacgcgaaccccaaugccaacccuaaugcuaaccccaaugccaacccuaaugccaaccccaaugcuaacccgaaugccaacccuaaugcgaaccccaaugcuaaccccaaugccaacccuaacgccaauccgaacgcuaaucccaacgccaauccuaacgcuaaucccaacgccaauccuaacgcgaaucccaacgccaauccuaacgcuaaucccaacgccaacccgaauaaaaacaaucaggggaacggacaaggccauaauaugccuaacgaccccaauagaaacguugacgagaaugcuaacgccaauaacgcggugaagaauaacaauaacgaggaaccuagcgauaagcacauugagcaguaucucaaaaagauccagaacucccugagcacggaauggucucccugcuccgugaccugcgggaauggcauucagguccggaucaaaccgggaagcgccaacaagccuaaagacgagcuugauuacgaaaaugacauugagaagaaaaucuguaagauggagaaguguucuuccguuuuuaacguggucaauagcucuaucgggcugauuauggugcucuccuuccuguuucuuaacuga

SEQ ID NO: 4963 - RNA, 1284 nt, Artificial Sequence
  derived and/or modified CDS sequence (opt5) from Pf(TSY621)__ACO49538.1__CSP
augagaaagcuggccauccucagcguguccucuuuccuguuugucgaggcucuuuuccaggaauaccaaugcuauggcagcuccucuaacacccggguucugaaugagcucaacuacgacaaugccgggacaaaccuguauaaugaacuugagaugaacuacuauggaaaacaggaaaauugguacagccugaagaaaaacucccgcucucucggcgagaaugaugacgggaacaauaacaauggagauaacggcagagaggggaaggacgaagauaaacgggacggaaauaacgaggauaacgaaaagcugcgcaagcccaaacacaagaaacugaagcagccuggcgacggcaauccggaucccaacgcgaauccuaacguggaccccaaugcuaacccuaauguggaucccaacgccaauccuaacgucgacccgaaugccaaccccaaugcuaacccuaaugccaaccccaacgcuaauccuaacgccaaucccaacgcgaauccgaacgccaauccuaacgcuaaucccaacgccaauccuaacgcuaaucccaacgccaaucccaacgcgaacccuaaugccaacccgaaugcuaaccccaaugccaacccuaaugcuaaccccaaugccaacccuaaugccaaccccaaugcuaacccgaaugcgaacccuaacgccaaucccaacgcuaauccuaacgccaaucccaacgccaauccuaacgcuaaucccaacgccaauccgaacgcgaauccuaacgcuaaucccaacgccaaucccaacgccaacccuaaugcuaacccgaaugccaaccccaaugcuaacccuaaugccaaccccaaugcgaacccuaaugccaaccccaaugcuaacccuaaugccaaccccaacgcuaauccgaacaaaaauaaccaggggaauggacaaggccauaacaugccuaaugaucccaacagaaauguggacgagaacgccaaugcgaacaaugacguuaagaacaauaacaacgaggaaccuagcgauaagcacauugagcaguaucucaaaaagauccaguacucccugagcacggaauggucucccugcuccgugaccugcgggaauggcauucagguccggaucaaaccgggaagcgccgacaagccuaaagaucaacuugacuacgagaacgauauugaaaagaaaaucuguaagauggagaaguguucuuccguguuuaauguugugaacagcucuaucgggcugauuaugguccucuccuuccuguuucuuaauuga

SEQ ID NO: 4964 - RNA, 1284 nt, Artificial Sequence
  derived and/or modified CDS sequence (opt5) from Pf(TSY646)__ACO49540.1__CSP
augagaaagcuggccauccucagcguguccucuuuccuguuugucgaggcucuuuuccaggaauaccagugcuauggcagcuccucuaacacccggguucugaaugagcucaacuacgacaaugccgggacaaaccuguauaaugaacuugagaugaacuacuauggaaaacaggaaaauugguacagccugaagaaaaacucccgcucucucggcgagaaugaugacgggaacaauaacaauggagauaacggcagagaggggaaggacgaagauaaacgggacggaaauaacgaggauaacgaaaagcugcgcaagcccaaacacaagaaacugaagcagccuggcgacggcaauccggaucccaacgcgaauccuaacguggaccccaaugcuaacccuaauguggaucccaacgccaauccuaacgucgacccgaaugccaaccccaaugcuaacccuaaugccaaccccaacgcuaauccuaacgccaaucccaacgcgaauccgaacgccaauccuaacgcuaaucccaacgccaauccuaacgcuaaucccaacgccaaucccaacgcgaacccuaaugccaacccgaaugcuaaccccaaugccaacccuaaugcuaaccccaaugccaacccuaaugccaaccccaaugcuaacccgaaugcgaacccuaacgccaaucccaacgcuaauccuaacgccaaucccaacgccaauccuaacgcuaaucccaacgccaauccgaacgcgaauccuaacgcuaaucccaacgccaaucccaacgccaacccuaaugcuaacccgaaugccaaccccaaugcuaacccuaaugccaaccccaaugcgaacccuaaugccaaccccaaugcuaacccuaaugccaaccccaacgcuaauccgaacaaaaauaaccaggggaauggacaaggccauaacaugccuaaugaucccaacagaaauguggacgagaacgccaaugcgaacaaugccguuaagaacaauaacaacgaggaaccuagcgacaagcacauugagcaguaucucaaaaagauccaaaauucccugagcacggaauggucucccugcuccgugaccugcgggaacggcauucagguccggaucaaaccgggaagcgcuaauaagccuaaagaugagcuugacuacgaaaacgauauugagaagaaaaucuguaagauggagaaguguucuuccguguuuaauguugugaacagcucuaucgggcugauuaugguccucuccuuccuguuucuuaauuga

SEQ ID NO: 4965 - RNA, 1275 nt, Artificial Sequence
  derived and/or modified CDS sequence (opt5) from Pf(806)__AAA29562.1__CSP
augaugagaaagcuggccauccucagcguguccucuuuccuguuugucgaggcucuuuuccaggaauaccaaugcuauggcagcuccucuaacacccggguucugaaugagcucaacuacgacaaugccgggauuaaccuguauaaugaacuugagaugaacuacuauggaaaacaggaaaauugguacagccugaagaaaaacucccgcucucucggcgagaaugaugacgggaacaauaacaauggagauaacggcagagaggggaaggacgaagauaaacgggacggaaauaacgaggauaacgaaaagcugcgcaagcccaaacacaagaaacugaagcagccuggcgacggcaauccggaucccaacgcgaauccuaacguggaccccaaugcuaacccuaauguggaucccaacgccaauccuaacgucgacccgaaugccaaccccaaugcuaacccuaaugccaaccccaacgcuaauccuaacgccaaucccaacgcgaauccgaacgccaauccuaacgcuaaucccaacgccaauccuaacgcuaaucccaacgccaaucccaacgcgaacccuaaugccaacccgaaugcuaaccccaaugccaacccuaaugcuaaccccaaugccaacccuaaugccaaccccaaugcuaacccgaaugcgaacccuaacgccaaucccaacgcuaauccuaacgccaaucccaacgccaauccuaacgcuaaucccaacgccaauccgaacgcgaauccuaacgcuaaucccaacgccaaucccaacgccaacccuaaugcuaacccgaaugccaaccccaaugcuaacccuaaugccaaccccaaugcgaacccuaaugccaaccccaaugcuaacccuaaugccaaccccaacaaaaauaaccaggggaauggacaaggccauaacaugccgaaugauccuaacagaaauguggacgagaacgcuaaugccaacaaugcgguuaagaacaauaacaaugaggaacccagcgacaagcacaucgagcaguaucucaaaaagauucagaacucccugagcacagaauggucuccuugcuccgugacgugcgggaacggaauccagguccggauuaaacccggcagcgccaauaagccgaaagaugagcuugacuacgaaaacgauaucgagaagaaaaucuguaagauggagaaguguucuuccguguuuaauguugugaacagcucuauugggcugaucaugguccucuccuuccuguuucuuaauuga

SEQ ID NO: 4966 - RNA, 1275 nt, Artificial Sequence
  derived and/or modified CDS sequence (opt5) from Pf(Pal97-100)__BAM84952.1__CSP
augaugagaaagcuggccauccucagcguguccucuuuccuguuugucgaggcucuuuuccaggaauaccagugcuauggcagcuccucuaacacccggguucugaaugagcucaacuacgacaaugccgggacaaaccuguauaaugaacuugagaugaacuacuauggaaaacaggaaaauugguacagccugaagaaaaacucccgcucucucggcgagaaugaugacgggaacaauaacaauggagauaacggcagagaggggaaggacgaagauaaacgggacggaaauaacgaggauaacgaaaagcugcgcaagcccaaacacaagaaacugaagcagccuggcgacggcaauccggaucccaacgcgaauccuaacguggaccccaaugcuaacccuaauguggaucccaacgccaauccuaacgucgacccgaaugccaaccccaaugcuaacccuaaugccaaccccaacgcuaauccuaacgccaaucccaacgcgaauccgaacgccaauccuaacgcuaaucccaacgccaauccuaacgcuaaucccaacgccaaucccaacguggauccuaacgcgaauccgaacgccaaucccaacgcuaauccuaacgccaaucccaacgcuaauccuaacgccaaucccaacgccaauccgaacgcuaauccuaacgcgaaccccaaugccaacccuaaugcuaaccccaaugccaacccuaaugccaaccccaaugcuaacccgaaugccaacccuaaugcgaaccccaaugcuaaccccaaugccaacccuaacgccaauccgaacgcuaaucccaacgccaauccuaacgcuaaucccaacgccaauccuaacgcgaaucccaacgccaauccuaacgcuaaucccaacaaaaacaaucaggggaacggacaaggccauaauaugccgaacgacccuaauagaaacguugacgagaaugccaacgcuaauaacgccgugaagaauaacaauaacgaggaacccagcgauaagcacauuacggaguaucucaaaaagauccaaaauucccugagcaccgaauggucuccuuguuccgucacaugcgggaacggcauucaggugcggaucaaacccggaagcgcggggaagucuaaagacgagcuugauuacgaaaacgacauugagaagaaaaucuguaagauggagaagugcuccagcguuuuuaauguggucaacucuuccaucggacugauuauggugcucagcuuccuguuucuuaauuga

SEQ ID NO: 4967 - RNA, 1275 nt, Artificial Sequence
  derived and/or modified CDS sequence (opt5) from Pf(PFS89)__BAN59425.1__CSP
augaugagaaagcuggccauccucagcguguccucuuuccuguuugucgaggcucuuuuccaggaauaccaaugcuauggcagcuccucuaacacccggguucugaaugagcucaacuacgacaaugccgggacaaaccuguauaaugaacuugagaugaacuacuauggaaaacaggaaaauugguacagccugaagaaaaacucccgcucucucggcgagaaugaugacgggaacaauaacaauggagauaacggcagagaggggaaggacgaagauaaacgggacggaaauaacgaggauaacgaaaagcugcgcaagcccaaacacaagaaacugaagcagccuggcgacggcaauccggaucccaacgcgaauccuaacguggaccccaaugcuaacccuaauguggaucccaacgccaauccuaacgucgacccgaaugccaaccccaaugcuaacccuaaugccaaccccaacgcuaauccuaacgccaaucccaacgcgaauccgaacgccaauccuaacgcuaaucccaacgccaauccuaacgcuaaucccaacgccaaucccaacgcgaacccuaaugccaacccgaaugcuaaccccaaugccaacccuaaugcuaaccccaaugccaacccuaaugccaaccccaaugcuaacccgaaugcgaacccuaacgccaaucccaacgcuaauccuaacgccaaucccaacgccaauccuaacgcuaaucccaacgccaauccgaacgcgaauccuaacgcuaaucccaacgccaaucccaacgccaacccuaaugcuaacccgaaugccaaccccaaugcuaacccuaaugccaaccccaaugcgaacccuaaugccaaccccaaugcuaacccuaaugccaaccccaacaaaaauaaccaggggaauggacaaggccauaacaugccgaaugauccuaacagaaauguggacgagaacgcuaaugccaacaaugcgguuaagaacaauaacaaugaggaacccagcgacaagcacauugagcaguaucucaaaaagauccagaacucccugagcacggaauggucuccuugcuccgugaccugcgggaacggcauucagguccggaucaaacccggaagcgccaauaagccgaaagaugagcuugacuacgaaaacgauauugagaagaaaaucuguaagauggagaaguguucuuccguguuuaauguugugaacagcucuaucgggcugauuaugguccucuccuuccuguuucuuaauuga

SEQ ID NO: 4968 - RNA, 1275 nt, Artificial Sequence
  derived and/or modified CDS sequence (opt5) from Pf(PNG912-035)__BAM85007.1__CSP
augaugagaaagcuggccauccucagcguguccucuuuccuguuugucgaggcucuuuuccaggaauaccaaugcuauggcagcuccucuaacacccggguucugaaugagcucaacuacgacaaugccgggacaaaccuguauaaugaacuugagaugaacuacuauggaaaacaggaaaauugguacagccugaagaaaaacucccgcucucucggcgagaaugaugacgggaacaauaacaauggagauaacggcagagaggggaaggacgaagauaaacgggacggaaauaacgaggauaacgaaaagcugcgcaagcccaaacacaagaaacugaagcagccuggcgacggcaauccggaucccaacgcgaauccuaacguggaccccaaugcuaacccuaauguggaucccaacgccaauccuaacgucgacccgaaugccaaccccaaugcuaacccuaaugccaaccccaacgcuaauccuaacgccaaucccaacgcgaauccgaacgccaauccuaacgcuaaucccaacgccaauccuaacgcuaaucccaacgccaaucccaacgcgaacccuaaugccaacccgaaugcuaaccccaaugccaacccuaaugcuaaccccaaugccaacccuaaugccaaccccaauguggauccgaacgcuaauccuaacgcgaaccccaaugccaacccuaaugcuaaccccaaugccaacccuaaugccaaccccaaugcuaacccgaaugccaacccuaaugcgaaccccaaugcuaaccccaaugccaacccuaacgccaauccgaacgcuaaucccaacgccaauccuaacgcuaaucccaacgccaauccuaacgcgaaucccaacgccaauccuaacgcuaaucccaacaaaaacaaucaggggaacggacaaggccauaauaugccgaacgacccuaauagaaacguugacgagaaugccaacgcuaauaacgccgugaagaauaacaauaacgaggaacccagcgauaagcacauugagcaguaucucaaaaagauccaaaauucccugagcacggaauggucuccuugcuccgugaccugcgggaacggcauucagguccggaucaaacccggaagcgcggacaagccgaaagaucagcuugacuacgagaacgauauugaaaagaaaaucuguaagauggagaaguguucuuccguuuuuaauguggucaacagcucuaucgggcugauuauggugcucuccuuccuguuucuuaauuga

SEQ ID NO: 4969 - RNA, 1275 nt, Artificial Sequence
  derived and/or modified CDS sequence (opt5) from Pf(Sol95-308)__BAM85089.1__CSP
augaugagaaagcuggccauccucagcguguccucuuuccuguuugucgaggcucuuuuccaggaauaccagugcuauggcagcuccucuaacacccggguucugaaugagcucaacuacgacaaugccgggacaaaccuguauaaugaacuugagaugaacuacuauggaaaacaggaaaauugguacagccugaagaaaaacucccgcucucucggcgagaaugaugacgggaacaauaacaauggagauaacggcagagaggggaaggacgaagauaaacgggacggaaauaacgaggauaacgaaaagcugcgcaagcccaaacacaagaaacugaagcagccuggcgacggcaauccggaucccaacgcgaauccuaacguggaccccaaugcuaacccuaauguggaucccaacgccaauccuaacgucgacccgaaugccaaccccaauguggauccuaacgcuaaucccaacgccaacccuaaugcuaaccccaaugccaacccgaaugcgaacccuaaugccaaccccaaugcuaacccuaaugccaaccccaaugcuaaccccaaugccaacccuaacgcgaauccgaacgccaaucccaacgcuaauccuaacgccaaucccaacgcuaauccuaacgccaaucccaacgccaauccgaacgcuaauccuaacgcgaaccccaaugccaacccuaaugcuaaccccaaugccaacccuaaugccaaccccaaugcuaacccgaaugccaacccuaaugcgaaccccaaugcuaaccccaaugccaacccuaacgccaauccgaacgcuaaucccaacgccaauccuaacgcuaaucccaacgccaauccuaacgcgaaucccaacgccaauccuaacgcuaaucccaacaaaaacaaucaggggaacggacaaggccauaauaugccgaacgacccuaauagaaacguugacgagaaugccaacgcuaauaacgccgugaagaauaacaauaacgaggaacccagcgauaagcacauugagcaguaucucaaaaagauccaaaauucccugagcacggaauggucuccuugcuccgugaccugcgggaacggcauucagguccggaucaaacccggaagcgcgaacaagccgaaagacgagcuugauuacgaaaaugacauugagaagaaaaucuguaagauggagaaguguucuuccguuuuuaacguggucaauagcucuaucgggcugauuauggugcucuccuuccuguuucuuaacuga

SEQ ID NO: 4970 - RNA, 1275 nt, Artificial Sequence
  derived and/or modified CDS sequence (opt5) from Pf(Sol95-346)__BAM85102.1__CSP
augaugagaaagcuggccauccucagcguguccucuuuccuguuugucgaggcucuuuuccaggaauaccagugcuauggcagcuccucuaacacccggguucugaaugagcucaacuacgacaaugccgggacaaaccuguauaaugaacuugagaugaacuacuauggaaaacaggaaaauugguacagccugaagaaaaacucccgcucucucggcgagaaugaugacgggaacaauaacaauggagauaacggcagagaggggaaggacgaagauaaacgggacggaaauaacgaggauaacgaaaagcugcgcaagcccaaacacaagaaacugaagcagccuggcgacggcaauccggaucccaacgcgaauccuaacguggaccccaaugcuaacccuaauguggaucccaacgccaauccuaacgucgacccgaaugccaaccccaaugcuaacccuaaugccaaccccaacgcuaauccuaacgccaaucccaacgcgaauccgaacgccaauccuaacgcuaaucccaacgccaauccuaacgcuaaucccaacgccaaucccaacgcgaacccuaaugccaacccgaaugcuaaccccaaugccaacccuaaugcuaaccccaaugccaacccuaaugccaaccccaauguggauccgaacgcuaauccuaacgcgaaccccaaugccaacccuaaugcuaaccccaaugccaacccuaaugccaaccccaaugcuaacccgaaugccaacccuaaugcgaaccccaaugcuaaccccaaugccaacccuaacgccaauccgaacgcuaaucccaacgccaauccuaacgcuaaucccaacgccaauccuaacgcgaaucccaacgccaauccuaacgcuaaucccaacaaaaacaaucaggggaacggacaaggccauaauaugccgaacgacccuaauagaaacguugacgagaaugccaacgcuaauaacgccgugaagaauaacaauaacgaggaacccagcgauaagcacauugagcaguaucucaaaaagauccaaaauucccugagcacggaauggucuccuuguuccgugaccugcgggaacggcauucagguccggaucaaacccggaagcgcggggaagucuaaagacgagcuugauuacgaaaacgacauugagaagaaaaucuguaagauggagaagugcuccagcguuuuuaauguggucaacucuuccaucggacugauuauggugcucagcuuccuguuucuuaauuga

SEQ ID NO: 4971 - RNA, 1275 nt, Artificial Sequence
  derived and/or modified CDS sequence (opt5) from Pf(T4 Thailand)__AAA29555.1__CSP
augaugagaaagcuggccauccucagcguguccucuuuccuguuugucgaggcucuuuuccaggaauaccaaugcuauggcagcuccucuaacacccggguucugaaugagcucaacuacgacaaugccgggacaaaccuguauaaugaacuugagaugaacuacuauggaaaacaggaaaauugguacagccugaagaaaaacucccgcucucucggcgagaaugaugacgggaacaauaacaauggagauaacaauagagagggcaaggacgaagauaaacgggacgggaacaacgaggauaaugaaacgcugcgcaagcccaagcacaaaaagcugaaacagccuggagacggcaacccggaucccaaugcgaacccuaauguggaccccaacgcuaauccuaacguggaucccaaugccaacccuaaugucgacccgaacgccaaucccaacgcuaauccuaacgccaaccccaaugcuaacccuaaugccaaccccaaugcgaacccgaaugccaacccuaaugcuaaccccaaugccaacccuaaugcuaaccccaaugccaaccccaacgcgaauccuaacgccaauccgaacgcuaaucccaacgccaauccuaacgcuaaucccaacgccaauccuaacgccaaucccaacgcuaauccgaacgcgaacccuaaugccaaccccaaugcuaacccuaaugccaaccccaaugccaacccuaaugcuaaccccaaugccaacccgaaugcgaacccuaaugcuaaccccaaugccaaccccaacgccaauccuaacgcuaauccgaacgccaaucccaacgcuaauccuaacgccaaucccaacgcgaauccuaacgccaaucccaacgcuaauccuaacgccaaccccaauaagaacaaucagggcaacgggcaaggacauaauaugccgaacgauccuaauagaaacguggacgagaaugcuaacgccaauaacgcgguuaaaaauaacaauaacgaggaacccagcgacaagcacauugagcaguaucucaagaaaauccagaacucccugagcaccgaauggucuccuugcuccgugacaugcggcaaugggauucagguccggaucaagcccggaagcgccaacaaaccgaaggaugagcuugacuacgaaaaugauauugagaaaaagaucuguaaaauggagaaguguucuuccguguuuaacguugugaauagcucuaucggccugauuaugguccucuccuuccuguuucuuaacuga

SEQ ID NO: 4972 - RNA, 1275 nt, Artificial Sequence
  derived and/or modified CDS sequence (opt5) from Pf(Tz03-025)__BAM84798.1__CSP
augaugagaaagcuggccauccucagcguguccucuuuccuguuugucgaggcucuuuuccaggaauaccaaugcuauggcagcuccucuaacacccggguucugaaugagcucaacuacgacaaugccgggacaaaccuguauaaugaacuugagaugaacuacuauggaaaacaggaaaauugguacagccugaagaaaaacucccgcucucucggcgagaaugaugacgggaacaauaacaauggagauaacggcagagaggggaaggacgaagauaaacgggacggaaauaacgaggauaacgaaaagcugcgcaagcccaaacacaagaaacugaagcagccugcggacggcaauccggaucccaacgcuaauccuaacguggaccccaaugccaacccuaauguggaucccaacgccaauccuaacgucgacccgaaugcuaaccccaaugccaacccuaaugcuaaccccaacgccaauccuaacgcgaaucccaacgccaauccgaacgcuaauccuaacgccaaucccaacgcuaauccuaacgccaaucccaacgcgaaucccaacgccaacccuaaugcuaacccgaaugccaaccccaaugcuaacccuaaugccaaccccaaugccaacccuaaugcuaaccccaauguggauccgaacgcgaauccuaacgccaaccccaaugcuaacccuaaugccaaccccaaugccaacccuaaugcuaaccccaaugccaacccgaaugcgaacccuaaugcuaaccccaaugccaaccccaaugccaacccuaacgcuaauccgaacgccaaucccaacgcuaauccuaacgccaaucccaacgcgaauccuaacgccaaucccaacgcuaauccuaacgccaaucccaacaaaaacaaucagggcaacgggcaaggacauaauaugccgaacgacccuaauagaaacguugacgagaaugcuaacgccaauaacgcggugaagaauaacaauaacgaggaacccagcgaucagcacauugagaaguaucucaaaacgaucaaaaauucccugagcaccgaauggucuccuugcuccgucacaugcggcaacgggauucaggugcggaucaagcccggaagcgccaacaagccgaaagaccagcuugauuacgcuaaugacauugagaagaaaaucuguaagauggaaaaguguucuuccguuuuuaacguggucaauagcucuaucggccugauuauggugcucuccuuccuguuucuuaacuga

SEQ ID NO: 4973 - RNA, 1272 nt, Artificial Sequence
  derived and/or modified CDS sequence (opt5) from Pf(NR62)__ADF48375.1__CSP
augagaaagcuggccauccucagcguguccucuuuccuguuugucgaggcucuuuuccaggaauaccagugcuauggcagcuccucuaacacccggguucugaaugagcucaacuacgacaaugccgggacaaaccuguauaaugaacuugagaugaacuacuauggaaaacaggaaaauugguacagccugaagaaaaacucccgcucucucggcgagaaugaugacgggaacaauaacaauggagauaacggcagagaggggaaggacgaagauaaacgggacggaaauaacgaggauaacgaaaagcugcgcaagcccaaacacaagaaacugaagcagccuggcgacggcaauccggaucccaacgcgaauccuaacguggaccccaaugcuaacccuaauguggaucccaacgccaauccuaacgucgacccgaaugccaaccccaauguggauccuaacgcuaaucccaacgccaacccuaaugcuaaccccaaugccaacccgaaugcgaacccuaaugccaaccccaaugcuaacccuaaugccaaccccaaugcuaaccccaaugccaacccuaacgcgaauccgaacgccaaucccaacgcuaauccuaacgccaaucccaacgcuaauccuaacgccaaucccaacgccaauccgaacgcuaauccuaacgcgaaccccaaugccaacccuaaugcuaaccccaaugccaacccuaaugccaaccccaaugcuaacccgaaugccaacccuaaugcgaaccccaaugcuaaccccaaugccaacccuaacgccaauccgaacgcuaaucccaacgccaauccuaacgcuaaucccaacgccaauccuaacgcgaaucccaacgccaauccuaacgcuaaucccaacaaaaacaaucaggggaacggacaaggccauaauaugccgaacgacccuaauagaaacguugacgagaaugccaacgcuaauaacgccgugaagaauaacaauaacgaggaacccagcgauaagcacauugagcaguaucucaaaaagauccaaaauucccugagcacggaauggucuccuugcuccgugaccugcgggaacggcauucagguccggaucaaacccggaagcgcgaacaagccgaaagacgagcuugauuacgaaaaugacauugagaagaaaaucuguaagauggagaaguguucuuccguuuuuaacguggucaauagcucuaucgggcugauuauggugcucuccuuccuguuucuuaacuga

SEQ ID NO: 4974 - RNA, 1272 nt, Artificial Sequence
  derived and/or modified CDS sequence (opt5) from Pf(TSY673)__ACO49542.1__CSP
augagaaagcuggccauccucagcguguccucuuuccuguuugucgaggcucuuuuccaggaauaccagugcuauggcagcuccucuaacacccggguucugaaugagcucaacuacgacaaugccgggacaaaccuguauaaugaacuugagaugaacuacuauggaaaacaggaaaauugguacagccugaagaaaaacucccgcucucucggcgagaaugaugacgggaacaauaacaauggagauaacggcagagaggggaaggacgaagauaaacgggacggaaauaacgaggauaacgaaaagcugcgcaagcccaaacacaagaaacugaagcagccuggcgacggcaauccggaucccaacgcgaauccuaacguggaccccaaugcuaacccuaauguggaucccaacgccaauccuaacgucgacccgaaugccaaccccaaugcuaacccuaaugccaaccccaacgcuaauccuaacgccaaucccaacgcgaauccgaacgccaauccuaacgcuaaucccaacgccaauccuaacgcuaaucccaacgccaaucccaacguggauccuaacgcgaauccgaacgccaaucccaacgcuaauccuaacgccaaucccaacgcuaauccuaacgccaaucccaacgccaauccgaacgcuaauccuaacgcgaaccccaaugccaacccuaaugcuaaccccaaugccaacccuaaugccaaccccaaugcuaacccgaaugccaacccuaaugcgaaccccaaugcuaaccccaaugccaacccuaacgccaauccgaacgcuaaucccaacgccaauccuaacgcuaaucccaacgccaauccuaacgcgaaucccaacgccaauccuaacgcuaaucccaacaaaaacaaucaggggaacggacaaggccauaauaugccgaacgacccuaauagaaacguugacgagaaugccaacgcuaauaacgccgugaagaauaacaauaacgaggaacccagcgauaagcacauuacggaguaucucaaaaagauccaaaauucccugagcaccgaauggucuccuuguuccgucacaugcgggaacggcauucaggugcggaucaaacccggaagcgcggggaagucuaaagacgagcuugauuacgaaaacgacauugagaagaaaaucuguaagauggagaagugcuccagcguuuuuaauguggucaacucuuccaucggacugauuauggugcucagcuuccuguuucuuaauuga

SEQ ID NO: 4975 - RNA, 1272 nt, Artificial Sequence
  derived and/or modified CDS sequence (opt5) from Pf(TSY688)__ACO49545.1__CSP
augagaaagcuggccauccucagcguguccucuuuccuguuugucgaggcucuuuuccaggaauaccaaugcuauggcagcuccucuaacacccggguucugaaugagcucaacuacgacaaugccgggacaaaccuguauaaugaacuugagaugaacuacuauggaaaacaggaaaauugguacagccugaagaaaaacucccgcucucucggcgagaaugaugacgggaacaauaacaauggagauaacggcagagaggggaaggacgaagauaaacgggacggaaauaacgaggauaacgaaaagcugcgcaagcccaaacacaagaaacugaagcagccuggcgacggcaauccggaucccaacgcgaauccuaacguggaccccaaugcuaacccuaauguggaucccaacgccaauccuaacgucgacccgaaugccaaccccaaugcuaacccuaaugccaaccccaacgcuaauccuaacgccaaucccaacgcgaauccgaacgccaauccuaacgcuaaucccaacgccaauccuaacgcuaaucccaacgccaaucccaacgcgaacccuaaugccaacccgaaugcuaaccccaaugccaacccuaaugcuaaccccaaugccaacccuaaugccaaccccaaugcuaacccgaaugcgaacccuaacgccaaucccaacgcuaauccuaacgccaaucccaacgccaauccuaacgcuaaucccaacgccaauccgaacgcgaauccuaacgcuaaucccaacgccaaucccaacgccaacccuaaugcuaacccgaaugccaaccccaaugcuaacccuaaugccaaccccaaugcgaacccuaaugccaaccccaaugcuaacccuaaugccaaccccaacaaaaauaaccaggggaauggacaaggccauaacaugccgaaugauccuaacagaaauguggacgagaacgcuaaugccaacaaugcgguuaagaacaauaacaaugaggaacccagcgacaagcacauugagcaguaucucaaaaagauccagaacucccugagcacggaauggucuccuugcuccgugaccugcgggaacggcauucagguccggaucaaacccggaagcgccaauaagccgaaagaugagcuugacuacgaaaacgauauugagaagaaaaucuguaagauggagaaguguucuuccguguuuaauguugugaacagcucuaucgggcugauuaugguccucuccuuccuguuucuuaauuga

SEQ ID NO: 4976 - RNA, 1263 nt, Artificial Sequence
  derived and/or modified CDS sequence (opt5) from Pf(835b)__AAA29574.1__CSP
augaugagaaagcuggccauccucagcguguccucuuuccuguuugucgaggcucuuuuccaggaauaccagugcuauggcagcuccucuaacacccggguucugaaugagcucaacuacgacaaugccgggauuaaccuguauaaugaacuugagaugaacuacuauggaaaacaggaaaauugguacagccugaagaaaaacucccgcucucucggcgagaaugaugacgggaacaauaacaauggagauaacggcagagaggggaaggacgaagauaaacgggacggaaauaacgaggauaacgaaaagcugcgcaagcccaaacacaagaaacugaagcagccuggcgacggcaauccggaucccaacgcgaauccuaacguggaccccaaugcuaacccuaauguggaucccaacgccaauccuaacgucgacccgaaugccaaccccaaugcuaacccuaaugccaaccccaacgcuaauccuaacgccaaucccaacgcgaauccgaacgccaauccuaacgcuaaucccaacgccaauccuaacgcuaaucccaacgccaaucccaacgcgaacccuaaugccaacccgaaugcuaaccccaaugccaacccuaaugcuaaccccaaugccaacccuaaugccaaccccaaugcuaacccgaauguggauccuaacgcgaaccccaaugccaacccuaaugcuaaccccaaugccaacccuaaugccaaccccaaugcuaacccgaaugccaacccuaaugcgaaccccaaugcuaaccccaaugccaacccuaacgccaauccgaacgcuaaucccaacgccaauccuaacgcuaaucccaacgccaauccuaacgcgaaucccaacgccaauccuaacaaaaauaaccaggggaacggacaaggccauaauaugcccaacgacccgaauagaaacguugacgagaaugcuaacgccaauaacgcugugaagaauaacaauaacgaggaaccuagcgauaagcacaucaaagaguaucucacaaagauucaaaauuccaucagcacggaauggucucccugcuccgugaccugcgggaacggcauucagguccggaucaaaccuggaagcgccgggaagcccaaagacgagcuggaauacgagaaugauaucgagaagaaaauuuguaagauggaaaaguguucuuccguuuuuaacguggucaacagcucuaucggacuuauuauggugcuguccuuccucuuucugaauuga

SEQ ID NO: 4977 - RNA, 1263 nt, Artificial Sequence
  derived and/or modified CDS sequence (opt5) from Pf(FCC1/HN)__AAW59565.1__CSP
augaugagaaagcuggccauccucagcguguccucuuuccuguuugucgaggcucuuuuccaggaauaccaaugcuauggcagcuccucuaacacccggguucugaaugagcucaacuacgacaaugccgggacaaaccuguauaaugaacuugagaugaacuacuauggaaaacaggaaaauugguacagccugaagaaaaacucccgcucucucggcgagaaugaugacgggaacaauaacaauggagauaacggcagagaggggaaggacgaagauaaacgggacggaaauaacgaggauaacgaaaagcugcgcaagcccaaacacaagaaacugaagcagccuggcgacggcaauccggaucccaacgcgaauccuaacguggaccccaaugcuaacccuaauguggaucccaacgccaauccuaacgucgacccgaaugccaaccccaaugcuaacccuaaugccaaccccaacgcuaauccuaacgccaaucccaacgcgaauccgaacgccaauccuaacgcuaaucccaacgccaauccuaacgcuaaucccaacgccaaucccaacgcgaacccuaaugccaacccgaaugcuaaccccaaugccaacccuaaugcuaaccccaaugccaacccuaaugccaaccccaaugcuaacccgaaugcgaacccuaacgccaaucccaacgcuaauccuaacgccaaucccaacgccaauccuaacgcuaaucccaacgccaauccgaacgcgaauccuaacgcuaaucccaacgccaaucccaacgccaacccuaaugcuaacccgaaugccaaccccaaugcuaacccuaaugccaaccccaaugcgaacccuaaugccaaccccaaugcuaacccuaauaaaaacaaccaggggaauggacaaggccauaacaugcccaaugauccgaacagaaauguggacgagaacgccaaugcuaacaaugccguuaagaacaauaacaaugaggaaccuagcgacaagcacauugagcaguaucucaaaaagauccagaacucccugagcacggaauggucucccugcuccgugaccugcgggaauggcauucaggcgcggaucaaaccuggaagcgccaacaagcccaaagaugagcuugacuacgaaaacgauauugagaagaaaaucuguaagauggagaaguguucuuccgucuuuaaugugguuaacagcucuaucgggcugauuauggugcucuccuuccuguuucuuaauuga

SEQ ID NO: 4978 - RNA, 1263 nt, Artificial Sequence
  derived and/or modified CDS sequence (opt5) from Pf(K1)__AAA29552.1__CSP
augaugagaaagcuggccauccucagcguguccucuuuccuguuugucgaggcucuuuuccaggaauaccaaugcuauggcagcuccucuaacacccggguucugaaugagcucaacuacgacaaugccgggauuaaccuguauaaugaacuugagaugaacuacuauggaaaacaggaaaauugguacagccugaagaaaaacucccgcucucucggcgagaaugaugacgggaacaauaacaauggagauaacggcagagaggggaaggacgaagauaaacgggacggaaauaacgaggauaacgaaaagcugcgcaagcccaaacacaagaaacugaagcagccuggcgacggcaauccggaucccaacgcgaauccuaacguggaccccaaugcuaacccuaauguggaucccaacgccaauccuaacgucgacccgaaugccaaccccaaugcuaacccuaaugccaaccccaacgcuaauccuaacgccaaucccaacgcgaauccgaacgccaauccuaacgcuaaucccaacgccaauccuaacgcuaaucccaacguggaucccaaugccaacccuaacgcgaauccgaacgccaaucccaacgcuaauccuaacgccaaucccaacgcuaauccuaacgccaaucccaacgccaauccgaacgcuaauccuaacgcgaaccccaaugccaacccuaaugcuaaccccaaugccaacccuaaugccaaccccaaugcuaacccgaaugccaacccuaaugcgaaccccaaugcuaaccccaaugccaacccuaacgccaauccgaacgcuaaucccaacgccaauccuaacgcuaaucccaacgccaauccuaacgcgaaucccaacgccaauccuaacaaaaauaaccaggggaacggacaaggccauaauaugcccaacgacccgaauagaaacguugacgagaaugcuaacgccaauaacgaugugaagaauaacaauaacgaggaaccuagcgacaagcacaucgagcaguaucucaaaaagauucaguacucccugagcacagaauggucucccugcuccgucacgugcgggaauggaauccaggugcggauuaaaccuggcagcgcugauaagcccaaagaccaacuugauuacgagaacgacaucgaaaagaaaaucuguaagauggagaaguguucuuccguuuuuaauguggucaacagcucuauugggcugaucauggugcucuccuuccuguuucuuaacuga

SEQ ID NO: 4979 - RNA, 1263 nt, Artificial Sequence
  derived and/or modified CDS sequence (opt5) from Pf(K1)__BAD73952.1__CSP
augaugagaaagcuggccauccucagcguguccucuuuccuguuugucgaggcucuuuuccaggaauaccaaugcuauggcagcuccucuaacacccggguucugaaugagcucaacuacgacaaugccgggacaaaccuguauaaugaacuugagaugaacuacuauggaaaacaggaaaauugguacagccugaagaaaaacucccgcucucucggcgagaaugaugacgggaacaauaacaauggagauaacggcagagaggggaaggacgaagauaaacgggacggaaauaacgaggauaacgaaaagcugcgcaagcccaaacacaagaaacugaagcagccuggcgacggcaauccggaucccaacgcgaauccuaacguggaccccaaugcuaacccuaauguggaucccaacgccaauccuaacgucgacccgaaugccaaccccaaugcuaacccuaaugccaaccccaacgcuaauccuaacgccaaucccaacgcgaauccgaacgccaauccuaacgcuaaucccaacgccaauccuaacgcuaaucccaacguggaucccaaugccaacccuaacgcgaauccgaacgccaaucccaacgcuaauccuaacgccaaucccaacgcuaauccuaacgccaaucccaacgccaauccgaacgcuaauccuaacgcgaaccccaaugccaacccuaaugcuaaccccaaugccaacccuaaugccaaccccaaugcuaacccgaaugccaacccuaaugcgaaccccaaugcuaaccccaaugccaacccuaacgccaauccgaacgcuaaucccaacgccaauccuaacgcuaaucccaacgccaauccuaacgcgaaucccaacgccaauccuaacaaaaauaaccaggggaacggacaaggccauaauaugcccaacgacccgaauagaaacguugacgagaaugcuaacgccaauaacgaugugaagaauaacaauaacgaggaaccuagcgacaagcacauugagcaguaucucaaaaagauccaguacucccugagcacggaauggucucccugcuccgugaccugcgggaauggcauucagguccggaucaaaccuggaagcgcugauaagcccaaagaccaacuugauuacgagaacgacauugaaaagaaaaucuguaagauggagaaguguucuuccguuuuuaauguggucaacagcucuaucgggcugauuauggugcucuccuuccuguuucuuaacuga

SEQ ID NO: 4980 - RNA, 1263 nt, Artificial Sequence
  derived and/or modified CDS sequence (opt5) from Pf(Pal97-074)__BAM84944.1__CSP
augaugagaaagcuggccauccucagcguguccucuuuccuguuugucgaggcucuuuuccaggaauaccaaugcuauggcagcuccucuaacacccggguucugaaugagcucaacuacgacaaugccgggacaaaccuguauaaugaacuugagaugaacuacuauggaaaacaggaaaauugguacagccugaagaaaaacucccgcucucucggcgagaaugaugacgggaacaauaacaauggagauaacggcagagaggggaaggacgaagauaaacgggacggaaauaacgaggauaacgaaaagcugcgcaagcccaaacacaagaaacugaagcagccuguggacggcaauccggaucccaacgcgaauccuaacguggaccccaaugcuaacccuaaugucgaucccaacgccaauccuaacguggacccgaaugccaaccccaaugcuaacccuaaugccaaccccaacgcuaauccuaacgccaaucccaacgcgaauccgaacgccaauccuaacgcuaaucccaacgccaauccuaacgcuaaucccaacgccaaucccaacgcgaacccuaaugccaacccgaaugcuaaccccaaugccaacccuaaugcuaaccccaaugccaacccuaaugccaaccccaaugcuaacccgaaugcgaacccuaacgccaaucccaacgcuaauccuaacgccaaucccaacgccaauccuaacgcuaaucccaacgccaauccgaacgcgaauccuaacgcuaaucccaacgccaaucccaacgccaacccuaaugcuaacccgaaugccaaccccaaugcuaacccuaaugccaaccccaaugcgaacccuaaugccaaccccaaugcuaacccuaauaaaaacaaccagggcaaugggcaaggacauaacaugcccaaugauccgaacagaaauguugacgagaacgccaaugcuaacaaugccgugaagaacaauaacaaugaggaaccuagcgaccagcacauugagaaguaucucaaaaucauucagaacucccugagcacggaauggucucccugcuccgugaccugcggcaaugggauccagguccggauuaagccuggaagcgcggauaaacccaaggaccaacuugauuacgccaacgacaucgagaaaaagaucuguaaaauggaaaaguguucuuccguuuuuaacguggucaauagcucuauuggccugaucauggugcucuccuuccuguuucuuaacuga

SEQ ID NO: 4981 - RNA, 1263 nt, Artificial Sequence
  derived and/or modified CDS sequence (opt5) from Pf(Pal97-108)__BAM84957.1__CSP
augaugagaaagcuggccauccucagcguguccucuuuccuguuugucgaggcucuuuuccaggaauaccaaugcuauggcagcuccucuaacacccggguucugaaugagcucaacuacgacaaugccgggacaaaccuguauaaugaacuugagaugaacuacuauggaaaacaggaaaauugguacagccugaagaaaaacucccgcucucucggcgagaaugaugacgggaacaauaacaauggagauaacggcagagaggggaaggacgaagauaaacgggacggaaauaacgaggauaacgaaaagcugcgcaagcccaaacacaagaaacugaagcagccuggcgacggcaauccggaucccaacgcgaauccuaacguggaccccaaugcuaacccuaauguggaucccaacgccaauccuaacgucgacccgaaugccaaccccaaugcuaacccuaaugccaaccccaacgcuaauccuaacgccaaucccaacgcgaauccgaacgccaauccuaacgcuaaucccaacgccaauccuaacgcuaaucccaacgccaaucccaacgcgaacccuaaugccaacccgaaugcuaaccccaaugccaacccuaaugcuaaccccaaugccaacccuaaugccaaccccaaugcuaacccgaaugcgaacccuaacgccaaucccaacgcuaauccuaacgccaaucccaacgccaauccuaacgcuaaucccaacgccaauccgaacgcgaauccuaacgcuaaucccaacgccaaucccaacgccaacccuaaugcuaacccgaaugccaaccccaaugcuaacccuaaugccaaccccaaugcgaacccuaaugccaaccccaaugcuaacccuaauaaaaacaaccaggggaauggacaaggccauaacaugcccaaugauccgaacagaaauguggacgagaacgccaaugcuaacaaugccguuaagaacaauaacaaugaggaaccuagcgacaagcacauuaaagaguaucucacgaagauccagaacuccauuagcaccgaauggucucccugcuccgugacaugcgggaauggaauccagguccggauuaaaccuggcagcgcggggaagcccaaagaugagcugaacuacgaaaacgacaucgagaagaaaaucuguaagauggagaaguguucuuccguguuuaauguugugaacagcucuauuggacuuaucaugguccuguccuuccucuuucugaauuga

SEQ ID NO: 4982 - RNA, 1263 nt, Artificial Sequence
  derived and/or modified CDS sequence (opt5) from Pf(PNG225-053)__BAM85032.1__CSP
augaugagaaagcuggccauccucagcguguccucuuuccuguuugucgaggcucuuuuccaggaauaccaaugcuauggcagcuccucuaacacccggguucugaaugagcucaacuacgacaaugccgggacaaaccuguauaaugaacuugagaugaacuacuauggaaaacaggaaaauugguacagccugaagaaaaacucccgcucucucggcgagaaugaugacgggaacaauaacaauggagauaacggcagagaggggaaggacgaagauaaacgggacggaaauaacgaggauaacgaaaagcugcgcaagcccaaacacaagaaacugaagcagccuggcgacggcaauccggaucccaacgcgaauccuaacguggaccccaaugcuaacccuaauguggaucccaacgccaauccuaacgucgacccgaaugccaaccccaaugcuaacccuaaugccaaccccaacgcuaauccuaacgccaaucccaacgcgaauccgaacgccaauccuaacgcuaaucccaacgccaauccuaacgcuaaucccaacgccaaucccaacgcgaacccuaaugccaacccgaaugcuaaccccaaugccaacccuaaugcuaaccccaaugccaacccuaaugccaaccccaaugcuaacccgaaugcgaacccuaacgccaaucccaacgcuaauccuaacgccaaucccaacgccaauccuaacgcuaaucccaacgccaauccgaacgcgaauccuaacgcuaaucccaacgccaaucccaacgccaacccuaaugcuaacccgaaugccaaccccaaugcuaacccuaaugccaaccccaaugcgaacccuaaugccaaccccaaugcuaacccuaauaaaaacaaccaggggaauggacaaggccauaacaugcccaaugauccgaacagaaauguggacgagaacgccaaugcuaacaaugccguuaagaacaauaacaaugaggaaccuagcgacaagcacauugagcaguaucucaaaaagauccagaacucccugagcacggaauggucucccugcuccgugaccugcgggaauggcauucagguccggaucaaaccuggaagcgcgaacaagcccaaagaugagcuugacuacgaaaacgauauugagaagaaaaucuguaagauggagaaguguucuuccguguuuaauguugugaacagcucuaucgggcugauuaugguccucuccuuccuguuucuuaauuga

SEQ ID NO: 4983 - RNA, 1263 nt, Artificial Sequence
  derived and/or modified CDS sequence (opt5) from Pf(Sol95-113)__BAM85062.1__CSP
augaugagaaagcuggccauccucagcguguccucuuuccuguuugucgaggcucuuuuccaggaauaccagugcuauggcagcuccucuaacacccggguucugaaugagcucaacuacgacaaugccgggacaaaccuguauaaugaacuugagaugaacuacuauggaaaacaggaaaauugguacagccugaagaaaaacucccgcucucucggcgagaaugaugacgggaacaauaacaauggagauaacggcagagaggggaaggacgaagauaaacgggacggaaauaacgaggauaacgaaaagcugcgcaagcccaaacacaagaaacugaagcagccuggcgacggcaauccggaucccaacgcgaauccuaacguggaccccaaugcuaacccuaauguggaucccaacgccaauccuaacgucgacccgaaugccaaccccaauguggauccuaacgcuaaucccaacgccaacccuaaugcuaaccccaaugccaacccgaaugcgaacccuaaugccaaccccaaugcuaacccuaaugccaaccccaaugcuaaccccaaugccaacccuaacgcgaauccgaacgccaaucccaacgcuaauccuaacgccaaucccaacgcuaauccuaacgccaaucccaacgccaauccgaacgcuaauccuaacgcgaaccccaaugccaacccuaaugcuaaccccaaugccaacccuaaugccaaccccaaugcuaacccgaaugccaacccuaaugcgaaccccaaugcuaaccccaaugccaacccuaacgccaauccgaacgcuaaucccaacgccaauccuaacgcuaaucccaacgccaauccuaacgcgaaucccaacgccaauccuaacaaaaauaaccaggggaacggacaaggccauaauaugcccaacgacccgaauagaaacguugacgagaaugcuaacgccaauaacgcugugaagaauaacaauaacgaggaaccuagcgauaagcacauugagcaguaucucaaaaagauccaaaauucccugagcacggaauggucucccugcuccgugaccugcgggaacggcauucagguccggaucaaaccuggaagcgccaauaagcccaaagacgagcuugauuacgaaaacgacauugagaagaaaaucuguaagauggagaaguguucuuccguuuuuaacguggucaauagcucuaucgggcugauuauggugcucuccuuccuguuucuuaacuga

SEQ ID NO: 4984 - RNA, 1263 nt, Artificial Sequence
  derived and/or modified CDS sequence (opt5) from Pf(Sol95-328)__BAM85093.1__CSP
augaugagaaagcuggccauccucagcguguccucuuuccuguuugucgaggcucuuuuccaggaauaccaaugcuauggcagcuccucuaacacccggguucugaaugagcucaacuacgacaaugccgggacaaaccuguauaaugaacuugagaugaacuacuauggaaaacaggaaaauugguacagccugaagaaaaacucccgcucucucggcgagaaugaugacgggaacaauaacaauggagauaacggcagagaggggaaggacgaagauaaacgggacggaaauaacgaggauaacgaaaagcugcgcaagcccaaacacaagaaacugaagcagccuggcgacggcaauccggaucccaacgcgaauccuaacguggaccccaaugcuaacccuaauguggaucccaacgccaauccuaacgucgacccgaaugccaaccccaaugcuaacccuaaugccaaccccaacgcuaauccuaacgccaaucccaacgcgaauccgaacgccaauccuaacgcuaaucccaacgccaauccuaacgcuaaucccaacgccaaucccaacgcgaacccuaaugccaacccgaaugcuaaccccaaugccaacccuaaugcuaaccccaaugccaacccuaauguggaucccaacgccaauccgaacgcuaauccuaacgcgaaccccaaugccaacccuaaugcuaaccccaaugccaacccuaaugccaaccccaaugcuaacccgaaugccaacccuaaugcgaaccccaaugcuaaccccaaugccaacccuaacgccaauccgaacgcuaaucccaacgccaauccuaacgcuaaucccaacgccaauccuaacgcgaaucccaacgccaauccuaacaaaaauaaccaggggaacggacaaggccauaauaugcccaacgacccgaauagaaacguugacgagaaugcuaacgccaauaacgcugugaagaauaacaauaacgaggaaccuagcgauaagcacauugagcaguaucucaaaaagauccaaaauucccugagcacggaauggucucccugcuccgugaccugcgggaacggcauucagguccggaucaaaccuggaagcgccgacaagcccaaagaucagcuugacuacgagaaugauauugaaaagaaaaucuguaagauggagaaguguucuuccguuuuuaacguggucaacagcucuaucgggcugauuauggugcucuccuuccuguuucuuaauuga

SEQ ID NO: 4985 - RNA, 1263 nt, Artificial Sequence
  derived and/or modified CDS sequence (opt5) from Pf(TiMS95-208)__BAM84896.1__CSP
augaugagaaagcuggccauccucagcguguccucuuuccuguuugucgaggcucuuuuccaggaauaccaaugcuauggcagcuccucuaacacccggguucugaaugagcucaacuacgacaaugccgggacaaaccuguauaaugaacuugagaugaacuacuauggaaaacaggaaaauugguacagccugaagaaaaacucccgcucucucggcgagaaugaugacgggaacaauaacaauggagauaacggcagagaggggaaggacgaagauaaacgggacggaaauaacgaggauaacgaaaagcugcgcaagcccaaacacaagaaacugaagcagccuggcgacggcaauccggaucccaacgcgaauccuaacguggaccccaaugcuaacccuaauguggaucccaacgccaauccuaacgucgacccgaaugccaaccccaaugcuaacccuaaugccaaccccaacgcuaauccuaacgccaaucccaacgcgaauccgaacgccaauccuaacgcuaaucccaacgccaauccuaacgcuaaucccaacgccaaucccaacgcgaacccuaaugccaacccgaaugcuaaccccaaugccaacccuaaugcuaaccccaaugccaacccuaaugccaaccccaaugcuaacccgaaugcgaacccuaacgccaaucccaacgcuaauccuaacgccaaucccaacgccaauccuaacgcuaaucccaacgccaauccgaacgcgaauccuaacgcuaaucccaacgccaaucccaacgccaacccuaaugcuaacccgaaugccaaccccaaugcuaacccuaaugccaaccccaaugcgaacccuaaugccaaccccaaugcuaacccuaauaaaaacaaccaggggaauggacaaggccauaacaugcccaaugauccgaacagaaauguggacgagaacgccaaugcuaacaaugacguuaagaacaauaacaaugaggaaccuagcgauaagcacauugagcaguaucucaaaaagauccaguacucccugagcacggaauggucucccugcuccgugaccugcgggaacggcauucagguccggaucaaaccuggaagcgccgacaagcccaaagaucaacuugacuacgagaaugauauugaaaagaaaaucuguaagauggagaaguguucuuccguguuuaacguugugaacagcucuaucgggcugauuaugguccucuccuuccuguuucuuaauuga

SEQ ID NO: 4986 - RNA, 1263 nt, Artificial Sequence
  derived and/or modified CDS sequence (opt5) from Pf(TiMS95-260)__BAM84907.1__CSP
augaugagaaagcuggccauccucagcguguccucuuuccuguuugucgaggcucuuuuccaggaauaccagugcuauggcagcuccucuaacacccggguucugaaugagcucaacuacgacaaugccgggacaaaccuguauaaugaacuugagaugaacuacuauggaaaacaggaaaauugguacagccugaagaaaaacucccgcucucucggcgagaaugaugacgggaacaauaacaauggagauaacggcagagaggggaaggacgaagauaaacgggacggaaauaacgaggauaacgaaaagcugcgcaagcccaaacacaagaaacugaagcagccuggcgacggcaauccggaucccaacgcgaauccuaacguggaccccaaugcuaacccuaauguggaucccaacgccaauccuaacgucgacccgaaugccaaccccaaugcuaacccuaaugccaaccccaacgcuaauccuaacgccaaucccaacgcgaauccgaacgccaauccuaacgcuaaucccaacgccaauccuaacgcuaaucccaacgccaaucccaacgcgaacccuaaugccaacccgaaugcuaaccccaaugccaacccuaaugcuaaccccaaugccaacccuaaugccaaccccaaugcuaacccgaauguggauccuaacgcgaaccccaaugccaacccuaaugcuaaccccaaugccaacccuaaugccaaccccaaugcuaacccgaaugccaacccuaaugcgaaccccaaugcuaaccccaaugccaacccuaacgccaauccgaacgcuaaucccaacgccaauccuaacgcuaaucccaacgccaauccuaacgcgaaucccaacgccaauccuaacaaaaauaaccaggggaacggacaaggccauaauaugcccaacgacccgaauagaaacguugacgagaaugcuaacgccaauaacgcugugaagaauaacaauaacgaggaaccuagcgauaagcacauuaaagaguaucucacgaagauccaaaauuccauuagcaccgaauggucucccugcuccgucacaugcgggaacggaauccaggugcggauuaaaccuggcagcgccgggaagcccaaagacgagcugaauuacgaaaacgauaucgagaagaaaaucuguaagauggagaaguguucuuccguuuuuaacguggucaauagcucuauuggacuuaucauggugcuguccuuccucuuucugaacuga

SEQ ID NO: 4987 - RNA, 1263 nt, Artificial Sequence
  derived and/or modified CDS sequence (opt5) from Pf(Tz93-030)__BAM84756.1__CSP
augaugagaaagcuggccauccucagcguguccucuuuccuguuugucgaggcucuuuuccaggaauaccaaugcuauggcagcuccucuaacacccggguucugaaugagcucaacuacgacaaugccgggacaaaccuguauaaugaacuugagaugaacuacuauggaaaacaggaaaauugguacagccugaagaaaaacucccgcucucucggcgagaaugaugacgggaacaauaacaauggagauaacggcagagaggggaaggacgaagauaaacgggacggaaauaacgaggauaacgaaaagcugcgcaagcccaaacacaagaaacugaagcagccuggcgacggcaauccggaucccaacgcgaauccuaacguggaccccaaugcuaacccuaauguggaucccaacgccaauccuaacgucgacccgaaugccaaccccaaugcuaacccuaaugccaaccccaacgcuaauccuaacgccaaucccaacgcgaauccgaacgccaauccuaacgcuaaucccaacgccaauccuaacgcuaaucccaacgccaaucccaacgcgaacccuaaugccaacccgaaugcuaaccccaaugccaacccuaaugcuaaccccaauguggauccuaacgccaaucccaacgccaauccgaacgcuaauccuaacgcgaaccccaaugccaacccuaaugcuaaccccaaugccaacccuaaugccaaccccaaugcuaacccgaaugccaacccuaaugcgaaccccaaugcuaaccccaaugccaacccuaacgccaauccgaacgcuaaucccaacgccaauccuaacgcuaaucccaacgccaauccuaacgcgaaucccaacgccaauccuaacaaaaauaaccaggggaacggacaaggccauaauaugcccaacgacccgaauagaaacguugacgagaaugcuaacgccaauaacgcugugaagaauaacaauaacgaggaaccuagcgauaagcacauuaaagaguaucucaauaagauccagaacuccauuagcacggaauggucucccugcuccgugaccugcgggaauggaauccagguccggauuaaaccuggcagcgccgacaagcccaaagaucagcuggacuacaucaacgauaucgagaagaaaauuuguaagauggaaaaguguucuuccguuuuuaacguggucaauagcucuaucgggcuuauuauggugcuguccuuccucuuucugaacuga

SEQ ID NO: 4988 - RNA, 1263 nt, Artificial Sequence
  derived and/or modified CDS sequence (opt5) from Pf(Tz93-038)__BAM84758.1__CSP
augaugagaaagcuggccauccucagcguguccucuuuccuguuugucgaggcucuuuuccaggaauaccaaugcuauggcagcuccucuaacacccggguucugaaugagcucaacuacgacaaugccgggacaaaccuguauaaugaacuugagaugaacuacuauggaaaacaggaaaauugguacagccugaagaaaaacucccgcucucucggcgagaaugaugacgggaacaauaacaauggagauaacggcagagaggggaaggacgaagauaaacgggacggaaauaacgaggauaacgaaaagcugcgcaagcccaaacacaagaaacugaagcagccuggcgacggcaauccggaucccaacgcgaauccuaacguggaccccaaugcuaacccuaauguggaucccaacgccaauccuaacgucgacccgaaugccaaccccaaugcuaacccuaaugccaaccccaacgcuaauccuaacgccaaucccaacgcgaauccgaacgccaauccuaacgcuaaucccaacgccaauccuaacgcuaaucccaacgccaaucccaacgcgaacccuaaugccaacccgaaugcuaaccccaaugccaacccuaaugcuaaccccaaugccaacccuaauguggaucccaacgccaauccgaacgcuaauccuaacgcgaaccccaaugccaacccuaaugcuaaccccaaugccaacccuaaugccaaccccaaugcuaacccgaaugccaacccuaaugcgaaccccaaugcuaaccccaaugccaacccuaacgccaauccgaacgcuaaucccaacgccaauccuaacgcuaaucccaacgccaauccuaacgcgaaucccaacgccaauccuaacaaaaauaaccaggggaacggacaaggccauaauaugcccaacgacccgaauagaaacguugacgagaaugcuaacgccaauaacgcugugaagaauaacaauaacgaggaaccuagcgauaagcacauuaaagaguaucucaauaagauccagaacuccauuagcacggaauggucucccugcuccgugaccugcgggaauggaauccagguccggauuaaaccuggcagcgccgacaagcccaaagaucagcuggacuacaucaacgauaucgagaagaaaauuuguaagauggaaaaguguucuuccguuuuuaacguggucaauagcucuaucgggcuuauuauggugcuguccuuccucuuucugaacuga

SEQ ID NO: 4989 - RNA, 1260 nt, Artificial Sequence
  derived and/or modified CDS sequence (opt5) from Pf(TMS31)__ACO49480.1__CSP
augagaaagcuggccauccucagcguguccucuuuccuguuugucgaggcucuuuuccaggaauaccaaugcuauggcagcuccucuaacacccggguucugaaugagcucaacuacgacaaugccgggacaaaccuguauaaugaacuugagaugaacuacuauggaaaacaggaaaauugguacagccugaagaaaaacucccgcucucucggcgagaaugaugacgggaacaauaacaauggagauaacggcagagaggggaaggacgaagauaaacgggacggaaauaacgaggauaacgaaaagcugcgcaagcccaaacacaagaaacugaagcagccuggcgacggcaauccggaucccaacgcgaauccuaacguggaccccaaugcuaacccuaauguggaucccaacgccaauccuaacgucgacccgaaugccaaccccaaugcuaacccuaaugccaaccccaacgcuaauccuaacgccaaucccaacgcgaauccgaacgccaauccuaacgcuaaucccaacgccaauccuaacgcuaaucccaacgccaaucccaacgcgaacccuaaugccaacccgaaugcuaaccccaaugccaacccuaaugcuaaccccaaugccaacccuaaugccaaccccaaugcuaacccgaaugcgaacccuaacgccaaucccaacgcuaauccuaacgccaaucccaacgccaauccuaacgcuaaucccaacgccaauccgaacgcgaauccuaacgcuaaucccaacgccaaucccaacgccaacccuaaugcuaacccgaaugccaaccccaaugcuaacccuaaugccaaccccaaugcgaacccuaaugccaaccccaaugcuaacccuaauaaaaacaaccaggggaauggacaaggccauaacaugcccaaugauccgaacagaaauguggacgagaacgccaaugcuaacaaugccguuaagaacaauaacaaugaggaaccuagcgacaagcacauugagcaguaucucaaaaagaugcagaacucccugagcacggaauggucucccugcuccgugaccugcgggaauggaauccagguccggauuaaaccuggcagcgcgaacaagcccaaagaugagcuugacuacgaaaacgauaucgagaagaaaauuuguaagauggagaaguguucuuccguguuuaauguugugaacagcucuaucgggcugaucaugguccucuccuuccuguuucuuaauuga

SEQ ID NO: 4990 - RNA, 1260 nt, Artificial Sequence
  derived and/or modified CDS sequence (opt5) from Pf(TSY172)__ACO49517.1__CSP
augagaaagcuggccauccucagcguguccucuuuccuguuugucgaggcucuuuuccaggaauaccaaugcuauggcagcuccucuaacacccggguucugaaugagcucaacuacgacaaugccgggacaaaccuguauaaugaacuugagaugaacuacuauggaaaacaggaaaauugguacagccugaagaaaaacucccgcucucucggcgagaaugaugacgggaacaauaacaauggagauaacggcagagaggggaaggacgaagauaaacgggacggaaauaacgaggauaacgaaaagcugcgcaagcccaaacacaagaaacugaagcagccuggcgacggcaauccggaucccaacgcgaauccuaacguggaccccaaugcuaacccuaauguggaucccaacgccaauccuaacgucgacccgaaugccaaccccaaugcuaacccuaaugccaaccccaacgcuaauccuaacgccaaucccaacgcgaauccgaacgccaauccuaacgcuaaucccaacgccaauccuaacgcuaaucccaacgccaaucccaacgcgaacccuaaugccaacccgaaugcuaaccccaaugccaacccuaaugcuaaccccaaugccaacccuaaugccaaccccaaugcuaacccgaaugcgaacccuaacgccaaucccaacgcuaauccuaacgccaaucccaacgccaauccuaacgcuaaucccaacgccaauccgaacgcgaauccuaacgcuaaucccaacgccaaucccaacgccaacccuaaugcuaacccgaaugccaaccccaaugcuaacccuaaugccaaccccaaugcgaacccuaaugccaaccccaaugcuaacccuaauaaaaacaaccaggggaauggacaaggccauaacaugcccaaugauccgaacagaaauguggacgagaacgccaaugcuaacaaugccguuaagaacaauaacaaugaggaaccuagcgacaagcacauugagcaguaucucaaaaagauccagaacucccugagcacggaauggucucccugcuccgugaccugcgggaauggcauucagguccggaucaaaccuggaagcgcgaacaagcccaaagaugagcuugacuacgaaaacgauauugagaagaaaaucuguaagauggagaaguguucuuccguguuuaauguugugaacagcucuaucgggcugauuaugguccucuccuuccuguuucuuaauuga

SEQ ID NO: 4991 - RNA, 1251 nt, Artificial Sequence
  derived and/or modified CDS sequence (opt5) from Pf(Asembo Bay)__AAN87591.1__CSP
augaugagaaagcuggccauccucagcguguccucuuuccuguuugucgaggcucuuuuccaggaauaccaaugcuauggcagcuccucuaacacccggguucugaaugagcucaacuacgacaaugccgggacaaaccuguauaaugaacuugagaugaacuacuauggaaaacaggaaaauugguacagccugaagaaaaacucccgcucucucggcgagaaugaugacgggaacaauaacaauggagauaacggcagagaggggaaggacgaagauaaacgggacggaaauaacgaggauaacgaaaagcugcgcaagcccaaacacaagaaacugaagcagccuggcgacggcaauccggaucccaacgcgaauccuaacguggaccccaaugcuaacccuaauguggaucccaacgccaauccuaacgucgacccgaaugccaaccccaaugcuaacccuaaugccaaccccaacgcuaauccuaacgccaaucccaacgcgaauccgaacgccaauccuaacgcuaaucccaacgccaauccuaacgcuaaucccaacgccaaucccaacgcgaacccuaaugccaacccgaaugcuaaccccaaugccaacccuaaugcuaaccccaaugccaacccuaauguggaucccaacgccaauccgaacgcuaauccuaacgcgaaccccaaugccaacccuaaugcuaaccccaaugccaacccuaaugccaaccccaaugcuaacccgaaugccaacccuaaugcgaaccccaaugcuaaccccaaugccaacccuaacgccaauccgaacgcuaaucccaacgccaauccuaacgcuaaucccaacgccaauccuaacgcgaaucccaacaaaaauaaccaggggaauggacaaggccauaacaugccuaacgaccccaauagaaacguugacgagaaugccaacgcuaauaacgccgugaagaauaacaauaacgaggaaccgagcgaucagcacauugagaaguaucucaaaacgauccaaaauucccugagcaccgaauggucuccuugcuccgucacaugcgggaacggcauucaggugcggaucaagcccggaagcgcuaauaaaccuaaggaccagcuugauuacgccaacgacauugagaaaaagaucuguaaaauggaaaaguguucuuccguuuuuaauguggucaacagcucuaucgggcugauuauggugcucuccuuccuguuucuuaacuga

SEQ ID NO: 4992 - RNA, 1251 nt, Artificial Sequence
  derived and/or modified CDS sequence (opt5) from Pf(Asembo Bay)__AAN87590.1__CSP
augaugagaaagcuggccauccucagcguguccucuuuccuguuugucgaggcucuuuuccaggaauaccaaugcuauggcagcuccucuaacacccggguucugaaugagcucaacuacgacaaugccgggacaaaccuguauaaugaacuugagaugaacuacuauggaaaacaggaaaauugguacagccugaagaaaaacucccgcucucucggcgagaaugaugacgggaacaauaacaauggagauaacggcagagaggggaaggacgaagauaaacgggacggaaauaacgaggauaacgaaaagcugcgcaagcccaaacacaagaaacugaagcagccuggcgacggcaauccggaucccaacgcgaauccuaacguggaccccaaugcuaacccuaauguggaucccaacgccaauccuaacgucgacccgaaugccaaccccaaugcuaacccuaaugccaaccccaacgcuaauccuaacgccaaucccaacgcgaauccgaacgccaauccuaacgcuaaucccaacgccaauccuaacgcuaaucccaacgccaaucccaacgcgaacccuaauguggauccgaacgccaaucccaacgcuaauccuaacgccaaucccaacgcuaauccuaacgccaaucccaacgccaauccgaacgcuaauccuaacgcgaaccccaaugccaacccuaaugcuaaccccaaugccaacccuaaugccaaccccaaugcuaacccgaaugccaacccuaaugcgaaccccaaugcuaaccccaaugccaacccuaacgccaauccgaacgcuaaucccaacgccaauccuaacgcuaaucccaacgccaauccuaacgcgaaucccaacaaaaauaaccaggggaauggacaaggccauaacaugccuaacgaccccaauagaaacguugacgagaaugccaacgcuaauaacgccgugaagaauaacaauaacgaggaaccgagcgaucagcacauugagaaguaucucaaaacgauccaaaauucccugagcaccgaauggucuccuugcuccgucacaugcgggaacggcauucaggugcggaucaagcccggaagcgcuaauaaaccuaaggaccagcuugauuacgccaacgacauugagaaaaagaucuguaaaauggaaaaguguucuuccguuuuuaauguggucaacagcucuaucgggcugauuauggugcucuccuuccuguuucuuaacuga

SEQ ID NO: 4993 - RNA, 1251 nt, Artificial Sequence
  derived and/or modified CDS sequence (opt5) from Pf(Gha1108-097)__BAM84820.1__CSP
augaugagaaagcuggccauccucagcguguccucuuuccuguuugucgaggcucuuuuccaggaauaccaaugcuauggcagcuccucuaacacccggguucugaaugagcucaacuacgacaaugccgggacaaaccuguauaaugaacuugagaugaacuacuauggaaaacaggaaaauugguacagccugaagaaaaacggccgcucccucggggagaaugaugacggaaacaauaacaauggcgauaacgggagagagggaaaggacgaagauaaacgggacggcaauaacgaggauaacgaaaagcugcgcaagcccaaacacaagaaacugaagcagccugcggacggcaauccggaucccaacgcuaauccuaacguggaccccaaugccaacccuaauguggaucccaacgccaauccuaacgucgacccgaaugcuaaccccaaugccaacccuaaugcuaaccccaacgccaauccuaacgcgaaucccaacgccaauccgaacgcuaauccuaacgccaaucccaacgcuaauccuaacgccaaucccaacgcgaaucccaacgccaacccuaaugcuaacccgaaugccaaccccaaugcuaacccuaaugccaaccccaauguggauccuaacgccaaucccaacgcuaauccgaacgcgaauccuaacgccaaccccaaugcuaacccuaaugccaaccccaaugccaacccuaaugcuaaccccaaugccaacccgaaugcgaacccuaaugcuaaccccaaugccaaccccaaugccaacccuaacgcuaauccgaacgccaaucccaacgcuaauccuaacgccaaucccaacgcgaauccuaacgccaaucccaacaaaaauaaccaggggaauggacaaggccauaacaugccuaacgaccccaauagaaacguugacgagaaugcuaacgccaauaacggggugaagaauaacaauaacgaggaaccgucugauaagcacauugagcaguaucucaaacggauccagaauagccuguccacggaauggagcccuuguucugugaccugcggaaacggcauucagguccgcaucaagcccggguccgcuaauaaaccuaaggacgagcuuaacuacgaaaaugauauugagaaaaagaucuguaaaauggagaagugcagcucuguuuuuaacguggucaacuccagcaucggacugauuauggugcucucuuuccuguuucuuaauuga

SEQ ID NO: 4994 - RNA, 1251 nt, Artificial Sequence
  derived and/or modified CDS sequence (opt5) from Pf(MAD20)__AAA29550.1__CSP
augaugagaaagcuggccauccucagcguguccucuuuccuguuugucgaggcucuuuuccaggaauaccaaugcuauggcagcuccucuaacacccggguucugaaugagcucaacuacgacaaugccgggauuaaccuguauaaugaacuugagaugaacuacuauggaaaacaggaaaauugguacagccugaagaaaaacucccgcucucucggcgagaaugaugacgggaacaauaacaauggagauaacggcagagaggggaaggacgaagauaaacgggacggaaauaacgaggauaacgaaaagcugcgcaagcccaaacacaagaaacugaagcagccuggcgacggcaauccggaucccaacgcgaauccuaacguggaccccaaugcuaacccuaauguggaucccaacgccaauccuaacgucgacccgaaugccaaccccaaugcuaacccuaaugccaaccccaacgcuaauccuaacgccaaucccaacgcgaauccgaacgccaauccuaacgcuaaucccaacgccaauccuaacgcuaaucccaacgccaaucccaacgcgaacccuaaugccaacccgaaugcuaaccccaaugccaacccuaaugcuaaccccaauguggauccuaacgccaaucccaacgccaauccgaacgcuaauccuaacgcgaaccccaaugccaacccuaaugcuaaccccaaugccaacccuaaugccaaccccaaugcuaacccgaaugccaacccuaaugcgaaccccaaugcuaaccccaaugccaacccuaacgccaauccgaacgcuaaucccaacgccaauccuaacgcuaaucccaacgccaauccuaacgcgaaucccaacaaaaauaaccaggggaauggacaaggccauaacaugccuaacgaccccaauagaaacguugacgagaaugccaacgcuaauaacgccgugaagaauaacaauaacgaggaaccgagcgauaagcacaucgagcaguaucucaaaaagauucaaaauucccugagcacagaauggucuccuugcuccgucacgugcgggaacggaauccaggugcggauuaaacccggcagcgcugacaagccuaaagaucagcuugacuacgagaaugauaucgaaaagaaaaucuguaagauggagaaguguucuuccguuuuuaacguggucaauagcucuauugggcugaucauggugcucuccuuccuguuucuuaacuga

SEQ ID NO: 4995 - RNA, 1251 nt, Artificial Sequence
  derived and/or modified CDS sequence (opt5) from Pf(Pal97-002)__BAM84917.1__CSP
augaugagaaagcuggccauccucagcguguccucuuuccuguuugucgaggcucuuuuccaggaauaccagugcuauggcagcuccucuaacacccggguucugaaugagcucaacuacgacaaugccgggacaaaccuguauaaugaacuugagaugaacuacuauggaaaacaggaaaauugguacagccugaagaaaaacucccgcucucucggcgagaaugaugacgggaacaauaacaauggagauaacggcagagaggggaaggacgaagauaaacgggacggaaauaacgaggauaacgaaaagcugcgcaagcccaaacacaagaaacugaagcagccuggcgacggcaauccggaucccaacgcgaauccuaacguggaccccaaugcuaacccuaauguggaucccaacgccaauccuaacgucgacccgaaugccaaccccaaugcuaacccuaaugccaaccccaacgcuaauccuaacgccaaucccaacgcgaauccgaacgccaauccuaacgcuaaucccaacgccaauccuaacgcuaaucccaacgccaaucccaacgcgaacccuaaugccaacccgaaugcuaaccccaaugccaacccuaaugcuaaccccaauguggauccuaacgccaaucccaacgccaauccgaacgcuaauccuaacgcgaaccccaaugccaacccuaaugcuaaccccaaugccaacccuaaugccaaccccaaugcuaacccgaaugccaacccuaaugcgaaccccaaugcuaaccccaaugccaacccuaacgccaauccgaacgcuaaucccaacgccaauccuaacgcuaaucccaacgccaauccuaacgcgaaucccaacaaaaauaaccaggggaauggacaaggccauaacaugccuaacgaccccaauagaaacguugacgagaaugccaacgcuaauaacgccgugaagaauaacaauaacgaggaaccgagcgaucagcacauugagaaguauaucaaaaagauucaaaauucccucagcacggaauggucuccuugcuccgugaccugcgggaacggaauccagguccggauuaaacccggcagcgcugacaagccuaaaaaugagcuggauuacgaaaacgacaucgagaagaaaaucuguaagauggagaaguguucuuccguuuuuaauguggucaacagcucuauugggcuuaucauggugcuguccuuccucuuucugaacuga

SEQ ID NO: 4996 - RNA, 1251 nt, Artificial Sequence
  derived and/or modified CDS sequence (opt5) from Pf(Pal97-102)__BAM84954.1__CSP
augaugagaaagcuggccauccucagcguguccucuuuccuguuugucgaggcucuuuuccaggaauaccaaugcuauggcagcuccucuaacacccggguucugaaugagcucaacuacgacaaugccgggacaaaccuguauaaugaacuugagaugaacuacuauggaaaacaggaaaauugguacagccugaagaaaaacucccgcucucucggcgagaaugaugacgggaacaauaacaauggagauaacggcagagaggggaaggacgaagauaaacgggacggaaauaacgaggauaacgaaaagcugcgcaagcccaaacacaagaaacugaagcagccuggcgacggcaauccggaucccaacgcgaauccuaacguggaccccaaugcuaacccuaauguggaucccaacgccaauccuaacgucgacccgaaugccaaccccaaugcuaacccuaaugccaaccccaacgcuaauccuaacgccaaucccaacgcgaauccgaacgccaauccuaacgcuaaucccaacgccaauccuaacgcuaaucccaacgccaaucccaacgcgaacccuaaugccaacccgaaugcuaaccccaaugccaacccuaaugcuaaccccaaugccaacccuaaugccaaccccaaugcuaacccgaaugcgaacccuaacgccaaucccaacgcuaauccuaacgccaaucccaacgccaauccuaacgcuaaucccaacgccaauccgaacgcgaauccuaacgcuaaucccaacgccaaucccaacgccaacccuaaugcuaacccgaaugccaaccccaaugcuaacccuaaugccaaccccaaugcgaacccuaaugccaaccccaauaaaaacaaucaggggaacggacaaggccauaacaugccuaaugaucccaacagaaauguggacgagaacgcuaaugccaacaaugcuguuaagaacaauaacaaugaggaaccgagcgacaagcacauuaaagaguaucucacgaagauccagaacuccauuagcaccgaauggucuccuugcuccgugacaugcgggaauggaauccagguccggauuaaacccggcagcgccgggaagccuaaagaugagcugaacuacgaaaaugacaucgagaagaaaaucuguaagauggagaaguguucuuccguguuuaacguugugaacagcucuauuggacuuaucaugguccuguccuuccucuuucugaauuga

SEQ ID NO: 4997 - RNA, 1251 nt, Artificial Sequence
  derived and/or modified CDS sequence (opt5) from Pf(PNG227-255)__BAM85044.1__CSP
augaugagaaagcuggccauccucagcguguccucuuuccuguuugucgaggcucuuuuccaggaauaccaaugcuauggcagcuccucuaacacccggguucugaaugagcucaacuacgacaaugccgggacaaaccuguauaaugaacuugagaugaacuacuauggaaaacaggaaaauugguacagccugaagaaaaacucccgcucucucggcgagaaugaugacgggaacaauaacaauggagauaacggcagagaggggaaggacgaagauaaacgggacggaaauaacgaggauaacgaaaagcugcgcaagcccaaacacaagaaacugaagcagccuggcgacggcaauccggaucccaacgcgaauccuaacguggaccccaaugcuaacccuaauguggaucccaacgccaauccuaacgucgacccgaaugccaaccccaauguggauccuaacgcuaaucccaacgccaacccuaaugcuaaccccaaugccaacccgaaugcgaacccuaaugccaaccccaaugcuaacccuaaugccaaccccaaugcuaaccccaaugccaacccuaacgcgaauccgaacgccaaucccaacgcuaauccuaacgccaaucccaacguugacccuaaugcuaaccccaaugccaacccgaaugccaacccuaaugcuaaccccaacgcgaauccuaacgccaaucccaacgcuaauccuaacgccaaucccaacgccaauccgaacgcuaauccuaacgccaaucccaacgcgaaucccaacgcuaauccuaacgccaacccgaaugccaaccccaaugcuaacccuaaugccaaccccaaugcuaacccuaaugccaaccccaauaaaaacaaucaggggaacggacaaggccauaauaugccuaacgaccccaacagaaauguggaugagaacgcgaaugccaacaaugcugucaagaacaauaacaaugaggaaccgagcgacaagcacauugagcaguaucucaaaaagauccagaacucccugagcacggaauggucuccuugcuccgugaccugcgggaauggcauucagguucggaucaaacccggaagcgccgauaagccuaaagaccaacuugauuacgagaacgacauugaaaagaaaaucuguaagauggagaaguguucuuccguguuuaaugucgugaacagcucuaucgggcugauuauggugcucuccuuccuguuucuuaauuga

SEQ ID NO: 4998 - RNA, 1251 nt, Artificial Sequence
  derived and/or modified CDS sequence (opt5) from Pf(PNG228-063)__BAM85045.1__CSP
augaugagaaagcuggccauccucagcguguccucuuuccuguuugucgaggcucuuuuccaggaauaccagugcuauggcagcuccucuaacacccggguucugaaugagcucaacuacgacaaugccgggacaaaccuguauaaugaacuugagaugaacuacuauggaaaacaggaaaauugguacagccugaagaaaaacucccgcucucucggcgagaaugaugacgggaacaauaacaauggagauaacggcagagaggggaaggacgaagauaaacgggacggaaauaacgaggauaacgaaaagcugcgcaagcccaaacacaagaaacugaagcagccuggcgacggcaauccggaucccaacgcgaauccuaacguggaccccaaugcuaacccuaauguggaucccaacgccaauccuaacgucgacccgaaugccaaccccaaugcuaacccuaaugccaaccccaacgcuaauccuaacgccaaucccaacgcgaauccgaacgccaauccuaacgcuaaucccaacgccaauccuaacgcuaaucccaacgccaaucccaacgcgaacccuaaugccaacccgaaugcuaaccccaaugccaacccuaaugcuaaccccaauguggauccuaacgccaaucccaacgccaauccgaacgcuaauccuaacgcgaaccccaaugccaacccuaaugcuaaccccaaugccaacccuaaugccaaccccaaugcuaacccgaaugccaacccuaaugcgaaccccaaugcuaaccccaaugccaacccuaacgccaauccgaacgcuaaucccaacgccaauccuaacgcuaaucccaacgccaauccuaacgcgaaucccaacaaaaauaaccaggggaauggacaaggccauaacaugccuaacgaccccaauagaaacguugacgagaaugccaacgcuaauaacgccgugaagaauaacaauaacgaggaaccgagcgauaagcacauugagcaguaucucaaaaagauccaaaauucccugagcacggaauggucuccuuguuccgugaccugcgggaacggcauucagguccggaucaaacccggaagcgcugggaagucuaaagacgagcuugauuacgaaaaugacauugagaagaaaaucuguaagauggagaagugcuccagcguuuuuaacguggucaauucuuccaucggacugauuauggugcucagcuuccuguuucuuaacuga

SEQ ID NO: 4999 - RNA, 1251 nt, Artificial Sequence
  derived and/or modified CDS sequence (opt5) from Pf(PNG830-058)__BAM84987.1__CSP
augaugagaaagcuggccauccucagcguguccucuuuccuguuugucgaggcucuuuuccaggaauaccagugcuauggcagcuccucuaacacccggguucugaaugagcucaacuacgacaaugccgggacaaaccuguauaaugaacuugagaugaacuacuauggaaaacaggaaaauugguacagccugaagaaaaacucccgcucucucggcgagaaugaugacgggaacaauaacaauggagauaacggcagagaggggaaggacgaagauaaacgggacggaaauaacgaggauaacgaaaagcugcgcaagcccaaacacaagaaacugaagcagccuggcgacggcaauccggaucccaacgcgaauccuaacguggaccccaaugcuaacccuaauguggaucccaacgccaauccuaacgucgacccgaaugccaaccccaauguggauccuaacgcuaaucccaacgccaacccuaaugcuaaccccaaugccaacccgaaugcgaacccuaaugccaaccccaaugcuaacccuaaugccaaccccaaugcuaaccccaaugccaacccuaacgcgaauccgaacgccaaucccaacgcuaauccuaacgccaaucccaacgcuaauccuaacgccaaucccaacgccaauccgaacgcuaauccuaacgcgaaccccaaugccaacccuaaugcuaaccccaaugccaacccuaaugccaaccccaaugcuaacccgaaugccaacccuaaugcgaaccccaaugcuaaccccaaugccaacccuaacgccaauccgaacgcuaaucccaacgccaauccuaacgcuaaucccaacgccaauccuaacgcgaaucccaacaaaaauaaccaggggaauggacaaggccauaacaugccuaacgaccccaauagaaacguugacgagaaugccaacgcuaauaacgccgugaagaauaacaauaacgaggaaccgagcgauaagcacauugagcaguaucucaaaaagauccaaaauucccugagcacggaauggucuccuugcuccgugaccugcgggaacggcauucagguccggaucaaacccggaagcgcuaauaagccuaaagacgagcuugauuacgaaaacgacauugagaagaaaaucuguaagauggagaaguguucuuccguuuuuaauguggucaacagcucuaucgggcugauuauggugcucuccuuccuguuucuuaacuga

SEQ ID NO: 5000 - RNA, 1251 nt, Artificial Sequence
  derived and/or modified CDS sequence (opt5) from Pf(PNG903-136)__BAM84993.1__CSP
augaugagaaagcuggccauccucagcguguccucuuuccuguuugucgaggcucuuuuccaggaauaccagugcuauggcagcuccucuaacacccggguucugaaugagcucaacuacgacaaugccgggacaaaccuguauaaugaacuugagaugaacuacuauggaaaacaggaaaauugguacagccugaagaaaaacucccgcucucucggcgagaaugaugacgggaacaauaacaauggagauaacggcagagaggggaaggacgaagauaaacgggacggaaauaacgaggauaacgaaaagcugcgcaagcccaaacacaagaaacugaagcagccuggcgacggcaauccggaucccaacgcgaauccuaacguggaccccaaugcuaacccuaauguggaucccaacgccaauccuaacgucgacccgaaugccaaccccaaugcuaacccuaaugccaaccccaacgcuaauccuaacgccaaucccaacgcgaauccgaacgccaauccuaacgcuaaucccaacgccaauccuaacgcuaaucccaacgccaaucccaacgcgaacccuaaugccaacccgaaugcuaaccccaaugccaacccuaaugcuaaccccaauguggauccuaacgccaaucccaacgccaauccgaacgcuaauccuaacgcgaaccccaaugccaacccuaaugcuaaccccaaugccaacccuaaugccaaccccaaugcuaacccgaaugccaacccuaaugcgaaccccaaugcuaaccccaaugccaacccuaacgccaauccgaacgcuaaucccaacgccaauccuaacgcuaaucccaacgccaauccuaacgcgaaucccaacaaaaauaaccaggggaauggacaaggccauaacaugccuaacgaccccaauagaaacguugacgagaaugccaacgcuaauaacgccgugaagaauaacaauaacgaggaaccgagcgauaagcacauugagcaguaucucaaaaagauccaaaauucccugagcacggaauggucuccuugcuccgugaccugcgggaacggcauucagguccggaucaaacccggaagcgcuaauaagccuaaagacgagcuugauuacgaaaacgacauugagaagaaaaucuguaagauggagaaguguucuuccguuuuuaauguggucaacagcucuaucgggcugauuauggugcucuccuuccuguuucuuaacuga

SEQ ID NO: 5001 - RNA, 1251 nt, Artificial Sequence
  derived and/or modified CDS sequence (opt5) from Pf(Tz03-086)__BAM84805.1__CSP
augaugagaaagcuggccauccucagcguguccucuuuccuguuugucgaggcucuuuuccaggaauaccagugcuauggcagcuccucuaacacccggguucugaaugagcucaacuacgacaaugccgggacaaaccuguauaaugaacuugagaugaacuacuauggaaaacaggaaaauugguacagccugaagaaaaacucccgcucucucggcgagaaugaugacgggaacaauaacaauggagauaacggcagagaggggaaggacgaagauaaacgggacggaaauaacgaggauaacgaaaagcugcgcaagcccaaacacaagaaacugaagcagccugcggacggcaauccggaucccaacgcuaauccuaacguggaccccaaugccaacccuaauguggaucccaacgccaauccuaacgucgacccgaaugcuaaccccaaugccaacccuaaugcuaaccccaacgccaauccuaacgcgaaucccaacgccaauccgaacgcuaauccuaacgccaaucccaacgcuaauccuaacgccaaucccaacgcgaaucccaacgccaacccuaaugcuaacccgaaugccaaccccaaugcuaacccuaaugccaaccccaaugccaacccuaaugcuaaccccaauguggauccgaacgcgaauccuaacgccaaccccaaugcuaacccuaaugccaaccccaaugccaacccuaaugcuaaccccaaugccaacccgaaugcgaacccuaaugcuaaccccaaugccaaccccaaugccaacccuaacgcuaauccgaacgccaaucccaacgcuaauccuaacgccaaucccaacgcgaauccuaacgccaaucccaacaaaaauaaccagggcaaugggcaaggacauaacaugccuaacgaccccaauagaaacguugacgagaaugcuaacgccaauaacgcugugaagaauaacaauaacgaggaaccgagcgauaagcacauuacggaguaucucaaaaagauccaaaauucccugagcaccgaauggucuccuuguuccgucacaugcggcaacgggauucaggugcggaucaaacccggaagcgccggcaagucuaaaaaugagcuugacuacgaaaacgauauugagaagaaaaucuguaagauggagaagugcuccagcguuuuuaauguggucaacucuuccaucgggcugauuauggugcucagcuuccuguuucuuaacuga

SEQ ID NO: 5002 - RNA, 1251 nt, Artificial Sequence
  derived and/or modified CDS sequence (opt5) from Pf(Tz93-009)__BAM84750.1__CSP
augaugagaaagcuggccauccucagcguguccucuuuccuguuugucgaggcucuuuuccaggaauaccaaugcuauggcagcuccucuaacacccggguucugaaugagcucaacuacgacaaugccgggacaaaccuguauaaugaacuugagaugaacuacuauggaaaacaggaaaauugguacagccugaagaaaaacucccgcucucucggcgagaaugaugacgggaacaauaacaauggagauaacggcagagaggggaaggacgaagauaaacgggacggaaauaacgaggauaacgaaaagcugcgcaagcccaaacacaagaaacugaagcagccuggcgacggcaauccggaucccaacgcgaauccuaacguggaccccaaugcuaacccuaauguggaucccaacgccaauccuaacgucgacccgaaugccaaccccaaugcuaacccuaaugccaaccccaacgcuaauccuaacgccaaucccaacgcgaauccgaacgccaauccuaacgcuaaucccaacgccaauccuaacgcuaaucccaacgccaaucccaacgcgaacccuaaugccaacccgaaugcuaaccccaaugccaacccuaaugcuaaccccaauguggauccuaacgccaaucccaacgccaauccgaacgcuaauccuaacgcgaaccccaaugccaacccuaaugcuaaccccaaugccaacccuaaugccaaccccaaugcuaacccgaaugccaacccuaaugcgaaccccaaugcuaaccccaaugccaacccuaacgccaauccgaacgcuaaucccaacgccaauccuaacgcuaaucccaacgccaauccuaacgcgaaucccaacaaaaauaaccaggggaauggacaaggccauaacaugccuaacgaccccaauagaaacguugacgagaaugccaacgcuaauaacgccgugaagaauaacaauaacgaggaaccgagcgauaagcacauuaaagaguaucucacgaagaucaaaaauuccauuagcaccgaauggucuccuugcuccgucacaugcgggaacggaauccaggugcggauuaagcccggcagcgcuaauaaaccuaaggacgagcuggauuacgaaaacgacaucgagaaaaagaucuguaagauggagaaauguucuuccguuuuuaauguggucaacagcucuauugggcuuaucauggugcuguccuuccucuuucugaacuga

SEQ ID NO: 5003 - RNA, 1251 nt, Artificial Sequence
  derived and/or modified CDS sequence (opt5) from Pf(Van98M305-147)__BAM85260.1__CSP
augaugagaaagcuggccauccucagcguguccucuuuccuguuugucgaggcucuuuuccaggaauaccaaugcuauggcagcuccucuaacacccggguucugaaugagcucaacuacgacaaugccgggacaaaccuguauaaugaacuugagaugaacuacuauggaaaacaggaaaauugguacagccugaagaaaaacucccgcucucucggcgagaaugaugacgggaacaauaacaauggagauaacggcagagaggggaaggacgaagauaaacgggacggaaauaacgaggauaacgaaaagcugcgcaagcccaaacacaagaaacugaagcagccuggcgacggcaauccggaucccaacgcgaauccuaacguggaccccaaugcuaacccuaauguggaucccaacgccaauccuaacgucgacccgaaugccaaccccaaugcuaacccuaaugccaaccccaacgcuaauccuaacgccaaucccaacgcgaauccgaacgccaauccuaacgcuaaucccaacgccaauccuaacgcuaaucccaacgccaaucccaacgcgaacccuaaugccaacccgaaugcuaaccccaaugccaacccuaaugcuaaccccaauguggauccuaacgccaaucccaacgccaauccgaacgcuaauccuaacgcgaaccccaaugccaacccuaaugcuaaccccaaugccaacccuaaugccaaccccaaugcuaacccgaaugccaacccuaaugcgaaccccaaugcuaaccccaaugccaacccuaacgccaauccgaacgcuaaucccaacgccaauccuaacgcuaaucccaacgccaauccuaacgcgaaucccaacaaaaauaaccaggggaauggacaaggccauaacaugccuaacgaccccaauagaaacguugacgagaaugccaacgcuaauaacgccgugaagaauaacaauaacgaggaaccgagcgauaagcacauugagcaguaucucaaaaagauccaaaauucccugagcacggaauggucuccuugcuccgugaccugcgggaacggcauucagguccggaucaaacccggaagcgcugacaagccuaaagaucagcuugacuacgagaaugauauugaaaagaaaaucuguaagauggagaaguguucuuccguuuuuaacguggucaauagcucuaucgggcugauuauggugcucuccuuccuguuucuuaacuga

SEQ ID NO: 5004 - RNA, 1251 nt, Artificial Sequence
  derived and/or modified CDS sequence (opt5) from Pf(Van98P226-97)__BAM85298.1__CSP
augaugagaaagcuggccauccucagcguguccucuuuccuguuugucgaggcucuuuuccaggaauaccaaugcuauggcagcuccucuaacacccggguucugaaugagcucaacuacgacaaugccgggacaaaccuguauaaugaacuugagaugaacuacuauggaaaacaggaaaauugguacagccugaagaaaaacucccgcucucucggcgagaaugaugacgggaacaauaacaauggagauaacggcagagaggggaaggacgaagauaaacgggacggaaauaacgaggauaacgaaaagcugcgcaagcccaaacacaagaaacugaagcagccuggcgacggcaauccggaucccaacgcgaauccuaacguggaccccaaugcuaacccuaauguggaucccaacgccaauccuaacgucgacccgaaugccaaccccaaugcuaacccuaaugccaaccccaacgcuaauccuaacgccaaucccaacgcgaauccgaacgccaauccuaacgcuaaucccaacgccaauccuaacgcuaaucccaacgccaaucccaacgcgaacccuaaugccaacccgaaugcuaaccccaaugccaacccuaaugcuaaccccaaugccaacccuaaugccaaccccaaugcuaacccgaaugcgaacccuaacgccaaucccaacgcuaauccuaacgccaaucccaacgccaauccuaacgcuaaucccaacgccaauccgaacgcgaauccuaacgcuaaucccaacgccaaucccaacgccaacccuaaugcuaacccgaaugccaaccccaaugcuaacccuaaugccaaccccaaugcgaacccuaaugccaaccccaauaaaaacaaucaggggaacggacaaggccauaacaugccuaaugaucccaacagaaauguggacgagaacgcuaaugccaacaaugcuguuaagaacaauaacaaugaggaaccgagcgacaagcacauugagcaguaucucaaaaagauccagaacucccugagcacggaauggucuccuugcuccgugaccugcgggaauggcauucagguccggaucaaacccggaagcgccaacaagccuaaagaugagcuugacuacgaaaaugauauugagaagaaaaucuguaagauggagaaguguucuuccguguuuaacguugugaacagcucuaucgggcugauuaugguccucuccuuccuguuucuuaauuga

SEQ ID NO: 5005 - RNA, 1251 nt, Artificial Sequence
  derived and/or modified CDS sequence (opt5) from Pf(Yaounde)__AAN87614.1__CSP
augaugagaaagcuggccauccucagcguguccucuuuccuguuugucgaggcucuuuuccaggaauaccaaugcuauggcagcuccucuaacacccggguucugaaugagcucaacuacgacaaugccgggacaaaccuguauaaugaacuugagaugaacuacuauggaaaacaggaaaauugguacagccugaagaaaaacucccgcucucucggcgagaaugaugacgggaacaauaacaauggagauaacggcagagaggggaaggacgaagauaaacgggacggaaauaacgaggauaacgaaaagcugcgcaagcccaaacacaagaaacugaagcagccugcggacggcaauccggaucccaacgcuaauccuaacguggaccccaaugccaacccuaauguggaucccaacgccaauccuaacgucgacccgaaugcuaaccccaaugccaacccuaaugcuaaccccaacgccaauccuaacgcgaaucccaacgccaauccgaacgcuaauccuaacgccaaucccaacgcuaauccuaacgccaaucccaacgcgaaucccaacgccaacccuaaugcuaacccgaauguggaucccaacgccaauccuaacgcuaaucccaacgccaauccuaacgccaaucccaacgcuaauccgaacgcgaauccuaacgccaaccccaaugcuaacccuaaugccaaccccaaugccaacccuaaugcuaaccccaaugccaacccgaaugcgaacccuaaugcuaaccccaaugccaaccccaaugccaacccuaacgcuaauccgaacgccaaucccaacgcuaauccuaacgccaaucccaacgcgaauccuaacgccaaucccaacaaaaauaaccagggcaaugggcaaggacauaacaugccuaacgaccccaauagaaacguugacgagaaugcuaacgccaauaacgcugugaagaauaacaauaacgaggaaccgagcgaucagcacauugagaaguaucucaaaaucauuaaaaauucccugagcacggaauggucuccuugcuccgugaccugcggcaacgggauccagguccggauuaagcccggaagcgccaauaagccuaaagaccagcuugauuacgcgaacgacaucgagaagaaaaucuguaagauggaaaaguguucuuccguuuuuaauguggucaacagcucuauuggccugaucauggugcucuccuuccuguuucuuaacuga

SEQ ID NO: 5006 - RNA, 1248 nt, Artificial Sequence
  derived and/or modified CDS sequence (opt5) from Pf(A98)__ACO49328.1__CSP
augagaaagcuggccauccucagcguguccucuuuccuguuugucgaggcucuuuuccaggaauaccagugcuauggcagcuccucuaacacccggguucugaaugagcucaacuacgacaaugccgggacaaaccuguauaaugaacuugagaugaacuacuauggaaaacaggaaaauugguacagccugaagaaaaacucccgcucucucggcgagaaugaugacgggaacaauaacaauggagauaacggcagagaggggaaggacgaagauaaacgggacggaaauaacgaggauaacgaaaagcugcgcaagcccaaacacaagaaacugaagcagccuggcgacggcaauccggaucccaacgcgaauccuaacguggaccccaaugcuaacccuaauguggaucccaacgccaauccuaacgucgacccgaaugccaaccccaaugcuaacccuaaugccaaccccaacgcuaauccuaacgccaaucccaacgcgaauccgaacgccaauccuaacgcuaaucccaacgccaauccuaacgcuaaucccaacgccaaucccaacgcgaacccuaaugccaacccgaaugcuaaccccaaugccaacccuaaugcuaaccccaaugccaacccuaaugccaaccccaaugcuaacccgaaugcgaacccuaacgccaaucccaacgcuaauccuaacgccaaucccaacgccaauccuaacgcuaaucccaacgccaauccgaacgcgaauccuaacgcuaaucccaacgccaaucccaacgccaacccuaaugcuaacccgaaugccaaccccaaugcuaacccuaaugccaaccccaaugcgaacccuaaugccaaccccaauaaaaacaaucaggggaacggacaaggccauaacaugccuaaugaucccaacagaaauguggacgagaacgcuaaugccaacaaugcuguuaagaacaauaacaaugaggaaccgagcgacaagcacauugagcaguaucucaaaaacauccaaaauucccugagcacggaauggucuccuugcuccgugaccugcgggaacggcauucagguccggaucaagcccggaagcgccaauaaaccuaaggaugagcuugacuacgaaaacgauauugagaaaaagaucuguaaaauggagaaguguucuuccguguuuaacguugugaauagcucuaucgggcugauuaugguccucuccuuccuguuucuuaacuga

SEQ ID NO: 5007 - RNA, 1248 nt, Artificial Sequence
  derived and/or modified CDS sequence (opt5) from Pf(B60)__ACO49339.1__CSP
augagaaagcuggccauccucagcguguccucuuuccuguuugucgaggcucuuuuccaggaauaccagugcuauggcagcuccucuaacacccggguucugaaugagcucaacuacgacaaugccgggacaaaccuguauaaugaacuugagaugaacuacuauggaaaacaggaaaauugguacagccugaagaaaaacucccgcucucucggcgagaaugaugacgggaacaauaacaauggagauaacggcagagaggggaaggacgaagauaaacgggacggaaauaacgaggauaacgaaaagcugcgcaagcccaaacacaagaaacugaagcagccuggcgacggcaauccggaucccaacgcgaauccuaacguggaccccaaugcuaacccuaauguggaucccaacgccaauccuaacgucgacccgaaugccaaccccaauguggauccuaacgcuaaucccaacgccaacccuaaugcuaaccccaaugccaacccgaaugcgaacccuaaugccaaccccaaugcuaacccuaaugccaaccccaaugcuaaccccaaugccaacccuaacgcgaauccgaacgccaaucccaacgcuaauccuaacgccaaucccaacgcuaauccuaacgccaaucccaacgccaauccgaacgcuaauccuaacgcgaaccccaaugccaacccuaaugcuaaccccaaugccaacccuaaugccaaccccaaugcuaacccgaaugccaacccuaaugcgaaccccaaugcuaaccccaaugccaacccuaacgccaauccgaacgcuaaucccaacgccaauccuaacgcuaaucccaacgccaauccuaacgcgaaucccaacaaaaauaaccaggggaauggacaaggccauaacaugccuaacgaccccaauagaaacguugacgagaaugccaacgcuaauaacgccgugaagaauaacaauaacgaggaaccgagcgauaagcacauugagcaguaucucaaaaagauccaaaauucccugagcacggaauggucuccuugcuccgugaccugcgggaacggcauucagguccggaucaaacccggaagcgcuaauaagccuaaagacgagcuugauuacgaaaacgacauugagaagaaaaucuguaagauggagaaguguucuuccguuuuuaauguggucaacagcucuaucgggcugauuauggugcucuccuuccuguuucuuaacuga

SEQ ID NO: 5008 - RNA, 1248 nt, Artificial Sequence
  derived and/or modified CDS sequence (opt5) from Pf(TM323)__ACO49493.1__CSP
augagaaagcuggccauccucagcguguccucuuuccuguuugucgaggcucuuuuccaggaauaccaaugcuauggcagcuccucuaacacccggguucugaaugagcucaacuacgacaaugccgggacaaaccuguauaaugaacuugagaugaacuacuauggaaaacaggaaaauugguacagccugaagaaaaacucccgcucucucggcgagaaugaugacgggaacaauaacaauggagauaacggcagagaggggaaggacgaagauaaacgggacggaaauaacgaggauaacgaaaagcugcgcaagcccaaacacaagaaacugaagcagccuggcgacggcaauccggaucccaacgcgaauccuaacguggaccccaaugcuaacccuaauguggaucccaacgccaauccuaacgucgacccgaaugccaaccccaaugcuaacccuaaugccaaccccaacgcuaauccuaacgccaaucccaacgcgaauccgaacgccaauccuaacgcuaaucccaacgccaauccuaacgcuaaucccaacgccaaucccaacgcgaacccuaaugccaacccgaaugcuaaccccaaugccaacccuaaugcuaaccccaaugccaacccuaaugccaaccccaaugcuaacccgaaugcgaacccuaacgccaaucccaacgcuaauccuaacgccaaucccaacgccaauccuaacgcuaaucccaacgccaauccgaacgcgaauccuaacgcuaaucccaacgccaaucccaacgccaacccuaaugcuaacccgaaugccaaccccaaugcuaacccuaaugccaaccccaaugcgaacccuaaugccaaccccaauaaaaacaaucaggggaacggacaaggccauaacaugccuaaugaucccaacagaaauguggacgagaacgcuaaugccaacaaugcuguuaagaacaauaacaaugaggaaccgagcgacaagcacauugagaaauaucucaaggaaauccagaacucccugagcacggaguggucuccuugcuccgugaccugcgggaauggcauucagguccggaucaaacccggaagcgccaacaagccuaaagaucagcuugacuacgaaaaugauauugagaagaaaaucuguaagauggagaaguguucuuccguguuuaacguugugaacagcucuaucgggcugauuaugguccucuccuuccuguuucuuaauuga

SEQ ID NO: 5009 - RNA, 1239 nt, Artificial Sequence
  derived and/or modified CDS sequence (opt5) from Pf(22)__AGR53780.1__CSP
augaugagaaagcuggccauccucagcguguccucuuuccuguuugucgaggcucuuuuccaggaauaccaaugcuauggcagccccuccaacacccggguucugaaugagcucaacuacgacaaugccgggacaaaccuguauaaugaacuugagaugaacuacuauggaaaacaggaaaauugguacucucugaagaaaaacagccgcucccucggcgagaaugaugacgggaacaauaacaauggagauaacggcagagaggggaaggacgaagauaaacgggacggaaauaacgaggauaacgaaaagcugcgcaagccuaaacacaagaaacugaagcagccggcggacggcaaucccgauccuaacgcuaaucccaacguggacccuaaugccaaccccaauguggauccuaacgccaauccgaacgucgaccccaaugcuaacccuaaugccaaccccaaugcuaacccuaacgccaaucccaacgcgaauccgaacgccaauccuaacgcuaaucccaacgccaauccuaacgcuaaucccaacgccaaucccaacgcgaauccuaacgccaacccgaaugcuaaccccaaugccaacccuaaugcuaaccccaauguggauccuaacgccaaucccaacgccaauccgaacgcuaauccuaacgcgaaucccaacgccaacccuaaugcuaaccccaaugccaacccuaaugccaaccccaaugcuaacccgaaugccaacccuaaugcgaaccccaaugcuaaccccaaugccaacccuaaugccaacccgaacgcuaaucccaacgccaauccuaacgcuaaucccaacgccaauccuaacgcgaaucccaacaaaaauaaccagggcaaugggcaaggacauaacaugccuaaugaccccaacagaaacguugacgagaaugccaacgcuaauaacgccgugaagaauaacaauaacgaggaaccgucugauaagcacauugagcaguaucucaaaacgaucaagaauagccuguccaccgaauggagcccuuguucugucacaugcggcaacgggauucaggugcggaucaaacccggauccgcuaauaagccuaaagacgagcuuaacuacgaaaaugauauugagaagaaaaucuguaagauggagaagugcagcucuguuuuuaacguggucaauuccagcaucggccugauuauggugcucucuuuccuguuucuuaacuga

SEQ ID NO: 5010 - RNA, 1239 nt, Artificial Sequence
  derived and/or modified CDS sequence (opt5) from Pf(Amazonas)__AAN87605.1__CSP
augaugagaaagcuggccauccucagcguguccucuuuccuguuugucgaggcucuuuuccaggaauaccagugcuauggcagcuccucuaacacccggguucugaaugagcucaacuacgacaaugccgggacaaaccuguauaaugaacuugagaugaacuacuauggaaaacaggaaaauugguacagccugaagaaaaacucccgcucucucggcgagaaugaugacgggaacaauaacaauggagauaacggcagagaggggaaggacgaagauaaacgggacggaaauaacgaggauaacgaaaagcugcgcaagcccaaacacaagaaacugaagcagccugcggacggcaauccggaucccaacgcuaauccuaacguggaccccaaugccaacccuaauguggaucccaacgccaauccuaacgucgacccgaaugcuaaccccaaugccaacccuaaugcuaaccccaacgccaauccuaacgcgaaucccaacgccaauccgaacgcuaauccuaacgccaaucccaacgcuaauccuaacgccaaucccaacgcgaaucccaacgccaacccuaaugcuaacccgaaugccaaccccaaugcuaacccuaauguggaucccaacgccaauccuaacgccaaucccaacgcuaauccgaacgcgaauccuaacgccaaccccaaugcuaacccuaaugccaaccccaaugccaacccuaaugcuaaccccaaugccaacccgaaugcgaacccuaaugcuaaccccaaugccaaccccaaugccaacccuaacgcuaauccgaacgccaaucccaacgcuaauccuaacgccaaucccaacgcgaauccuaacaaaaauaaccagggcaaugggcaaggacauaacaugcccaaugacccuaacagaaacguugacgagaaugccaacgcuaauaacgccgugaagaauaacaauaacgaggaacccagcgaucagcacauugagaaguaucucaaacggauccaaaauucccugagcacggaauggucuccgugcuccgugaccugcggcaacgggauucagguccgcaucaagccuggaagcgcuaauaaacccaaggacgagcuugauuacgaaaacgacauugagaaaaagaucuguaaaauggagaaguguucuuccguuuuuaauguggucaacagcucuaucggccugauuauggugcucuccuuccuguuucuuaauuga

SEQ ID NO: 5011 - RNA, 1239 nt, Artificial Sequence
  derived and/or modified CDS sequence (opt5) from Pf(Amazonas)__AAN87598.1__CSP
augaugagaaagcuggccauccucagcguguccucuuuccuguuugucgaggcucuuuuccaggaauaccagugcuauggcagcuccucuaacacccggguucugaaugagcucaacuacgacaaugccgggacaaaccuguauaaugaacuugagaugaacuacuauggaaaacaggaaaauugguacagccugaagaaaaacucccgcucucucggcgagaaugaugacgggaacaauaacaauggagauaacggcagagaggggaaggacgaagauaaacgggacggaaauaacgaggauaacgaaaagcugcgcaagcccaaacacaagaaacugaagcagccugcggacggcaauccggaucccaacgcuaauccuaacguggaccccaaugccaacccuaauguggaucccaacgccaauccuaacgucgacccgaaugcuaaccccaaugccaacccuaaugcuaaccccaacgccaauccuaacgcgaaucccaacgccaauccgaacgcuaauccuaacgccaaucccaacgcuaauccuaacgccaaucccaacgcgaaucccaacgccaacccuaaugcuaacccgaaugccaaccccaaugcuaacccuaauguggaucccaacgccaauccuaacgccaaucccaacgcuaauccgaacgcgaauccuaacgccaaccccaaugcuaacccuaaugccaaccccaaugccaacccuaaugcuaaccccaaugccaacccgaaugcgaacccuaaugcuaaccccaaugccaaccccaaugccaacccuaacgcuaauccgaacgccaaucccaacgcuaauccuaacgccaaucccaacgcgaauccuaacaaaaauaaccagggcaaugggcaaggacauaacaugcccaaugacccuaacagaaacguugacgagaaugccaacgcuaauaacgccgugaagaauaacaauaacgaggaacccagcgauaagcacauuaaagaguaucucaagaucauucaaaauucccugagcacggaauggucuccgugcuccgugaccugcggcaacgggauccagguccggauuaaaccuggaagcgcuggcaagcccaaagacgagcuugauuacgccaaugacaucgaaaagaaaaucuguaagauggagaaguguucuuccguuuuuaacguggucaauagcucuauugggcugaucauggugcucuccuuccuguuucuuaacuga

SEQ ID NO: 5012 - RNA, 1239 nt, Artificial Sequence
  derived and/or modified CDS sequence (opt5) from Pf(Asembo Bay)__AAN87611.1__CSP
augaugagaaagcuggccauccucagcguguccucuuuccuguuugucgaggcucuuuuccaggaauaccaaugcuauggcagcuccucuaacacccggguucugaaugagcucaacuacgacaaugccgggacaaaccuguauaaugaacuugagaugaacuacuauggaaaacaggaaaauugguacagccugaagaaaaacucccgcucucucggcgagaaugaugacgggaacaauaacaauggagauaacggcagagaggggaaggacgaagauaaacgggacggaaauaacgaggauaacgaaaagcugcgcaagcccaaacacaagaaacugaagcagccugcggacggcaauccggaucccaacgcuaauccuaacguggaccccaaugccaacccuaauguggaucccaacgccaauccuaacgucgacccgaaugcuaaccccaaugccaacccuaaugcuaaccccaacgccaauccuaacgcgaaucccaacgccaauccgaacgcuaauccuaacgccaaucccaacgcuaauccuaacgccaaucccaacgcgaaucccaacgccaacccuaaugcuaacccgaaugccaaccccaaugcuaacccuaaugccaaccccaaugccaacccuaauguggaucccaacgcuaauccgaacgcgaauccuaacgccaaccccaaugcuaacccuaaugccaaccccaaugccaacccuaaugcuaaccccaaugccaacccgaaugcgaacccuaaugcuaaccccaaugccaaccccaaugccaacccuaacgcuaauccgaacgccaaucccaacgcuaauccuaacgccaaucccaacgcgaauccuaacaaaaauaaccagggcaaugggcaaggacauaacaugcccaaugacccuaacagaaacguugacgagaaugccaacgcuaauaacgccgugaagaauaacaauaacgaggaacccagcgauaagcacauugagcaguaucucaaaaucauuaaaaauucccugagcacggaauggucuccgugcuccgugaccugcggcaacgggauccagguccggauuaagccuggaagcgcuaauaagcccaaagacgagcuugauuacgccaacgacaucgaaaagaaaaucuguaagauggagaaguguucuuccguuuuuaauguggucaacagcucuauuggccugaucauggugcucuccuuccuguuucuuaauuga

SEQ ID NO: 5013 - RNA, 1239 nt, Artificial Sequence
  derived and/or modified CDS sequence (opt5) from Pf(Asembo Bay)__AAN87589.1__CSP
augaugagaaagcuggccauccucagcguguccucuuuccuguuugucgaggcucuuuuccaggaauaccaaugcuauggcagcuccucuaacacccggguucugaaugagcucaacuacgacaaugccgggacaaaccuguauaaugaacuugagaugaacuacuauggaaaacaggaaaauugguacagccugaagaaaaacucccgcucucucggcgagaaugaugacgggaacaauaacaauggagauaacggcagagaggggaaggacgaagauaaacgggacggaaauaacgaggauaacgaaaagcugcgcaagcccaaacacaagaaacugaagcagccugcggacggcaauccggaucccaacgcuaauccuaacguggaccccaaugccaacccuaauguggaucccaacgccaauccuaacgucgacccgaaugcuaaccccaaugccaacccuaaugcuaaccccaacgccaauccuaacgcgaaucccaacgccaauccgaacgcuaauccuaacgccaaucccaacgcuaauccuaacgccaaucccaacgcgaaucccaacguggauccuaacgccaauccgaacgcuaaucccaacgccaauccuaacgcuaaucccaacgccaauccuaacgccaaucccaacgcuaauccgaacgcgaauccuaacgccaaccccaaugcuaacccuaaugccaaccccaaugccaacccuaaugcuaaccccaaugccaacccgaaugcgaacccuaaugcuaaccccaaugccaaccccaaugccaacccuaacgcuaauccgaacgccaaucccaacgcuaauccuaacgccaaucccaacgcgaauccuaacaaaaauaaccagggcaaugggcaaggacauaacaugcccaaugacccuaacagaaacguugacgagaaugccaacgcuaauaacgccgugaagaauaacaauaacgaggaacccagcgaucagcacauugagaaguaucucaaaaagauccaaaauucccugagcacggaauggucuccgugcuccgugaccugcggcaacgggauucagguccggaucaaaccuggaagcgcuaauaagcccaaagaccagcuugauuacgccaacgacauugagaagaaaaucuguaagauggaaaaguguucuuccguuuuuaauguggucaacagcucuaucggccugauuauggugcucuccuuccuguuucuuaauuga

SEQ ID NO: 5014 - RNA, 1239 nt, Artificial Sequence
  derived and/or modified CDS sequence (opt5) from Pf(BrB1)__BAM85131.1__CSP
augaugagaaagcuggccauccucagcguguccucuuuccuguuugucgaggcucuuuuccaggaauaccaaugcuauggcagcuccucuaacacccggguucugaaugagcucaacuacgacaaugccgggacaaaccuguauaaugaacuugagaugaacuacuauggaaaacaggaaaauugguacagccugaagaaaaacucccgcucucucggcgagaaugaugacgggaacaauaacaauggagauaacggcagagaggggaaggacgaagauaaacgggacggaaauaacgaggauaacgaaaagcugcgcaagcccaaacacaagaaacugaagcagccugcggacggcaauccggaucccaacgcuaauccuaacguggaccccaaugccaacccuaauguggaucccaacgccaauccuaacgucgacccgaaugcuaaccccaaugccaacccuaaugcuaaccccaacgccaauccuaacgcgaaucccaacgccaauccgaacgcuaauccuaacgccaaucccaacgcuaauccuaacgccaaucccaacgcgaaucccaacgccaacccuaaugcuaacccgaaugccaaccccaaugcuaacccuaauguggaucccaacgccaauccuaacgccaaucccaacgcuaauccgaacgcgaauccuaacgccaaccccaaugcuaacccuaaugccaaccccaaugccaacccuaaugcuaaccccaaugccaacccgaaugcgaacccuaaugcuaaccccaaugccaaccccaaugccaacccuaacgcuaauccgaacgccaaucccaacgcuaauccuaacgccaaucccaacgcgaauccuaacaaaaauaaccagggcaaugggcaaggacauaacaugcccaaugacccuaacagaaacguugacgagaaugccaacgcuaauaacgccgugaagaauaacaauaacgaggaacccagcgauaagcacauugagcaguaucucaaaaagaucaaaaauuccauuagcacggaauggucuccgugcuccgugaccugcggcaacgggauccagguccggauuaagccuggaagcgcuaauaaacccaaggacgagcuggauuacgaaaacgacaucgagaaaaagaucuguaagauggagaaauguucuuccguuuuuaauguggucaacagcucuauuggccuuaucauggugcuguccuuccucuuucugaauuga

SEQ ID NO: 5015 - RNA, 1239 nt, Artificial Sequence
  derived and/or modified CDS sequence (opt5) from Pf(BrP9)__BAM85145.1__CSP
augaugagaaagcuggccauccucagcguguccucuuuccuguuugucgaggcucuuuuccaggaauaccaaugcuauggcagcuccucuaacacccggguucugaaugagcucaacuacgacaaugccgggacaaaccuguauaaugaacuugagaugaacuacuauggaaaacaggaaaauugguacagccugaagaaaaacucccgcucucucggcgagaaugaugacgggaacaauaacaauggagauaacggcagagaggggaaggacgaagauaaacgggacggaaauaacgaggauaacgaaaagcugcgcaagcccaaacacaagaaacugaagcagccuggcgacggcaauccggaucccaacgcgaauccuaacguggaccccaaugcuaacccuaauguggaucccaacgccaauccuaacgucgacccgaaugccaaccccaaugcuaacccuaaugccaaccccaacgcuaauccuaacgccaaucccaacgcgaauccgaacgccaauccuaacgcuaaucccaacgccaauccuaacgcuaaucccaacgccaaucccaacgcgaacccuaaugccaacccgaaugcuaaccccaaugccaacccuaauguggaucccaacgcuaauccuaacgccaaucccaacgccaauccgaacgcuaauccuaacgcgaaccccaaugccaacccuaaugcuaaccccaaugccaacccuaaugccaaccccaaugcuaacccgaaugccaacccuaaugcgaaccccaaugcuaaccccaaugccaacccuaacgccaauccgaacgcuaaucccaacgccaauccuaacgcuaaucccaacgccaauccuaacaaaaauaaccaggggaauggacaaggccauaacaugcccaaugacccuaacagaaacguugacgagaaugcgaacgccaauaacgcugugaagaauaacaauaacgaggaacccagcgauaagcacauugagcaguaucucaaaaagaucaaaaauuccauuagcacggaauggucuccgugcuccgugaccugcgggaacggaauccagguccggauuaagccuggcagcgccaauaaacccaaggacgagcuggauuacgaaaacgacaucgagaaaaagaucuguaagauggagaaauguucuuccguuuuuaauguggucaacagcucuauugggcuuaucauggugcuguccuuccucuuucugaauuga

SEQ ID NO: 5016 - RNA, 1239 nt, Artificial Sequence
  derived and/or modified CDS sequence (opt5) from Pf(India)__AAN87606.1__CSP
augaugagaaagcuggccauccucagcguguccucuuuccuguuugucgaggcucuuuuccaggaauaccagugcuauggcagcuccucuaacacccggguucugaaugagcucaacuacgacaaugccgggacaaaccuguauaaugaacuugagaugaacuacuauggaaaacaggaaaauugguacagccugaagaaaaacucccgcucucucggcgagaaugaugacgggaacaauaacaauggagauaacggcagagaggggaaggacgaagauaaacgggacggaaauaacgaggauaacgaaaagcugcgcaagcccaaacacaagaaacugaagcagccuggcgacggcaauccggaucccaacgcgaauccuaacguggaccccaaugcuaacccuaauguggaucccaacgccaauccuaacgucgacccgaaugccaaccccaaugcuaacccuaaugccaaccccaacgcuaauccuaacgccaaucccaacgcgaauccgaacgccaauccuaacgcuaaucccaacgccaauccuaacgcuaaucccaacgccaaucccaacgcgaacccuaaugccaacccgaaugcuaaccccaaugccaacccuaauguggaucccaacgcuaauccuaacgccaaucccaacgccaauccgaacgcuaauccuaacgcgaaccccaaugccaacccuaaugcuaaccccaaugccaacccuaaugccaaccccaaugcuaacccgaaugccaacccuaaugcgaaccccaaugcuaaccccaaugccaacccuaacgccaauccgaacgcuaaucccaacgccaauccuaacgcuaaucccaacgccaauccuaacaaaaauaaccaggggaauggacaaggccauaacaugcccaaugacccuaacagaaacguugacgagaaugcgaacgccaauaacgcugugaagaauaacaauaacgaggaacccagcgauaagcacauugagaaauaucucaagaaaauccaaaauucccugagcacggaauggucuccgugcuccgugaccugcgggaacggcauucagguccggaucaagccuggaagcgccaauaaacccaaggacgagcuugauuacgaaaacgacauugagaaaaagaucuguaagauggagaaauguucuuccguuuuuaauguggucaacagcucuaucgggcugauuauggugcucuccuuccuguuucuuaauuga

SEQ ID NO: 5017 - RNA, 1239 nt, Artificial Sequence
  derived and/or modified CDS sequence (opt5) from Pf(Pal97-007)__BAM84921.1__CSP
augaugagaaagcuggccauccucagcguguccucuuuccuguuugucgaggcucuuuuccaggaauaccaaugcuauggcagcuccucuaacacccggguucugaaugagcucaacuacgacaaugccgggacaaaccuguauaaugaacuugagaugaacuacuauggaaaacaggaaaauugguacagccugaagaaaaacucccgcucucucggcgagaaugaugacgggaacaauaacaauggagauaacggcagagaggggaaggacgaagauaaacgggacggaaauaacgaggauaacgaaaagcugcgcaagcccaaacacaagaaacugaagcagccuggcgacggcaauccggaucccaacgcgaauccuaacguggaccccaaugcuaacccuaauguggaucccaacgccaauccuaacgucgacccgaaugccaaccccaaugcuaacccuaaugccaaccccaacgcuaauccuaacgccaaucccaacgcgaauccgaacgccaauccuaacgcuaaucccaacgccaauccuaacgcuaaucccaacgccaaucccaacgcgaacccuaaugccaacccgaaugcuaaccccaaugccaacccuaauguggaucccaacgcuaauccuaacgccaaucccaacgccaauccgaacgcuaauccuaacgcgaaccccaaugccaacccuaaugcuaaccccaaugccaacccuaaugccaaccccaaugcuaacccgaaugccaacccuaaugcgaaccccaaugcuaaccccaaugccaacccuaacgccaauccgaacgcuaaucccaacgccaauccuaacgcuaaucccaacgccaauccuaacaaaaauaaccaggggaauggacaaggccauaacaugcccaaugacccuaacagaaacguugacgagaaugcgaacgccaauaacgcugugaagaauaacaauaacgaggaacccagcgauaagcacauuaaagaguaucucacgaagaucaaaaauuccauuagcaccgaauggucuccgugcuccgucacaugcgggaacggaauccaggugcggauuaagccuggcagcgccaauaaacccaaggacgagcuggauuacgaaaacgacaucgagaaaaagaucuguaagauggagaaauguucuuccguuuuuaauguggucaacagcucuauugggcuuaucauggugcuguccuuccucuuucugaauuga

SEQ ID NO: 5018 - RNA, 1239 nt, Artificial Sequence
  derived and/or modified CDS sequence (opt5) from Pf(Pal97-037)__BAM84929.1__CSP
augaugagaaagcuggccauccucagcguguccucuuuccuguuugucgaggcucuuuuccaggaauaccagugcuauggcagcuccucuaacacccggguucugaaugagcucaacuacgacaaugccgggacaaaccuguauaaugaacuugagaugaacuacuauggaaaacaggaaaauugguacagccugaagaaaaacucccgcucucucggcgagaaugaugacgggaacaauaacaauggagauaacggcagagaggggaaggacgaagauaaacgggacggaaauaacgaggauaacgaaaagcugcgcaagcccaaacacaagaaacugaagcagccuggcgacggcaauccggaucccaacgcgaauccuaacguggaccccaaugcuaacccuaauguggaucccaacgccaauccuaacgucgacccgaaugccaaccccaaugcuaacccuaaugccaaccccaacgcuaauccuaacgccaaucccaacgcgaauccgaacgccaauccuaacgcuaaucccaacgccaauccuaacgcuaaucccaacgccaaucccaacgcgaacccuaaugccaacccgaaugcuaaccccaaugccaacccuaauguggaucccaacgcuaauccuaacgccaaucccaacgccaauccgaacgcuaauccuaacgcgaaccccaaugccaacccuaaugcuaaccccaaugccaacccuaaugccaaccccaaugcuaacccgaaugccaacccuaaugcgaaccccaaugcuaaccccaaugccaacccuaacgccaauccgaacgcuaaucccaacgccaauccuaacgcuaaucccaacgccaauccuaacaaaaauaaccaggggaauggacaaggccauaacaugcccaaugacccuaacagaaacguugacgagaaugcgaacgccaauaacgcugugaagaauaacaauaacgaggaacccagcgaucagcacauugagaaguauaucaaaaagauucaaaauucccucagcacggaauggucuccgugcuccgugaccugcgggaacggaauccagguccggauuaaaccuggcagcgccgacaagcccaaaaaugagcuggauuacgaaaacgacaucgagaagaaaaucuguaagauggagaaguguucuuccguuuuuaauguggucaacagcucuauugggcuuaucauggugcuguccuuccucuuucugaauuga

SEQ ID NO: 5019 - RNA, 1239 nt, Artificial Sequence
  derived and/or modified CDS sequence (opt5) from Pf(Pal97-052)__BAM84935.1__CSP
augaugagaaagcuggccauccucagcguguccucuuuccuguuugucgaggcucuuuuccaggaauaccaaugcuauggcagcuccucuaacacccggguucugaaugagcucaacuacgacaaugccgggacaaaccuguauaaugaacuugagaugaacuacuauggaaaacaggaaaauugguacagccugaagaaaaacucccgcucucucggcgagaaugaugacgggaacaauaacaauggagauaacggcagagaggggaaggacgaagauaaacgggacggaaauaacgaggauaacgaaaagcugcgcaagcccaaacacaagaaacugaagcagccuggcgacggcaauccggaucccaacgcgaauccuaacguggaccccaaugcuaacccuaauguggaucccaacgccaauccuaacgucgacccgaaugccaaccccaaugcuaacccuaaugccaaccccaacgcuaauccuaacgccaaucccaacgcgaauccgaacgccaauccuaacgcuaaucccaacgccaauccuaacgcuaaucccaacgccaaucccaacgcgaacccuaaugccaacccgaaugcuaaccccaaugccaacccuaauguggaucccaacgcuaauccuaacgccaaucccaacgccaauccgaacgcuaauccuaacgcgaaccccaaugccaacccuaaugcuaaccccaaugccaacccuaaugccaaccccaaugcuaacccgaaugccaacccuaaugcgaaccccaaugcuaaccccaaugccaacccuaacgccaauccgaacgcuaaucccaacgccaauccuaacgcuaaucccaacgccaauccuaacaaaaauaaccaggggaauggacaaggccauaacaugcccaaugacccuaacagaaacguugacgagaaugcgaacgccaauaacgcugugaagaauaacaauaacgaggaacccagcgaucagcacauugagaaguaucucaaaaucauucaaaauucccugagcacggaauggucuccgugcuccgugaccugcgggaacggaauccagguccggauuaagccuggcagcgccgacaaacccaaggaucagcuugacuacgcuaaugauaucgagaaaaagaucuguaaaauggaaaaguguucuuccguuuuuaacguggucaauagcucuauugggcugaucauggugcucuccuuccuguuucuuaacuga

SEQ ID NO: 5020 - RNA, 1239 nt, Artificial Sequence
  derived and/or modified CDS sequence (opt5) from Pf(Sol95-351)__BAM85103.1__CSP
augaugagaaagcuggccauccucagcguguccucuuuccuguuugucgaggcucuuuuccaggaauaccaaugcuauggcagcuccucuaacacccggguucugaaugagcucaacuacgacaaugccgggacaaaccuguauaaugaacuugagaugaacuacuauggaaaacaggaaaauugguacagccugaagaaaaacucccgcucucucggcgagaaugaugacgggaacaauaacaauggagauaacggcagagaggggaaggacgaagauaaacgggacggaaauaacgaggauaacgaaaagcugcgcaagcccaaacacaagaaacugaagcagccuggcgacggcaauccggaucccaacgcgaauccuaacguggaccccaaugcuaacccuaauguggaucccaacgccaauccuaacgucgacccgaaugccaaccccaaugcuaacccuaaugccaaccccaacgcuaauccuaacgccaaucccaacgcgaauccgaacgccaauccuaacgcuaaucccaacgccaauccuaacgcuaaucccaacgccaaucccaacgcgaacccuaaugccaacccgaaugcuaaccccaaugccaacccuaauguggaucccaacgcuaauccuaacgccaaucccaacgccaauccgaacgcuaauccuaacgcgaaccccaaugccaacccuaaugcuaaccccaaugccaacccuaaugccaaccccaaugcuaacccgaaugccaacccuaaugcgaaccccaaugcuaaccccaaugccaacccuaacgccaauccgaacgcuaaucccaacgccaauccuaacgcuaaucccaacgccaauccuaacaaaaauaaccaggggaauggacaaggccauaacaugcccaaugacccuaacagaaacguugacgagaaugcgaacgccaauaacgcugugaagaauaacaauaacgaggaacccagcgauaagcacauugagcaguaucucaaaaagauccaaaauucccugagcacggaauggucuccgugcuccgugaccugcgggaacggcauucagguccggaucaaaccuggaagcgccgacaagcccaaagaucagcuugacuacgagaaugauauugaaaagaaaaucuguaagauggagaaguguucuuccguuuuuaacguggucaauagcucuaucgggcugauuauggugcucuccuuccuguuucuuaacuga

SEQ ID NO: 5021 - RNA, 1239 nt, Artificial Sequence
  derived and/or modified CDS sequence (opt5) from Pf(Tz03-038)__BAM84801.1__CSP
augaugagaaagcuggccauccucagcguguccucuuuccuguuugucgaggcucuuuuccaggaauaccaaugcuauggcagcuccucuaacacccggguucugaaugagcucaacuacgacaaugccgggacaaaccuguauaaugaacuugagaugaacuacuauggaaaacaggaaaauugguacagccugaagaaaaacucccgcucucucggcgagaaugaugacgggaacaauaacaauggagauaacggcagagaggggaaggacgaagauaaacgggacggaaauaacgaggauaacgaaaagcugcgcaagcccaaacacaagaaacugaagcagccuggcgacggcaauccggaucccaacgcgaauccuaacguggaccccaaugcuaacccuaauguggaucccaacgccaauccuaacgucgacccgaaugccaaccccaaugcuaacccuaaugccaaccccaacgcuaauccuaacgccaaucccaacgcgaauccgaacgccaauccuaacgcuaaucccaacgccaauccuaacgcuaaucccaacgccaaucccaacguggauccuaacgcgaauccgaacgccaaucccaacgcuaauccuaacgccaaucccaacgcuaauccuaacgccaaucccaacgccaauccgaacgcuaauccuaacgcgaaccccaaugccaacccuaaugcuaaccccaaugccaacccuaaugccaaccccaaugcuaacccgaaugccaacccuaaugcgaaccccaaugcuaaccccaaugccaacccuaacgccaauccgaacgcuaaucccaacgccaauccuaacgcuaaucccaacgccaauccuaacaaaaauaaccaggggaauggacaaggccauaacaugcccaaugacccuaacagaaacguugacgagaaugcgaacgccaauaacgcugugaagaauaacaauaacgaggaacccagcgauaagcacauugagcaguaucucaauaaaaucaagaacuccauuagcacggaauggucuccgugcuccgugaccugcgggaauggaauccagguccggauuaaaccuggcagcgccaacaagcccaaagacgagcugaauuacgaaaacgauaucgagaagaaaaucuguaagauggagaaguguucuuccguuuuuaauguggucaacagcucuauugggcuuaucauggugcuguccuuccucuuucugaacuga

SEQ ID NO: 5022 - RNA, 1239 nt, Artificial Sequence
  derived and/or modified CDS sequence (opt5) from Pf(Tz03-076)__BAM84804.1__CSP
augaugagaaagcuggccauccucagcguguccucuuuccuguuugucgaggcucuuuuccaggaauaccaaugcuauggcagcuccucuaacacccggguucugaaugagcucaacuacgacaaugccgggacaaaccuguauaaugaacuugagaugaacuacuauggaaaacaggaaaauugguacagccugaagaaaaacucccgcucucucggcgagaaugaugacgggaacaauaacaauggagauaacggcagagaggggaaggacgaagauaaacgggacggaaauaacgaggauaacgaaaagcugcgcaagcccaaacacaagaaacugaagcagccuggcgacggcaauccggaucccaacgcgaauccuaacguggaccccaaugcuaacccuaauguggaucccaacgccaauccuaacgucgacccgaaugccaaccccaaugcuaacccuaaugccaaccccaacgcuaauccuaacgccaaucccaacgcgaauccgaacgccaauccuaacgcuaaucccaacgccaauccuaacgcuaaucccaacgccaaucccaacgcgaacccuaaugccaacccgaaugcuaaccccaaugccaacccuaauguggaucccaacgcuaauccuaacgccaaucccaacgccaauccgaacgcuaauccuaacgcgaaccccaaugccaacccuaaugcuaaccccaaugccaacccuaaugccaaccccaaugcuaacccgaaugccaacccuaaugcgaaccccaaugcuaaccccaaugccaacccuaacgccaauccgaacgcuaaucccaacgccaauccuaacgcuaaucccaacgccaauccuaacaaaaauaaccaggggaauggacaaggccauaacaugcccaaugacccuaacagaaacguugacgagaaugcgaacgccaauaacgcugugaagaauaacaauaacgaggaacccagcgauaagcacauugagcaguaucucaaaacgaucaaaaauucccugagcaccgaauggucuccgugcuccgucacaugcgggaacggcauucaggugcggaucaagccuggaagcgccaauaagcccaaagacgagcuuaacuacgaaaaugauauugagaagaaaaucuguaagauggagaaguguucuuccguuuuuaacguggucaauagcucuaucgggcugauuauggugcucuccuuccuguuucuuaacuga

SEQ ID NO: 5023 - RNA, 1239 nt, Artificial Sequence
  derived and/or modified CDS sequence (opt5) from Pf(Tz03-101)__BAM84806.1__CSP
augaugagaaagcuggccauccucagcguguccucuuuccuguuugucgaggcucuuuuccaggaauaccaaugcuauggcagcuccucuaacacccggguucugaaugagcucaacuacgacaaugccgggacaaaccuguauaaugaacuugagaugaacuacuauggaaaacaggaaaauugguacagccugaagaaaaacucccgcucucucggcgagaaugaugacgggaacaauaacaauggagauaacggcagagaggggaaggacgaagauaaacgggacggaaauaacgaggauaacgaaaagcugcgcaagcccaaacacaagaaacugaagcagccuggcgacggcaauccggaucccaacgcgaauccuaacguggaccccaaugcuaacccuaauguggaucccaacgccaauccuaacgucgacccgaaugccaaccccaaugcuaacccuaaugccaaccccaacgcuaauccuaacgccaaucccaacgcgaauccgaacgccaauccuaacgcuaaucccaacgccaauccuaacgcuaaucccaacgccaaucccaacgcgaacccuaaugccaacccgaaugcuaaccccaaugccaacccuaauguggaucccaacgcuaauccuaacgccaaucccaacgccaauccgaacgcuaauccuaacgcgaaccccaaugccaacccuaaugcuaaccccaaugccaacccuaaugccaaccccaaugcuaacccgaaugccaacccuaaugcgaaccccaaugcuaaccccaaugccaacccuaacgccaauccgaacgcuaaucccaacgccaauccuaacgcuaaucccaacgccaauccuaacaaaaauaaccaggggaauggacaaggccauaacaugcccaaugacccuaacagaaacguugacgagaaugcgaacgccaauaacgcugugaagaauaacaauaacgaggaacccagcgauaagcacauuaaagaguaucucaauaagauccagaacuccauuagcacggaauggucuccgugcuccgugaccugcgggaauggaauccagguccggauuaaaccuggcagcgccgacaagcccaaagaucagcuggacuacaucaacgauaucgagaagaaaauuuguaagauggaaaaguguucuuccguuuuuaauguggucaacagcucuaucgggcuuauuauggugcuguccuuccucuuucugaauuga

SEQ ID NO: 5024 - RNA, 1239 nt, Artificial Sequence
  derived and/or modified CDS sequence (opt5) from Pf(Tz93-022)__BAM84753.1__CSP
augaugagaaagcuggccauccucagcguguccucuuuccuguuugucgaggcucuuuuccaggaauaccaaugcuauggcagcuccucuaacacccggguucugaaugagcucaacuacgacaaugccgggacaaaccuguauaaugaacuugagaugaacuacuauggaaaacaggaaaauugguacagccugaagaaaaacucccgcucucucggcgagaaugaugacgggaacaauaacaauggagauaacggcagagaggggaaggacgaagauaaacgggacggaaauaacgaggauaacgaaaagcugcgcaagcccaaacacaagaaacugaagcagccuggcgacggcaauccggaucccaacgcgaauccuaacguggaccccaaugcuaacccuaauguggaucccaacgccaauccuaacgucgacccgaaugccaaccccaaugcuaacccuaaugccaaccccaacgcuaauccuaacgccaaucccaacgcgaauccgaacgccaauccuaacgcuaaucccaacgccaauccuaacgcuaaucccaacgccaaucccaacgcgaacccuaaugccaacccgaaugcuaaccccaaugccaacccuaaugcuaaccccaaugccaacccuaaugccaaccccaaugcuaacccgaaugcgaacccuaacgccaaucccaacgcuaauccuaacgccaaucccaacgccaauccuaacgcuaaucccaacgccaauccgaacgcgaauccuaacgcuaaucccaacgccaaucccaacgccaacccuaaugcuaacccgaaugccaaccccaaugcuaacccuaaugccaaccccaaugcgaacccuaauaaaaacaaucaggggaacggacaaggccauaauaugcccaacgauccuaacagaaauguggacgagaacgccaaugcuaacaaugccguuaagaacaauaacaaugaggaacccagcgacaagcacauugagaaauaucucaaggaaauccagaacucccugagcacggaguggucuccgugcuccgugaccugcgggaauggcauucagguccggaucaaaccuggaagcgcuaacaagcccaaagaucagcuugacuacgaaaaugauauugagaagaaaaucuguaagauggagaaguguucuuccguguuuaacguugugaauagcucuaucgggcugauuaugguccucuccuuccuguuucuuaacuga

SEQ ID NO: 5025 - RNA, 1239 nt, Artificial Sequence
  derived and/or modified CDS sequence (opt5) from Pf(Tz93-035)__BAM84757.1__CSP
augaugagaaagcuggccauccucagcguguccucuuuccuguuugucgaggcucuuuuccaggaauaccaaugcuauggcagcuccucuaacacccggguucugaaugagcucaacuacgacaaugccgggacaaaccuguauaaugaacuugagaugaacuacuauggaaaacaggaaaauugguacagccugaagaaaaacucccgcucucucggcgagaaugaugacgggaacaauaacaauggagauaacggcagagaggggaaggacgaagauaaacgggacggaaauaacgaggauaacgaaaagcugcgcaagcccaaacacaagaaacugaagcagccuggcgacggcaauccggaucccaacgcgaauccuaacguggaccccaaugcuaacccuaauguggaucccaacgccaauccuaacgucgacccgaaugccaaccccaaugcuaacccuaaugccaaccccaacgcuaauccuaacgccaaucccaacgcgaauccgaacgccaauccuaacgcuaaucccaacgccaauccuaacgcuaaucccaacgccaaucccaacgcgaacccuaaugccaacccgaaugcuaaccccaaugccaacccuaauguggaucccaacgcuaauccuaacgccaaucccaacgccaauccgaacgcuaauccuaacgcgaaccccaaugccaacccuaaugcuaaccccaaugccaacccuaaugccaaccccaaugcuaacccgaaugccaacccuaaugcgaaccccaaugcuaaccccaaugccaacccuaacgccaauccgaacgcuaaucccaacgccaauccuaacgcuaaucccaacgccaauccuaacaaaaauaaccaggggaauggacaaggccauaacaugcccaaugacccuaacagaaacguugacgagaaugcgaacgccaauaacgcugugaagaauaacaauaacgaggaacccagcgauaagcacauuacggaguaucucaaaaagaucaaaaauuccauuagcaccgaauggucuccgugcuccgucacaugcgggaacggaauccaggugcggauuaagccuggcagcgccaauaaacccaaggacgagcuggauuacgaaaacgacaucgagaaaaagaucuguaagauggagaaauguucuuccguuuuuaauguggucaacagcucuauugggcuuaucauggugcuguccuuccucuuucugaauuga

SEQ ID NO: 5026 - RNA, 1239 nt, Artificial Sequence
  derived and/or modified CDS sequence (opt5) from Pf(Tz93-041)__BAM84759.1__CSP
augaugagaaagcuggccauccucagcguguccucuuuccuguuugucgaggcucuuuuccaggaauaccagugcuauggcagcuccucuaacacccggguucugaaugagcucaacuacgacaaugccgggacaaaccuguauaaugaacuugagaugaacuacuauggaaaacaggaaaauugguacagccugaagaaaaacucccgcucucucggcgagaaugaugacgggaacaauaacaauggagauaacggcagagaggggaaggacgaagauaaacgggacggaaauaacgaggauaacgaaaagcugcgcaagcccaaacacaagaaacugaagcagccuggcgacggcaauccggaucccaacgcgaauccuaacguggaccccaaugcuaacccuaauguggaucccaacgccaauccuaacgucgacccgaaugccaaccccaaugcuaacccuaaugccaaccccaacgcuaauccuaacgccaaucccaacgcgaauccgaacgccaauccuaacgcuaaucccaacgccaauccuaacgcuaaucccaacgccaaucccaacgcgaacccuaaugccaacccgaaugcuaaccccaaugccaacccuaauguggaucccaacgcuaauccuaacgccaaucccaacgccaauccgaacgcuaauccuaacgcgaaccccaaugccaacccuaaugcuaaccccaaugccaacccuaaugccaaccccaaugcuaacccgaaugccaacccuaaugcgaaccccaaugcuaaccccaaugccaacccuaacgccaauccgaacgcuaaucccaacgccaauccuaacgcuaaucccaacgccaauccuaacaaaaauaaccaggggaauggacaaggccauaacaugcccaaugacccuaacagaaacguugacgagaaugcgaacgccaauaacgcugugaagaauaacaauaacgaggaacccagcgauaagcacauugagcaguaucucaaacggauccaaaauucccugagcacggaauggucuccgugcuccgugaccugcgggaacggcauucagguccgcaucaagccuggaagcgccgggaaacccaaggacgagcuugauuacgcuaaugacauugagaaaaagaucuguaaaauggaaaaguguucuuccguuuuuaacguggucaauagcucuaucggacugauuauggugcucuccuuccuguuucuuaacuga

SEQ ID NO: 5027 - RNA, 1239 nt, Artificial Sequence
  derived and/or modified CDS sequence (opt5) from Pf(Tz93-051)__BAM84763.1__CSP
augaugagaaagcuggccauccucagcguguccucuuuccuguuugucgaggcucuuuuccaggaauaccaaugcuauggcagcuccucuaacacccggguucugaaugagcucaacuacgacaaugccgggacaaaccuguauaaugaacuugagaugaacuacuauggaaaacaggaaaauugguacagccugaagaaaaacucccgcucucucggcgagaaugaugacgggaacaauaacaauggagauaacggcagagaggggaaggacgaagauaaacgggacggaaauaacgaggauaacgaaaagcugcgcaagcccaaacacaagaaacugaagcagccuggcgacggcaauccggaucccaacgcgaauccuaacguggaccccaaugcuaacccuaauguggaucccaacgccaauccuaacgucgacccgaaugccaaccccaaugcuaacccuaaugccaaccccaacgcuaauccuaacgccaaucccaacgcgaauccgaacgccaauccuaacgcuaaucccaacgccaauccuaacgcuaaucccaacgccaaucccaacgcgaacccuaaugccaacccgaaugcuaaccccaaugccaacccuaauguggaucccaacgcuaauccuaacgccaaucccaacgccaauccgaacgcuaauccuaacgcgaaccccaaugccaacccuaaugcuaaccccaaugccaacccuaaugccaaccccaaugcuaacccgaaugccaacccuaaugcgaaccccaaugcuaaccccaaugccaacccuaacgccaauccgaacgcuaaucccaacgccaauccuaacgcuaaucccaacgccaauccuaacaaaaauaaccaggggaauggacaaggccauaacaugcccaaugacccuaacagaaacguugacgagaaugcgaacgccaauaacgcugugaagaauaacaauaacgaggaacccagcgauaagcacauugagcaguaucucaauaaaaucaagaacuccauuagcacggaauggucuccgugcuccgugaccugcgggaauggaauccagguccggauuaaaccuggcagcgccaacaagcccaaagacgagcugaauuacgaaaacgauaucgagaagaaaaucuguaagauggagaaguguucuuccguuuuuaauguggucaacagcucuauugggcuuaucauggugcuguccuuccucuuucugaacuga

SEQ ID NO: 5028 - RNA, 1239 nt, Artificial Sequence
  derived and/or modified CDS sequence (opt5) from Pf(Tz93-052)__BAM84764.1__CSP
augaugagaaagcuggccauccucagcguguccucuuuccuguuugucgaggcucuuuuccaggaauaccaaugcuauggcagcuccucuaacacccggguucugaaugagcucaacuacgacaaugccgggacaaaccuguauaaugaacuugagaugaacuacuauggaaaacaggaaaauugguacagccugaagaaaaacucccgcucucucggcgagaaugaugacgggaacaauaacaauggagauaacggcagagaggggaaggacgaagauaaacgggacggaaauaacgaggauaacgaaaagcugcgcaagcccaaacacaagaaacugaagcagccuggcgacggcaauccggaucccaacgcgaauccuaacguggaccccaaugcuaacccuaauguggaucccaacgccaauccuaacgucgacccgaaugccaaccccaaugcuaacccuaaugccaaccccaacgcuaauccuaacgccaaucccaacgcgaauccgaacgccaauccuaacgcuaaucccaacgccaauccuaacgcuaaucccaacgccaaucccaacguggauccuaacgcgaauccgaacgccaaucccaacgcuaauccuaacgccaaucccaacgcuaauccuaacgccaaucccaacgccaauccgaacgcuaauccuaacgcgaaccccaaugccaacccuaaugcuaaccccaaugccaacccuaaugccaaccccaaugcuaacccgaaugccaacccuaaugcgaaccccaaugcuaaccccaaugccaacccuaacgccaauccgaacgcuaaucccaacgccaauccuaacgcuaaucccaacgccaauccuaacaaaaauaaccaggggaauggacaaggccauaacaugcccaaugacccuaacagaaacguugacgagaaugcgaacgccaauaacgcugugaagaauaacaauaacgaggaacccagcgaucagcacauugagaaguaucucaaaaucauucaaaauucccugagcacggaauggucuccgugcuccgugaccugcgggaacggaauccagguccggauuaagccuggcagcgccaauaaacccaaggaccagcuugauuacgcuaacgacaucgagaaaaagaucuguaaaauggaaaaguguucuuccguuuuuaauguggucaacagcucuauugggcugaucauggugcucuccuuccuguuucuuaauuga

SEQ ID NO: 5029 - RNA, 1239 nt, Artificial Sequence
  derived and/or modified CDS sequence (opt5) from Pf(Tz93-061)__BAM84768.1__CSP
augaugagaaagcuggccauccucagcguguccucuuuccuguuugucgaggcucuuuuccaggaauaccaaugcuauggcagcuccucuaacacccggguucugaaugagcucaacuacgacaaugccgggacaaaccuguauaaugaacuugagaugaacuacuauggaaaacaggaaaauugguacagccugaagaaaaacucccgcucucucggcgagaaugaugacgggaacaauaacaauggagauaacggcagagaggggaaggacgaagauaaacgggacggaaauaacgaggauaacgaaaagcugcgcaagcccaaacacaagaaacugaagcagccugcggacggcaauccggaucccaacgcuaauccuaacguggaccccaaugccaacccuaauguggaucccaacgccaauccuaacgucgacccgaaugcuaaccccaaugccaacccuaaugcuaaccccaacgccaauccuaacgcgaaucccaacgccaauccgaacgcuaauccuaacgccaaucccaacgcuaauccuaacgccaaucccaacgcgaaucccaacgccaacccuaaugcuaacccgaaugccaaccccaaugcuaacccuaauguggaucccaacgccaauccuaacgccaaucccaacgcuaauccgaacgcgaauccuaacgccaaccccaaugcuaacccuaaugccaaccccaaugccaacccuaaugcuaaccccaaugccaacccgaaugcgaacccuaaugcuaaccccaaugccaaccccaaugccaacccuaacgcuaauccgaacgccaaucccaacgcuaauccuaacgccaaucccaacgcgaauccuaacaaaaauaaccagggcaaugggcaaggacauaacaugcccaaugacccuaacagaaacguugacgagaaugccaacgcuaauaacgccgugaagaauaacaauaacgaggaacccagcgaucagcacauugagaaguaucucaaacggauccaaaauucccugagcacggaauggucuccgugcuccgugaccugcggcaacgggauucagguccgcaucaagccuggaagcgcuaauaaacccaaggaccagcuugauuacgccaacgacauugagaaaaagaucuguaaaauggaaaaguguucuuccguuuuuaauguggucaacagcucuaucggccugauuauggugcucuccuuccuguuucuuaauuga

SEQ ID NO: 5030 - RNA, 1239 nt, Artificial Sequence
  derived and/or modified CDS sequence (opt5) from Pf(Tz93-075)__BAM84770.1__CSP
augaugagaaagcuggccauccucagcguguccucuuuccuguuugucgaggcucuuuuccaggaauaccaaugcuauggcagcuccucuaacacccggguucugaaugagcucaacuacgacaaugccgggacaaaccuguauaaugaacuugagaugaacuacuauggaaaacaggaaaauugguacagccugaagaaaaacucccgcucucucggcgagaaugaugacgggaacaauaacaauggagauaacggcagagaggggaaggacgaagauaaacgggacggaaauaacgaggauaacgaaaagcugcgcaagcccaaacacaagaaacugaagcagccuggcgacggcaauccggaucccaacgcgaauccuaacguggaccccaaugcuaacccuaauguggaucccaacgccaauccuaacgucgacccgaaugccaaccccaaugcuaacccuaaugccaaccccaacgcuaauccuaacgccaaucccaacgcgaauccgaacgccaauccuaacgcuaaucccaacgccaauccuaacgcuaaucccaacgccaaucccaacgcgaacccuaaugccaacccgaaugcuaaccccaaugccaacccuaauguggaucccaacgcuaauccuaacgccaaucccaacgccaauccgaacgcuaauccuaacgcgaaccccaaugccaacccuaaugcuaaccccaaugccaacccuaaugccaaccccaaugcuaacccgaaugccaacccuaaugcgaaccccaaugcuaaccccaaugccaacccuaacgccaauccgaacgcuaaucccaacgccaauccuaacgcuaaucccaacgccaauccuaacaaaaauaaccaggggaauggacaaggccauaacaugcccaaugacccuaacagaaacguugacgagaaugcgaacgccaauaacgcugugaagaauaacaauaacgaggaacccagcgauaagcacauugagcaguaucucaaaacgaucaaaaauucccugagcaccgaauggucuccgugcuccgucacaugcgggaacggcauucaggugcggaucaagccuggaagcgccaauaagcccaaagaccagcuugauuacgagaacgacauugaaaagaaaaucuguaagauggagaaguguucuuccguuuuuaauguggucaacagcucuaucgggcugauuauggugcucuccuuccuguuucuuaauuga

SEQ ID NO: 5031 - RNA, 1239 nt, Artificial Sequence
  derived and/or modified CDS sequence (opt5) from Pf(Tz93-113)__BAM84775.1__CSP
augaugagaaagcuggccauccucagcguguccucuuuccuguuugucgaggcucuuuuccaggaauaccaaugcuauggcagcuccucuaacacccggguucugaaugagcucaacuacgacaaugccgggacaaaccuguauaaugaacuugagaugaacuacuauggaaaacaggaaaauugguacagccugaagaaaaacucccgcucucucggcgagaaugaugacgggaacaauaacaauggagauaacggcagagaggggaaggacgaagauaaacgggacggaaauaacgaggauaacgaaaagcugcgcaagcccaaacacaagaaacugaagcagccuggcgacggcaauccggaucccaacgcgaauccuaacguggaccccaaugcuaacccuaauguggaucccaacgccaauccuaacgucgacccgaaugccaaccccaaugcuaacccuaaugccaaccccaacgcuaauccuaacgccaaucccaacgcgaauccgaacgccaauccuaacgcuaaucccaacgccaauccuaacgcuaaucccaacgccaaucccaacgcgaacccuaaugccaacccgaaugcuaaccccaaugccaacccuaaugcuaaccccaauguggauccuaacgccaaucccaacgccaauccgaacgcuaauccuaacgcgaaccccaaugccaacccuaaugcuaaccccaaugccaacccuaaugccaaccccaaugcuaacccgaaugccaacccuaaugcgaaccccaaugcuaaccccaaugccaacccuaacgccaauccgaacgcuaaucccaacgccaauccuaacgcuaaucccaacgccaauccuaacaaaaauaaccaggggaauggacaaggccauaacaugcccaaugacccuaacagaaacguugacgagaaugcgaacgccaauaacgcugugaagaauaacaauaacgaggaacccagcgauaagcacauugagcaguaucucaauaaaaucaagaacuccauuagcacggaauggucuccgugcuccgugaccugcgggaauggaauccagguccggauuaaaccuggcagcgccaacaagcccaaagacgagcugaauuacgaaaacgauaucgagaagaaaaucuguaagauggagaaguguucuuccguuuuuaauguggucaacagcucuauugggcuuaucauggugcuguccuuccucuuucugaacuga

SEQ ID NO: 5032 - RNA, 1239 nt, Artificial Sequence
  derived and/or modified CDS sequence (opt5) from Pf(Tz93-123)__BAM84778.1__CSP
augaugagaaagcuggccauccucagcguguccucuuuccuguuugucgaggcucuuuuccaggaauaccaaugcuauggcagcuccucuaacacccggguucugaaugagcucaacuacgacaaugccgggacaaaccuguauaaugaacuugagaugaacuacuauggaaaacaggaaaauugguacagccugaagaaaaacucccgcucucucggcgagaaugaugacgggaacaauaacaauggagauaacggcagagaggggaaggacgaagauaaacgggacggaaauaacgaggauaacgaaaagcugcgcaagcccaaacacaagaaacugaagcagccugcggacggcaauccggaucccaacgcuaauccuaacguggaccccaaugccaacccuaauguggaucccaacgccaauccuaacgucgacccgaaugcuaaccccaaugccaacccuaaugcuaaccccaacgccaauccuaacgcgaaucccaacgccaauccgaacgcuaauccuaacgccaaucccaacgcuaauccuaacgccaaucccaacgcgaaucccaacgccaacccuaaugcuaacccgaaugccaaccccaaugcuaacccuaauguggaucccaacgccaauccuaacgccaaucccaacgcuaauccgaacgcgaauccuaacgccaaccccaaugcuaacccuaaugccaaccccaaugccaacccuaaugcuaaccccaaugccaacccgaaugcgaacccuaaugcuaaccccaaugccaaccccaaugccaacccuaacgcuaauccgaacgccaaucccaacgcuaauccuaacgccaaucccaacgcgaauccuaacaaaaauaaccagggcaaugggcaaggacauaacaugcccaaugacccuaacagaaacguugacgagaaugccaacgcuaauaacgccgcuaagaauaacaauaacgaggaacccagcgaucagcacauugagaaguaucucaaaacgauccaaaauucccugagcaccgaauggucuccgugcuccgugacaugcggcaacgggauucagguccggaucaagccuggaagcgccaauaaacccaaggaccagcuugauuacgcgaacgacauugagaaaaagaucuguaaaauggaaaaguguucuuccguguuuaauguugugaacagcucuaucggccugauuaugguccucuccuuccuguuucuuaauuga

SEQ ID NO: 5033 - RNA, 1239 nt, Artificial Sequence
  derived and/or modified CDS sequence (opt5) from Pf(Tz93-124)__BAM84779.1__CSP
augaugagaaagcuggccauccucagcguguccucuuuccuguuugucgaggcucuuuuccaggaauaccaaugcuauggcagcuccucuaacacccggguucugaaugagcucaacuacgacaaugccgggacaaaccuguauaaugaacuugagaugaacuacuauggaaaacaggaaaauugguacagccugaagaaaaacucccgcucucucggcgagaaugaugacgggaacaauaacaauggagauaacggcagagaggggaaggacgaagauaaacgggacggaaauaacgaggauaacgaaaagcugcgcaagcccaaacacaagaaacugaagcagccugcggacggcaauccggaucccaacgcuaauccuaacguggaccccaaugccaacccuaauguggaucccaacgccaauccuaacgucgacccgaaugcuaaccccaaugccaacccuaaugcuaaccccaacgccaauccuaacgcgaaucccaacgccaauccgaacgcuaauccuaacgccaaucccaacgcuaauccuaacgccaaucccaacgcgaaucccaacgccaacccuaaugcuaacccgaaugccaaccccaaugcuaacccuaauguggaucccaacgccaauccuaacgccaaucccaacgcuaauccgaacgcgaauccuaacgccaaccccaaugcuaacccuaaugccaaccccaaugccaacccuaaugcuaaccccaaugccaacccgaaugcgaacccuaaugcuaaccccaaugccaaccccaaugccaacccuaacgcuaauccgaacgccaaucccaacgcuaauccuaacgccaaucccaacgcgaauccuaacaaaaauaaccagggcaaugggcaaggacauaacaugcccaaugacccuaacagaaacguugacgagaaugccaacgcuaauaacgccgugaagaauaacaauaacgaggaacccagcgauaagcacauugagcaguaucucaaaacgaucaaaaauucccugagcaccgaauggucuccgugcuccgucacaugcggcaacgggauucaggugcggaucaagccuggaagcgcugacaagcccaaagaucagcuugacuacauuaaugauaucgagaagaaaaucuguaagauggaaaaguguucuuccguuuuuaacguggucaauagcucuauuggccugaucauggugcucuccuuccuguuucuuaacuga

SEQ ID NO: 5034 - RNA, 1239 nt, Artificial Sequence
  derived and/or modified CDS sequence (opt5) from Pf(Tz98-009)__BAM84781.1__CSP
augaugagaaagcuggccauccucagcguguccucuuuccuguuugucgaggcucuuuuccaggaauaccaaugcuauggcagcuccucuaacacccggguucugaaugagcucaacuacgacaaugccgggacaaaccuguauaaugaacuugagaugaacuacuauggaaaacaggaaaauugguacagccugaagaaaaacucccgcucucucggcgagaaugaugacgggaacaauaacaauggagauaacggcagagaggggaaggacgaagauaaacgggacggaaauaacgaggauaacgaaaagcugcgcaagcccaaacacaagaaacugaagcagccugcggacggcaauccggaucccaacgcuaauccuaacguggaccccaaugccaacccuaauguggaucccaacgccaauccuaacgucgacccgaaugcuaaccccaaugccaacccuaaugcuaaccccaacgccaauccuaacgcgaaucccaacgccaauccgaacgcuaauccuaacgccaaucccaacgcuaauccuaacgccaaucccaacgcgaaucccaacgccaacccuaaugcuaacccgaaugccaaccccaaugcuaacccuaauguggaucccaacgccaauccuaacgccaaucccaacgcuaauccgaacgcgaauccuaacgccaaccccaaugcuaacccuaaugccaaccccaaugccaacccuaaugcuaaccccaaugccaacccgaaugcgaacccuaaugcuaaccccaaugccaaccccaaugccaacccuaacgcuaauccgaacgccaaucccaacgcuaauccuaacgccaaucccaacgcgaauccuaacaaaaauaaccagggcaaugggcaaggacauaacaugcccaaugacccuaacagaaacguugacgagaaugccaacgcuaauaacgccgugaagaauaacaauaacgaggaacccagcgauaagcacauuaaagaguaucucaauaagauccagaacuccauuagcacggaauggucuccgugcuccgugaccugcggcaaugggauccagguccggauuaaaccuggaagcgcugacaagcccaaagaucagcuggacuacaucaacgauaucgagaagaaaauuuguaagauggaaaaguguucuuccguuuuuaauguggucaacagcucuaucggccuuauuauggugcuguccuuccucuuucugaauuga

SEQ ID NO: 5035 - RNA, 1239 nt, Artificial Sequence
  derived and/or modified CDS sequence (opt5) from Pf(Tz98-049)__BAM84789.1__CSP
augaugagaaagcuggccauccucagcguguccucuuuccuguuugucgaggcucuuuuccaggaauaccaaugcuauggcagcuccucuaacacccggguucugaaugagcucaacuacgacaaugccgggacaaaccuguauaaugaacuugagaugaacuacuauggaaaacaggaaaauugguacagccugaagaaaaacucccgcucucucggcgagaaugaugacgggaacaauaacaauggagauaacggcagagaggggaaggacgaagauaaacgggacggaaauaacgaggauaacgaaaagcugcgcaagcccaaacacaagaaacugaagcagccugcggacggcaauccggaucccaacgcuaauccuaacguggaccccaaugccaacccuaauguggaucccaacgccaauccuaacgucgacccgaaugcuaaccccaaugccaacccuaaugcuaaccccaacgccaauccuaacgcgaaucccaacgccaauccgaacgcuaauccuaacgccaaucccaacgcuaauccuaacgccaaucccaacgcgaaucccaacgccaacccuaaugcuaacccgaaugccaaccccaaugcuaacccuaauguggaucccaacgccaauccuaacgccaaucccaacgcuaauccgaacgcgaauccuaacgccaaccccaaugcuaacccuaaugccaaccccaaugccaacccuaaugcuaaccccaaugccaacccgaaugcgaacccuaaugcuaaccccaaugccaaccccaaugccaacccuaacgcuaauccgaacgccaaucccaacgcuaauccuaacgccaaucccaacgcgaauccuaacaaaaauaaccagggcaaugggcaaggacauaacaugcccaaugacccuaacagaaacguugacgagaaugccaacgcuaauaacgccgugaagaauaacaauaacgaggaacccagcgauaagcacauugagcaguaucucaaaacgaucaaaaauucccugagcaccgaauggucuccgugcuccgucacaugcggcaacgggauucaggugcggaucaagccuggaagcgcuaauaagcccaaagaccagcuugauuacgagaacgacauugaaaagaaaaucuguaagauggagaaguguucuuccguuuuuaauguggucaacagcucuaucggccugauuauggugcucuccuuccuguuucuuaauuga

SEQ ID NO: 5036 - RNA, 1239 nt, Artificial Sequence
  derived and/or modified CDS sequence (opt5) from Pf(Tz98-084)__BAM84792.1__CSP
augaugagaaagcuggccauccucagcguguccucuuuccuguuugucgaggcucuuuuccaggaauaccaaugcuauggcagcuccucuaacacccggguucugaaugagcucaacuacgacaaugccgggacaaaccuguauaaugaacuugagaugaacuacuauggaaaacaggaaaauugguacagccugaagaaaaacucccgcucucucggcgagaaugaugacgggaacaauaacaauggagauaacggcagagaggggaaggacgaagauaaacgggacggaaauaacgaggauaacgaaaagcugcgcaagcccaaacacaagaaacugaagcagccugcggacggcaauccggaucccaacgcuaauccuaacguggaccccaaugccaacccuaauguggaucccaacgccaauccuaacgucgacccgaaugcuaaccccaaugccaacccuaaugcuaaccccaacgccaauccuaacgcgaaucccaacgccaauccgaacgcuaauccuaacgccaaucccaacgcuaauccuaacgccaaucccaacgcgaaucccaacgccaacccuaaugcuaacccgaaugccaaccccaaugcuaacccuaauguggaucccaacgccaauccuaacgccaaucccaacgcuaauccgaacgcgaauccuaacgccaaccccaaugcuaacccuaaugccaaccccaaugccaacccuaaugcuaaccccaaugccaacccgaaugcgaacccuaaugcuaaccccaaugccaaccccaaugccaacccuaacgcuaauccgaacgccaaucccaacgcuaauccuaacgccaaucccaacgcgaauccuaacaaaaauaaccagggcaaugggcaaggacauaacaugcccaaugacccuaacagaaacguugacgagaaugccaacgcuaauaacgccgugaagaauaacaauaacgaggaacccagcgaucagcacauugagaaguaucucaauaaaauccagaacucccugagcacggaauggucuccgugcuccgugaccugcggcaaugggauucagguccggaucaagccuggaagcgcuaacaaacccaaggaccaacuugauuacgccaaugacauugagaaaaagaucuguaaaauggaaaaguguucuuccguuuuuaacguggucaauagcucuaucggccugauuauggugcucuccuuccuguuucuuaacuga

SEQ ID NO: 5037 - RNA, 1239 nt, Artificial Sequence
  derived and/or modified CDS sequence (opt5) from Pf(Tz98-119)__BAM84797.1__CSP
augaugagaaagcuggccauccucagcguguccucuuuccuguuugucgaggcucuuuuccaggaauaccaaugcuauggcagcuccucuaacacccggguucugaaugagcucaacuacgacaaugccgggacaaaccuguauaaugaacuugagaugaacuacuauggaaaacaggaaaauugguacagccugaagaaaaacucccgcucucucggcgagaaugaugacgggaacaauaacaauggagauaacggcagagaggggaaggacgaagauaaacgggacggaaauaacgaggauaacgaaaagcugcgcaagcccaaacacaagaaacugaagcagccugcggacggcaauccggaucccaacgcuaauccuaacguggaccccaaugccaacccuaauguggaucccaacgccaauccuaacgucgacccgaaugcuaaccccaaugccaacccuaaugcuaaccccaacgccaauccuaacgcgaaucccaacgccaauccgaacgcuaauccuaacgccaaucccaacgcuaauccuaacgccaaucccaacgcgaaucccaacgccaacccuaaugcuaacccgaaugccaaccccaaugcuaacccuaauguggaucccaacgccaauccuaacgccaaucccaacgcuaauccgaacgcgaauccuaacgccaaccccaaugcuaacccuaaugccaaccccaaugccaacccuaaugcuaaccccaaugccaacccgaaugcgaacccuaaugcuaaccccaaugccaaccccaaugccaacccuaacgcuaauccgaacgccaaucccaacgcuaauccuaacgccaaucccaacgcgaauccuaacaaaaauaaccagggcaaugggcaaggacauaacaugcccaaugacccuaacagaaacguugacgagaaugccaacgcuaauaacgccgugaagaauaacaauaacgaggaacccagcgaucagcacauugagaaguaucucaaaacgauccaaaauucccugagcaccgaauggucuccgugcuccgucacaugcggcaacgggauucaggugcggaucaagccuggaagcgcuaauaaacccaaggaccagcuugauuacgccaacgacauugagaaaaagaucuguaaaauggaaaaguguucuuccguuuuuaauguggucaacagcucuaucggccugauuauggugcucuccuuccuguuucuuaauuga

SEQ ID NO: 5038 - RNA, 1239 nt, Artificial Sequence
  derived and/or modified CDS sequence (opt5) from Pf(Yaounde)__AAN87602.1__CSP
augaugagaaagcuggccauccucagcguguccucuuuccuguuugucgaggcucuuuuccaggaauaccaaugcuauggcagcuccucuaacacccggguucugaaugagcucaacuacgacaaugccgggacaaaccuguauaaugaacuugagaugaacuacuauggaaaacaggaaaauugguacagccugaagaaaaacucccgcucucucggcgagaaugaugacgggaacaauaacaauggagauaacggcagagaggggaaggacgaagauaaacgggacggaaauaacgaggauaacgaaaagcugcgcaagcccaaacacaagaaacugaagcagccugcggacggcaauccggaucccaacgcuaauccuaacguggaccccaaugccaacccuaauguggaucccaacgccaauccuaacgucgacccgaaugcuaaccccaaugccaacccuaaugcuaaccccaacgccaauccuaacgcgaaucccaacgccaauccgaacgcuaauccuaacgccaaucccaacgcuaauccuaacgccaaucccaacgcgaaucccaacgccaacccuaaugcuaacccgaaugccaaccccaaugcuaacccuaauguggaucccaacgccaauccuaacgccaaucccaacgcuaauccgaacgcgaauccuaacgccaaccccaaugcuaacccuaaugccaaccccaaugccaacccuaaugcuaaccccaaugccaacccgaaugcgaacccuaaugcuaaccccaaugccaaccccaaugccaacccuaacgcuaauccgaacgccaaucccaacgcuaauccuaacgccaaucccaacgcgaauccuaacaaaaauaaccagggcaaugggcaaggacauaacaugcccaaugacccuaacagaaacguugacgagaaugccaacgcuaauaacgccgugaagaauaacaauaacgaggaacccagcgaucagcacauugagaaguaucucaauaaaaucaagaacucccugagcacggaauggucuccgugcuccgugaccugcggcaaugggauucagguccggaucaaaccuggaagcgcuaacaagcccaaagaccagcuugauuacgccaaugacauugagaagaaaaucuguaagauggaaaaguguucuuccguuuuuaacguggucaauagcucuaucggccugauuauggugcucuccuuccuguuucuuaacuga

SEQ ID NO: 5039 - RNA, 1239 nt, Artificial Sequence
  derived and/or modified CDS sequence (opt5) from Pf(Yaounde)__AAN87587.1__CSP
augaugagaaagcuggccauccucagcguguccucuuuccuguuugucgaggcucuuuuccaggaauaccaaugcuauggcagcuccucuaacacccggguucugaaugagcucaacuacgacaaugccgggacaaaccuguauaaugaacuugagaugaacuacuauggaaaacaggaaaauugguacagccugaagaaaaacucccgcucucucggcgagaaugaugacgggaacaauaacaauggagauaacggcagagaggggaaggacgaagauaaacgggacggaaauaacgaggauaacgaaaagcugcgcaagcccaaacacaagaaacugaagcagccugcggacggcaauccggaucccaacgcuaauccuaacguggaccccaaugccaacccuaauguggaucccaacgccaauccuaacgucgacccgaaugcuaaccccaaugccaacccuaaugcuaaccccaacgccaauccuaacgcgaaucccaacgccaauccgaacgcuaauccuaacgccaaucccaacgcuaauccuaacgccaaucccaacgcgaaucccaacgccaacccuaaugcuaacccgaaugccaaccccaaugcuaacccuaauguggaucccaacgccaauccuaacgccaaucccaacgcuaauccgaacgcgaauccuaacgccaaccccaaugcuaacccuaaugccaaccccaaugccaacccuaaugcuaaccccaaugccaacccgaaugcgaacccuaaugcuaaccccaaugccaaccccaaugccaacccuaacgcuaauccgaacgccaaucccaacgcuaauccuaacgccaaucccaacgcgaauccuaacaaaaauaaccagggcaaugggcaaggacauaacaugcccaaugacccuaacagaaacguugacgagaaugccaacgcuaauaacgccgugaagaauaacaauaacgaggaacccagcgaucagcacauugagaaguaucucaaaacgaucaaaaauucccugagcaccgaauggucuccgugcuccgucacaugcggcaacgggauucaggugcggaucaagccuggaagcgcuaauaagcccaaagaccagcuugauuacgccaacgacauugagaagaaaaucuguaagauggaaaaguguucuuccguuuuuaauguggucaacagcucuaucggccugauuauggugcucuccuuccuguuucuuaauuga

SEQ ID NO: 5040 - RNA, 1236 nt, Artificial Sequence
  derived and/or modified CDS sequence (opt5) from Pf(A107)__ACO49330.1__CSP
augagaaagcuggccauccucagcguguccucuuuccuguuugucgaggcucuuuuccaggaauaccaaugcuauggcagcuccucuaacacccggguucugaaugagcucaacuacgacaaugccgggacaaaccuguauaaugaacuugagaugaacuacuauggaaaacaggaaaauugguacagccugaagaaaaacucccgcucucucggcgagaaugaugacgggaacaauaacaauggagauaacggcagagaggggaaggacgaagauaaacgggacggaaauaacgaggauaacgaaaagcugcgcaagcccaaacacaagaaacugaagcagccuggcgacggcaauccggaucccaacgcgaauccuaacguggaccccaaugcuaacccuaauguggaucccaacgccaauccuaacgucgacccgaaugccaaccccaaugcuaacccuaaugccaaccccaacgcuaauccuaacgccaaucccaacgcgaauccgaacgccaauccuaacgcuaaucccaacgccaauccuaacgcuaaucccaacgccaaucccaacgcgaacccuaaugccaacccgaaugcuaaccccaaugccaacccuaaugcuaaccccaaugccaacccuaaugccaaccccaaugcuaacccgaaugcgaacccuaacgccaaucccaacgcuaauccuaacgccaaucccaacgccaauccuaacgcuaaucccaacgccaauccgaacgcgaauccuaacgcuaaucccaacgccaaucccaacgccaacccuaaugcuaacccgaaugccaaccccaaugcuaacccuaaugccaaccccaaugcgaacccuaauaaaaacaaucaggggaacggacaaggccauaauaugcccaacgauccuaacagaaauguggacgagaacgccaaugcuaacaaugccguuaagaacaauaacaaugaggaacccagcgacaagcacauugagcaguaucucaaaaagauccagaacucccugagcacggaauggucuccgugcuccgugaccugcgggaauggcauucagguccggaucaaaccuggaagcgcuaacaagcccaaagaugagcuugacuacgaaaaugauauugagaagaaaaucuguaagauggagaaguguucuuccguguuuaacguugugaauagcucuaucgggcugauuaugguccucuccuuccuguuucuuaacuga

SEQ ID NO: 5041 - RNA, 1233 nt, Artificial Sequence
  derived and/or modified CDS sequence (opt5) from Pf(IT)____CSP
augaugagaaagcuggccauccucagcguguccucuuuccuguuugucgaggcucuuuuccaggaauaccaaugcuauggcagcuccucuaacacccggguucugaaugagcucaacuacgacaaugccgggacaaaccuguauaaugaacuugagaugaacuacuauggaaaacaggaaaauugguacagccugaagaaaaacucccgcucucucggcgagaaugaugacggggauaacgacaauggaaacaauaacaauggcaacaacaauaacggggauaauggaagagagggcaaggacgaagauaaacgggacggcaacaaugaggauaacgaaaagcugcgcaagcccaaacacaagaaacugaagcagccuggggacgauaauccggaccccaacgcgaauccuaacguggaucccaaugcuaacccuaauguggaccccaacgccaauccuaacgccaacccgaaugcuaaccccaaugccaacccuaaugcuaaccccaaugccaacccuaaugcgaaccccaaugucgacccgaacgccaauccuaacgcuaaucccaacgccaacccuaaugcuaaccccaaugccaaccccaaugcgaacccuaaugccaacccgaaugcuaaccccaaugccaacccuaaugcuaaccccaaugccaacccuaacgccaaucccaacgcuaauccgaacgcgaauccuaacgccaaucccaacgcuaauccuaacgccaaucccaacgccaauccuaacgcuaaucccaacgccaauccgaacgcgaacccuaaugcuaaccccaaugccaaccccaaugccaacccuaaugcuaacccgaaugccaaccccaauaaaaacaaucagggaaacggccaagggcauaauaugccuaacgaucccaacagaaauguggacgagaacgcuaaugccaacaaugcgguuaagaacaauaacaaugaggaaccuagcgauaagcacauugagcaguaucucaaaaagauccagaacucccugagcacggaauggucucccugcuccgugaccugcggaaauggcauucagguccggaucaaaccugggagcgccgacaagcccaaagaucaacuugacuacgagaacgauauugaaaagaaaaucuguaagauggagaaguguucuuccguguuuaauguugugaacagcucuaucggacugauuaugguccucuccuuccuguuucuuaauuga

SEQ ID NO: 5042 - RNA, 1227 nt, Artificial Sequence
  derived and/or modified CDS sequence (opt5) from Pf(14)__AGR53782.1__CSP
augaugagaaagcuggccauccucagcguguccucuuuccuguuugucgaggcucuuuuccaggaauaccaaugcuauggcagcuccucuaacacccggguucugaaugagcucaacuacgacaaugccgggacaaaccuguauaaugaacuugagaugaacuacuauggaaaacaggaaaauugguacagccugaagaaaaacucccgcucucucggcgagaaugaugacgggaacaauaacaauggagauaacggcagagaggggaaggacgaagauaaacgggacggaaauaacgaggauaacgaaaagcugcgcaagcccaaacacaagaaacugaagcagccuggcgacggcaauccggaucccaacgcgaauccuaacguggaccccaaugcuaacccuaauguggaucccaacgccaauccuaacgucgacccgaaugccaaccccaaugcuaacccuaaugccaaccccaacgcuaauccuaacgccaaucccaacgcgaauccgaacgccaauccuaacgcuaaucccaacgccaauccuaacgcuaaucccaacgccaaucccaacguggauccuaacgcgaauccgaacgccaaucccaacgcuaauccuaacgccaaucccaacgcuaauccuaacgccaaucccaacgccaauccgaacgcuaauccuaacgcgaaccccaaugccaacccuaaugcuaaccccaaugccaacccuaaugccaaccccaaugcuaacccgaaugccaacccuaaugcgaaccccaaugcuaaccccaaugccaacccuaacgccaauccgaacgcuaaucccaacgccaauccuaacgcuaaucccaacaaaaauaaccaggggaauggacaaggccauaacaugccuaaugaccccaacagaaauguugacgagaacgccaacgcgaauaacgccgugaagaauaacaauaacgaggaaccuagcgaucagcacauugagaaguaucuccagaaaauccaaaauucccugagcacggaauggucucccugcuccgugaccugcgggaacggcauucagguccggaucaagccgggaagcgcuaauaaaccuaaggaccagcuuaacuacgagaaugauauugggaaaaagaucuguaaaauggaaaaguguucuuccguuuuuaacguggucaauagcucuaucggacugauuauggugcucuccuuccuguuucuuaacuga

SEQ ID NO: 5043 - RNA, 1227 nt, Artificial Sequence
  derived and/or modified CDS sequence (opt5) from Pf(Asembo Bay)__AAN87609.1__CSP
augaugagaaagcuggccauccucagcguguccucuuuccuguuugucgaggcucuuuuccaggaauaccaaugcuauggcagcuccucuaacacccggguucugaaugagcucaacuacgacaaugccgggacaaaccuguauaaugaacuugagaugaacuacuauggaaaacaggaaaauugguacagccugaagaaaaacucccgcucucucggcgagaaugaugacgggaacaauaacaauggagauaacggcagagaggggaaggacgaagauaaacgggacggaaauaacgaggauaacgaaaagcugcgcaagcccaaacacaagaaacugaagcagccugcggacggcaauccggaucccaacgcuaauccuaacguggaccccaaugccaacccuaauguggaucccaacgccaauccuaacgucgacccgaaugcuaaccccaaugccaacccuaaugcuaaccccaacgccaauccuaacgcgaaucccaacgccaauccgaacgcuaauccuaacgccaaucccaacgcuaauccuaacgccaaucccaacgcgaaucccaacgccaacccuaaugcuaacccgaaugccaaccccaauguggauccuaacgcuaaucccaacgccaauccuaacgccaaucccaacgcuaauccgaacgcgaauccuaacgccaaccccaaugcuaacccuaaugccaaccccaaugccaacccuaaugcuaaccccaaugccaacccgaaugcgaacccuaaugcuaaccccaaugccaaccccaaugccaacccuaacgcuaauccgaacgccaaucccaacgcuaauccuaacgccaaucccaacaaaaauaaccagggcaaugggcaaggacauaacaugccuaauaaccccaauagaaacguugacgagaacgcgaaugccaacaaugcugugaagaacaauaacaaugaggaaccuagcgacaagcacauugagcaguaucucaaaacgauccagaacucccugagcaccgaauggucucccugcuccgucacaugcggcaaugggauucaggugcggaucaagccgggaagcgccaacaaaccuaaggaucaacuugacuacgcuaaugauauugagaaaaagaucuguaaaauggaaaaguguucuuccguuuuuaacguggucaauagcucuaucggccugauuauggugcucuccuuccuguuucuuaacuga

SEQ ID NO: 5044 - RNA, 1227 nt, Artificial Sequence
  derived and/or modified CDS sequence (opt5) from Pf(Bolivar)__AAN87613.1__CSP
augaugagaaagcuggccauccucagcguguccucuuuccuguuugucgaggcucuuuuccaggaauaccaaugcuauggcagcuccucuaacacccggguucugaaugagcucaacuacgacaaugccgggacaaaccuguauaaugaacuugagaugaacuacuauggaaaacaggaaaauugguacagccugaagaaaaacucccgcucucucggcgagaaugaugacgggaacaauaacaauggagauaacggcagagaggggaaggacgaagauaaacgggacggaaauaacgaggauaacgaaaagcugcgcaagcccaaacacaagaaacugaagcagccuggcgacggcaauccggaucccaacgcgaauccuaacguggaccccaaugcuaacccuaauguggaucccaacgccaauccuaacgucgacccgaaugccaaccccaaugcuaacccuaaugccaaccccaacgcuaauccuaacgccaaucccaacgcgaauccgaacgccaauccuaacgcuaaucccaacgccaauccuaacgcuaaucccaacgccaaucccaacguggauccuaacgcgaauccgaacgccaaucccaacgcuaauccuaacgccaaucccaacgcuaauccuaacgccaaucccaacgccaauccgaacgcuaauccuaacgcgaaccccaaugccaacccuaaugcuaaccccaaugccaacccuaaugccaaccccaaugcuaacccgaaugccaacccuaaugcgaaccccaaugcuaaccccaaugccaacccuaacgccaauccgaacgcuaaucccaacgccaauccuaacgcuaaucccaacaaaaauaaccaggggaauggacaaggccauaacaugccuaaugaccccaacagaaauguugacgagaacgccaacgcgaauaacgccgugaagaauaacaauaacgaggaaccuagcgauaagcacauugagcaguaucucaaaaagauccagaaugcucuguccacggaauggagccccuguucugugaccugcgggaacggcauucagguccggaucaaaccgggauccgccaauaagccuaaagaccaacuugauuacgagaacgacauugaaaagaaaaucuguaagauggagaagugcagcucuguuuuuaauguggucaacuccagcaucgggcugauuauggugcucucuuuccuguuucuuaauuga

SEQ ID NO: 5045 - RNA, 1227 nt, Artificial Sequence
  derived and/or modified CDS sequence (opt5) from Pf(Br419M3)__BAM85120.1__CSP
augaugagaaagcuggccauccucagcguguccucuuuccuguuugucgaggcucuuuuccaggaauaccaaugcuauggcagcuccucuaacacccggguucugaaugagcucaacuacgacaaugccgggacaaaccuguauaaugaacuugagaugaacuacuauggaaaacaggaaaauugguacagccugaagaaaaacucccgcucucucggcgagaaugaugacgggaacaauaacaauggagauaacggcagagaggggaaggacgaagauaaacgggacggaaauaacgaggauaacgaaaagcugcgcaagcccaaacacaagaaacugaagcagccugcggacggcaauccggaucccaacgcuaauccuaacguggaccccaaugccaacccuaauguggaucccaacgccaauccuaacgucgacccgaaugcuaaccccaaugccaacccuaaugcuaaccccaacgccaauccuaacgcgaaucccaacgccaauccgaacgcuaauccuaacgccaaucccaacgcuaauccuaacgccaaucccaacgcgaaucccaacgccaacccuaaugcuaacccgaaugccaaccccaaugcuaacccuaauguggaucccaacgccaauccuaacgccaaucccaacgcuaauccgaacgcgaauccuaacgccaaccccaaugcuaacccuaaugccaaccccaaugccaacccuaaugcuaaccccaaugccaacccgaaugcgaacccuaaugcuaaccccaaugccaaccccaaugccaacccuaacgcuaauccgaacgccaaucccaacgcuaauccuaacgccaaucccaacaaaaauaaccagggcaaugggcaaggacauaacaugccuaauaaccccaauagaaacguugacgagaacgcgaaugccaacaaugcugugaagaacaauaacaaugaggaaccuagcgacaagcacauugagcaguaucucaaaaagauccagaacucccugagcacggaauggucucccuguuccgugaccugcggcaaugggauucagguccggaucaaaccgggaagcgccggcaagucuaaagaugagcuugacuacgaaaacgauauugagaagaaaaucuguaagauggagaagugcuccagcguuuuuaauguggucaacucuuccaucgggcugauuauggugcucagcuuccuguuucuuaauuga

SEQ ID NO: 5046 - RNA, 1227 nt, Artificial Sequence
  derived and/or modified CDS sequence (opt5) from Pf(Gha1110-003)__BAM84840.1__CSP
augaugagaaagcuggccauccucagcguguccucuuuccuguuugucgaggcucuuuuccaggaauaccaaugcuauggcagcuccucuaacacccggguucugaaugagcucaacuacgacaaugccgggacaaaccuguauaaugaacuugagaugaacuacuauggaaaacaggaaaauugguacagccugaagaaaaacucccgcucucucggcgagaaugaugacgggaacaauaacaauggagauaacggcagagaggggaaggacgaagauaaacgggacggaaauaacgaggauaacgaaaagcugcgcaagcccaaacacaagaaacugaagcagccugcggacggcaauccggaucccaacgcuaauccuaacguggaccccaaugccaacccuaauguggaucccaacgccaauccuaacgucgacccgaaugcuaaccccaaugccaacccuaaugcuaaccccaacgccaauccuaacgcgaaucccaacgccaauccgaacgcuaauccuaacgccaaucccaacgcuaauccuaacgccaaucccaacgcgaaucccaacgccaacccuaaugcuaacccgaaugccaaccccaauguggauccuaacgcuaaucccaacgccaauccuaacgccaaucccaacgcuaauccgaacgcgaauccuaacgccaaccccaaugcuaacccuaaugccaaccccaaugccaacccuaaugcuaaccccaaugccaacccgaaugcgaacccuaaugcuaaccccaaugccaaccccaaugccaacccuaacgcuaauccgaacgccaaucccaacgcuaauccuaacgccaaucccaacaaaaauaaccagggcaaugggcaaggacauaacaugccuaaugaccccaacagaaauguugacgagaacgcgaacgccaauaacgcugugaagaauaacaauaacgaggaaccuagcgaucagcacauugagaaguaucucaaaacgaucaaaaauucccugagcaccgaauggucucccugcuccgucacaugcggcaacgggauucaggugcggaucaagccgggaagcgccaauaagccuaaagaccagcuugauuacgcuaacgacauugagaagaaaaucuguaagauggaaaaguguucuuccguuuuuaauguggucaacagcucuaucggccugauuauggugcucuccuuccuguuucuuaauuga

SEQ ID NO: 5047 - RNA, 1227 nt, Artificial Sequence
  derived and/or modified CDS sequence (opt5) from Pf(Tz03-032)__BAM84799.1__CSP
augaugagaaagcuggccauccucagcguguccucuuuccuguuugucgaggcucuuuuccaggaauaccaaugcuauggcagcuccucuaacacccggguucugaaugagcucaacuacgacaaugccgggacaaaccuguauaaugaacuugagaugaacuacuauggaaaacaggaaaauugguacagccugaagaaaaacucccgcucucucggcgagaaugaugacgggaacaauaacaauggagauaacggcagagaggggaaggacgaagauaaacgggacggaaauaacgaggauaacgaaaagcugcgcaagcccaaacacaagaaacugaagcagccugcggacggcaauccggaucccaacgcuaauccuaacguggaccccaaugccaacccuaauguggaucccaacgccaauccuaacgucgacccgaaugcuaaccccaaugccaacccuaaugcuaaccccaacgccaauccuaacgcgaaucccaacgccaauccgaacgcuaauccuaacgccaaucccaacgcuaauccuaacgccaaucccaacguggaucccaaugcgaacccuaacgccaauccgaacgcuaaucccaacgccaauccuaacgcuaaucccaacgccaauccuaacgccaaucccaacgcuaauccgaacgcgaauccuaacgccaaccccaaugcuaacccuaaugccaaccccaaugccaacccuaaugcuaaccccaaugccaacccgaaugcgaacccuaaugcuaaccccaaugccaaccccaaugccaacccuaacgcuaauccgaacgccaaucccaacgcuaauccuaacgccaaucccaacaaaaauaaccagggcaaugggcaaggacauaacaugccuaaugaccccaacagaaauguugacgagaacgcgaacgccaauaacgcugugaagaauaacaauaacgaggaaccuagcgaucagcacauugagaaguaucucaaaaagauccaaaauucccugagcacggaauggucucccugcuccgugaccugcggcaacgggauucagguccggaucaaaccgggaagcgccaauaagccuaaagaccagcuugauuacgcuaacgacauugagaagaaaaucuguaagauggaaaaguguucuuccguuuuuaauguggucaacagcucuaucggccugauuauggugcucuccuuccuguuucuuaauuga

SEQ ID NO: 5048 - RNA, 1227 nt, Artificial Sequence
  derived and/or modified CDS sequence (opt5) from Pf(Tz03-033)__BAM84800.1__CSP
augaugagaaagcuggccauccucagcguguccucuuuccuguuugucgaggcucuuuuccaggaauaccaaugcuauggcagcuccucuaacacccggguucugaaugagcucaacuacgacaaugccgggacaaaccuguauaaugaacuugagaugaacuacuauggaaaacaggaaaauugguacagccugaagaaaaacucccgcucucucggcgagaaugaugacgggaacaauaacaauggagauaacggcagagaggggaaggacgaagauaaacgggacggaaauaacgaggauaacgaaaagcugcgcaagcccaaacacaagaaacugaagcagccugcggacggcaauccggaucccaacgcuaauccuaacguggaccccaaugccaacccuaauguggaucccaacgccaauccuaacgucgacccgaaugcuaaccccaaugccaacccuaaugcuaaccccaacgccaauccuaacgcgaaucccaacgccaauccgaacgcuaauccuaacgccaaucccaacgcuaauccuaacgccaaucccaacgcgaaucccaacgccaacccuaaugcuaacccgaaugccaaccccaauguggauccuaacgcuaaucccaacgccaauccuaacgccaaucccaacgcuaauccgaacgcgaauccuaacgccaaccccaaugcuaacccuaaugccaaccccaaugccaacccuaaugcuaaccccaaugccaacccgaaugcgaacccuaaugcuaaccccaaugccaaccccaaugccaacccuaacgcuaauccgaacgccaaucccaacgcuaauccuaacgccaaucccaacaaaaauaaccagggcaaugggcaaggacauaacaugccuaaugaccccaacagaaauguugacgagaacgcgaacgccaauaacgcugugaagaauaacaauaacgaggaaccuagcgaucagcacauugagaaguaucucaaaacgaucaaaaauucccugagcaccgaauggucucccugcuccgucacaugcggcaacgggauucaggugcggaucaagccgggaagcgccaauaagccuaaagacgagcuugauuacgcuaacgacauugaaaagaaaaucuguaagauggagaaguguucuuccguuuuuaauguggucaacagcucuaucggccugauuauggugcucuccuuccuguuucuuaauuga

SEQ ID NO: 5049 - RNA, 1227 nt, Artificial Sequence
  derived and/or modified CDS sequence (opt5) from Pf(Tz93-056)__BAM84765.1__CSP
augaugagaaagcuggccauccucagcguguccucuuuccuguuugucgaggcucuuuuccaggaauaccaaugcuauggcagcuccucuaacacccggguucugaaugagcucaacuacgacaaugccgggacaaaccuguauaaugaacuugagaugaacuacuauggaaaacaggaaaauugguacagccugaagaaaaacucccgcucucucggcgagaaugaugacgggaacaauaacaauggagauaacggcagagaggggaaggacgaagauaaacgggacggaaauaacgaggauaacgaaaagcugcgcaagcccaaacacaagaaacugaagcagccugcggacggcaauccggaucccaacgcuaauccuaacguggaccccaaugccaacccuaauguggaucccaacgccaauccuaacgucgacccgaaugcuaaccccaaugccaacccuaaugcuaaccccaacgccaauccuaacgcgaaucccaacgccaauccgaacgcuaauccuaacgccaaucccaacgcuaauccuaacgccaaucccaacgcgaaucccaacgccaacccuaaugcuaacccgaaugccaaccccaauguggauccuaacgcuaaucccaacgccaauccuaacgccaaucccaacgcuaauccgaacgcgaauccuaacgccaaccccaaugcuaacccuaaugccaaccccaaugccaacccuaaugcuaaccccaaugccaacccgaaugcgaacccuaaugcuaaccccaaugccaaccccaaugccaacccuaacgcuaauccgaacgccaaucccaacgcuaauccuaacgccaaucccaacaaaaauaaccagggcaaugggcaaggacauaacaugccuaaugaccccaacagaaauguugacgagaacgcgaacgccaauaacgcugugaagaauaacaauaacgaggaaccuagcgauaagcacauuaaagaguaucucacgaagaucaaaaauuccauuagcaccgaauggucucccugcuccgucacaugcggcaacgggauccaggugcggauuaagccgggaagcgccaauaaaccuaaggacgagcuggauuacgaaaacgacaucgagaaaaagaucuguaagauggagaaauguucuuccguuuuuaauguggucaacagcucuauuggccuuaucauggugcuguccuuccucuuucugaauuga

SEQ ID NO: 5050 - RNA, 1227 nt, Artificial Sequence
  derived and/or modified CDS sequence (opt5) from Pf(Tz93-085)__BAM84771.1__CSP
augaugagaaagcuggccauccucagcguguccucuuuccuguuugucgaggcucuuuuccaggaauaccagugcuauggcagcuccucuaacacccggguucugaaugagcucaacuacgacaaugccgggacaaaccuguauaaugaacuugagaugaacuacuauggaaaacaggaaaauugguacagccugaagaaaaacucccgcucucucggcgagaaugaugacgggaacaauaacaauggagauaacggcagagaggggaaggacgaagauaaacgggacggaaauaacgaggauaacgaaaagcugcgcaagcccaaacacaagaaacugaagcagccugcggacggcaauccggaucccaacgcuaauccuaacguggaccccaaugccaacccuaauguggaucccaacgccaauccuaacgucgacccgaaugcuaaccccaaugccaacccuaaugcuaaccccaacgccaauccuaacgcgaaucccaacgccaauccgaacgcuaauccuaacgccaaucccaacgcuaauccuaacgccaaucccaacgcgaaucccaacgccaacccuaaugcuaacccgaaugccaaccccaauguggauccuaacgcuaaucccaacgccaauccuaacgccaaucccaacgcuaauccgaacgcgaauccuaacgccaaccccaaugcuaacccuaaugccaaccccaaugccaacccuaaugcuaaccccaaugccaacccgaaugcgaacccuaaugcuaaccccaaugccaaccccaaugccaacccuaacgcuaauccgaacgccaaucccaacgcuaauccuaacgccaaucccaacaaaaauaaccagggcaaugggcaaggacauaacaugccuaaugaccccaacagaaauguugacgagaacgcgaaggccaacaaugcugugaagaacaauaacaaugaggaaccuagcgauaaacacauuaaggaguaucucaacaaaauccaaaauuccauuagcacggaauggucucccugcuccgugaccugcggcaacgggauccagguccggauuaagccgggaagcgccgacaaaccuaaggaucagcuggacuacaucaaugauaucgagaaaaagauuuguaagauggaaaaauguucuuccguuuuuaacguggucaauagcucuaucggccuuauuauggugcuguccuuccucuuucugaacuga

SEQ ID NO: 5051 - RNA, 1227 nt, Artificial Sequence
  derived and/or modified CDS sequence (opt5) from Pf(Tz93-102)__BAM84773.1__CSP
augaugagaaagcuggccauccucagcguguccucuuuccuguuugucgaggcucuuuuccaggaauaccaaugcuauggcagcuccucuaacacccggguucugaaugagcucaacuacgacaaugccgggacaaaccuguauaaugaacuugagaugaacuacuauggaaaacaggaaaauugguacagccugaagaaaaacucccgcucucucggcgagaaugaugacgggaacaauaacaauggagauaacggcagagaggggaaggacgaagauaaacgggacggaaauaacgaggauaacgaaaagcugcgcaagcccaaacacaagaaacugaagcagccuggcgacggcaauccggaucccaacgcgaauccuaacguggaccccaaugcuaacccuaauguggaucccaacgccaauccuaacgucgacccgaaugccaaccccaaugcuaacccuaaugccaaccccaacgcuaauccuaacgccaaucccaacgcgaauccgaacgccaauccuaacgcuaaucccaacgccaauccuaacgcuaaucccaacgccaaucccaacgcgaacccuaaugccaacccgaaugcuaaccccaauguggauccuaacgccaaucccaacgcuaauccuaacgccaaucccaacgccaauccgaacgcuaauccuaacgcgaaccccaaugccaacccuaaugcuaaccccaaugccaacccuaaugccaaccccaaugcuaacccgaaugccaacccuaaugcgaaccccaaugcuaaccccaaugccaacccuaacgccaauccgaacgcuaaucccaacgccaauccuaacgcuaaucccaacaaaaauaaccaggggaauggacaaggccauaacaugccuaaugaccccaacagaaauguugacgagaacgccaacgcgaauaacgccgugaagaauaacaauaacgaggaaccuagcgauaagcacauugagcaguaucucaaaacgaucaaaaauucccugagcaccgaauggucucccugcuccgucacaugcgggaacggcauucaggugcggaucaagccgggaagcgcuaauaagccuaaagacgagcuuaacuacgaaaaugauauugagaagaaaaucuguaagauggagaaguguucuuccguuuuuaacguggucaauagcucuaucgggcugauuauggugcucuccuuccuguuucuuaacuga

SEQ ID NO: 5052 - RNA, 1227 nt, Artificial Sequence
  derived and/or modified CDS sequence (opt5) from Pf(Tz98-021)__BAM84783.1__CSP
augaugagaaagcuggccauccucagcguguccucuuuccuguuugucgaggcucuuuuccaggaauaccaaugcuauggcagcuccucuaacacccggguucugaaugagcucaacuacgacaaugccgggacaaaccuguauaaugaacuugagaugaacuacuauggaaaacaggaaaauugguacagccugaagaaaaacucccgcucucucggcgagaaugaugacgggaacaauaacaauggagauaacggcagagaggggaaggacgaagauaaacgggacggaaauaacgaggauaacgaaaagcugcgcaagcccaaacacaagaaacugaagcagccugcggacggcaauccggaucccaacgcuaauccuaacguggaccccaaugccaacccuaauguggaucccaacgccaauccuaacgucgacccgaaugcuaaccccaaugccaacccuaaugcuaaccccaacgccaauccuaacgcgaaucccaacgccaauccgaacgcuaauccuaacgccaaucccaacgcuaauccuaacgccaaucccaacgcgaaucccaacguggauccuaacgccaauccgaacgcuaaucccaacgccaauccuaacgcuaaucccaacgccaauccuaacgccaaucccaacgcuaauccgaacgcgaauccuaacgccaaccccaaugcuaacccuaaugccaaccccaaugccaacccuaaugcuaaccccaaugccaacccgaaugcgaacccuaaugcuaaccccaaugccaaccccaaugccaacccuaacgcuaauccgaacgccaaucccaacgcuaauccuaacgccaaucccaacaaaaauaaccagggcaaugggcaaggacauaacaugccuaaugaccccaacagaaauguugacgagaacgcgaacgccaauaacgcugugaagaauaacaauaacgaggaaccuagcgaucagcacauugagaaguaucucaaaacgauccaaaauucccugagcaccgaauggucucccugcuccgucacaugcggcaacgggauucaggugcggaucaagccgggaagcgccaauaaaccuaaggaccagcuugauuacgcuaacgacauugagaaaaagaucuguaaaauggaaaaguguucuuccguuuuuaauguggucaacagcucuaucggccugauuauggugcucuccuuccuguuucuuaauuga

SEQ ID NO: 5053 - RNA, 1227 nt, Artificial Sequence
  derived and/or modified CDS sequence (opt5) from Pf(Tz98-030)__BAM84785.1__CSP
augaugagaaagcuggccauccucagcguguccucuuuccuguuugucgaggcucuuuuccaggaauaccaaugcuauggcagcuccucuaacacccggguucugaaugagcucaacuacgacaaugccgggacaaaccuguauaaugaacuugagaugaacuacuauggaaaacaggaaaauugguacagccugaagaaaaacucccgcucucucggcgagaaugaugacgggaacaauaacaauggagauaacggcagagaggggaaggacgaagauaaacgggacggaaauaacgaggauaacgaaaagcugcgcaagcccaaacacaagaaacugaagcagccuggcgacggcaauccggaucccaacgcgaauccuaacguggaccccaaugcuaacccuaauguggaucccaacgccaauccuaacgucgacccgaaugccaaccccaaugcuaacccuaaugccaaccccaacgcuaauccuaacgccaaucccaacgcgaauccgaacgccaauccuaacgcuaaucccaacgccaauccuaacgcuaaucccaacgccaaucccaacguggauccuaacgcgaauccgaacgccaaucccaacgcuaauccuaacgccaaucccaacgcuaauccuaacgccaaucccaacgccaauccgaacgcuaauccuaacgcgaaccccaaugccaacccuaaugcuaaccccaaugccaacccuaaugccaaccccaaugcuaacccgaaugccaacccuaaugcgaaccccaaugcuaaccccaaugccaacccuaacgccaauccgaacgcuaaucccaacgccaauccuaacgcuaaucccaacaaaaauaaccaggggaauggacaaggccauaacaugccuaaugaccccaacagaaauguugacgagaacgccaacgcgaauaacgccgugaagaauaacaauaacgaggaaccuagcgaucagcacauugagaaguaucuccagaaaauccaaaauucccugagcacggaauggucucccugcuccgugaccugcgggaacggcauucagguccggaucaagccgggaagcgcuaauaaaccuaaggaccagcuuaacuacgagaaugauauugagaaaaagaucuguaaaauggaaaaguguucuuccguuuuuaacguggucaauagcucuaucgggcugauuauggugcucuccuuccuguuucuuaacuga

SEQ ID NO: 5054 - RNA, 1227 nt, Artificial Sequence
  derived and/or modified CDS sequence (opt5) from Pf(Tz98-070)__BAM84790.1__CSP
augaugagaaagcuggccauccucagcguguccucuuuccuguuugucgaggcucuuuuccaggaauaccaaugcuauggcagcuccucuaacacccggguucugaaugagcucaacuacgacaaugccgggacaaaccuguauaaugaacuugagaugaacuacuauggaaaacaggaaaauugguacagccugaagaaaaacucccgcucucucggcgagaaugaugacgggaacaauaacaauggagauaacggcagagaggggaaggacgaagauaaacgggacggaaauaacgaggauaacgaaaagcugcgcaagcccaaacacaagaaacugaagcagccuggcgacggcaauccggaucccaacgcgaauccuaacguggaccccaaugcuaacccuaauguggaucccaacgccaauccuaacgucgacccgaaugccaaccccaaugcuaacccuaaugccaaccccaacgcuaauccuaacgccaaucccaacgcgaauccgaacgccaauccuaacgcuaaucccaacgccaauccuaacgcuaaucccaacgccaaucccaacgcgaacccuaaugccaacccgaaugcuaaccccaauguggauccuaacgccaaucccaacgcuaauccuaacgccaaucccaacgccaauccgaacgcuaauccuaacgcgaaccccaaugccaacccuaaugcuaaccccaaugccaacccuaaugccaaccccaaugcuaacccgaaugccaacccuaaugcgaaccccaaugcuaaccccaaugccaacccuaacgccaauccgaacgcuaaucccaacgccaauccuaacgcuaaucccaacaaaaauaaccaggggaauggacaaggccauaacaugccuaaugaccccaacagaaauguugacgagaacgccaacgcgaaugaugccgugaagaacaauaacaaugaggaaccuagcgaccagcacauugagaaguaucucaaaaucauuaagaacucccugagcacggaauggucucccugcuccgugaccugcgggaauggaauccagguccggauuaaaccgggcagcgcuaacaagccuaaagaucagcuugacuacgccaaugauaucgagaagaaaaucuguaagauggaaaaguguucuuccguuuuuaacguggucaauagcucuauugggcugaucauggugcucuccuuccuguuucuuaacuga

SEQ ID NO: 5055 - RNA, 1224 nt, Artificial Sequence
  derived and/or modified CDS sequence (opt5) from Pf(A150)__ACO49332.1__CSP
augagaaagcuggccauccucagcguguccucuuuccuguuugucgaggcucuuuuccaggaauaccaaugcuauggcagcuccucuaacacccggguucugaaugagcucaacuacgacaaugccgggacaaaccuguauaaugaacuugagaugaacuacuauggaaaacaggaaaauugguacagccugaagaaaaacucccgcucucucggcgagaaugaugacgggaacaauaacaauggagauaacggcagagaggggaaggacgaagauaaacgggacggaaauaacgaggauaacgaaaagcugcgcaagcccaaacacaagaaacugaagcagccuggcgacggcaauccggaucccaacgcgaauccuaacguggaccccaaugcuaacccuaauguggaucccaacgccaauccuaacgucgacccgaaugccaaccccaaugcuaacccuaaugccaaccccaacgcuaauccuaacgccaaucccaacgcgaauccgaacgccaauccuaacgcuaaucccaacgccaauccuaacgcuaaucccaacgccaaucccaacgcgaacccuaaugccaacccgaaugcuaaccccaaugccaacccuaaugcuaaccccaaugccaacccuaaugccaaccccaaugcuaacccgaaugcgaacccuaacgccaaucccaacgcuaauccuaacgccaaucccaacgccaauccuaacgcuaaucccaacgccaauccgaacgcgaauccuaacgcuaaucccaacgccaaucccaacgccaacccuaaugcuaacccgaaugccaaccccaaugcuaacccuaaugccaaccccaauaaaaacaaucaggggaacggacaaggccauaauaugccuaacgaucccaauagaaacguggacgagaacgcgaaugccaacaaugcuguuaagaacaauaacaaugaggaaccuagcgacaagcacauugagcaguaucucaaaaagauccagaacucccugagcacggaauggucucccugcuccgugaccugcgggaauggcauucagguccggaucaaaccgggaagcgccaacaagccuaaagaugagcuugacuacgaaaaugauauugagaagaaaaucuguaagauggagaaguguucuuccguguuuaacguugugaauagcucuaucgggcugauuaugguccucuccuuccuguuucuuaacuga

SEQ ID NO: 5056 - RNA, 1215 nt, Artificial Sequence
  derived and/or modified CDS sequence (opt5) from Pf(Gha1109-183)__BAM84829.1__CSP
augaugagaaagcuggccauccucagcguguccucuuuccuguuugucgaggcucuuuuccaggaauaccaaugcuauggcagcuccucuaacacccggguucugaaugagcucaacuacgacaaugccgggacaaaccuguauaaugaacuugagaugaacuacuauggaaaacaggaaaauugguacagccugaagaaaaacucccgcucucucggcgagaaugaugacgggaacaauaacaauggagauaacggcagagaggggaaggacgaagauaaacgggacggaaauaacgaggauaacgaaaagcugcgcaagcccaaacacaagaaacugaagcagccugcggacggcaauccggaucccaacgcuaauccuaacguggaccccaaugccaacccuaauguggaucccaacgccaauccuaacgucgacccgaaugcuaaccccaaugccaacccuaaugcuaaccccaacgccaauccuaacgcgaaucccaacgccaauccgaacgcuaauccuaacgccaaucccaacgcuaauccuaacgccaaucccaacgcgaaucccaacgccaacccuaaugcuaacccgaauguggaucccaacgccaauccuaacgcuaaucccaacgccaauccuaacgccaaucccaacgcuaauccgaacgcgaauccuaacgccaaccccaaugcuaacccuaaugccaaccccaaugccaacccuaaugcuaaccccaaugccaacccgaaugcgaacccuaaugcuaaccccaaugccaaccccaaugccaacccuaacgcuaauccgaacgccaaucccaacgcuaauccuaacaaaaauaaccagggcaaugggcaaggacauaacaugcccaaugacccuaacagaaauguugacgagaacgccaaugcgaacaacgccgugaagaauaacaauaacgaggaacccagcgaucagcacauugagaaguaucucaaaacgaucaaaaauucccugagcaccgaauggucuccuugcuccgucacaugcggcaacgggauucaggugcggaucaagcccggaagcgcuaauaagccgaaagaccagcuugauuacgccaacgacauugagaagaaaaucuguaagauggaaaaguguucuuccguuuuuaauguggucaacagcucuaucggccugauuauggugcucuccuuccuguuucuuaauuga

SEQ ID NO: 5057 - RNA, 1215 nt, Artificial Sequence
  derived and/or modified CDS sequence (opt5) from Pf(Pal97-107)__BAM84956.1__CSP
augaugagaaagcuggccauccucagcguguccucuuuccuguuugucgaggcucuuuuccaggaauaccaaugcuauggcagcuccucuaacacccggguucugaaugagcucaacuacgacaaugccgggacaaaccuguauaaugaacuugagaugaacuacuauggaaaacaggaaaauugguacagccugaagaaaaacucccgcucucucggcgagaaugaugacgggaacaauaacaauggagauaacggcagagaggggaaggacgaagauaaacgggacggaaauaacgaggauaacgaaaagcugcgcaagcccaaacacaagaaacugaagcagccuggcgacggcaauccggaucccaacgcgaauccuaacguggaccccaaugcuaacccuaauguggaucccaacgccaauccuaacgucgacccgaaugccaaccccaaugcuaacccuaaugccaaccccaacgcuaauccuaacgccaaucccaacgcgaauccgaacgccaauccuaacgcuaaucccaacgccaauccuaacgcuaaucccaacgccaaucccaacgcgaacccuaaugccaacccgaauguggaucccaacgcuaauccuaacgccaaucccaacgcuaauccuaacgccaaucccaacgccaauccgaacgcuaauccuaacgcgaaccccaaugccaacccuaaugcuaaccccaaugccaacccuaaugccaaccccaaugcuaacccgaaugccaacccuaaugcgaaccccaaugcuaaccccaaugccaacccuaacgccaauccgaacgcuaaucccaacgccaauccuaacaaaaauaaccaggggaauggacaaggccauaacaugcccaaugacccuaacagaaauguugacgagaacgcuaaugccaacaacgcggugaagaauaacaauaacgaggaacccagcgauaagcacauuaaagaguaucucacgaagaucaaaaauuccauuagcaccgaauggucuccuugcuccgucacaugcgggaacggaauccaggugcggauuaagcccggcagcgccaauaaaccgaaggacgagcuggauuacgaaaacgacaucgagaaaaagaucuguaagauggagaaauguucuuccguuuuuaauguggucaacagcucuauugggcuuaucauggugcuguccuuccucuuucugaauuga

SEQ ID NO: 5058 - RNA, 1215 nt, Artificial Sequence
  derived and/or modified CDS sequence (opt5) from Pf(Tz98-103)__BAM84795.1__CSP
augaugagaaagcuggccauccucagcguguccucuuuccuguuugucgaggcucuuuuccaggaauaccagugcuauggcagcuccucuaacacccggguucugaaugagcucaacuacgacaaugccgggacaaaccuguauaaugaacuugagaugaacuacuauggaaaacaggaaaauugguacagccugaagaaaaacucccgcucucucggcgagaaugaugacgggaacaauaacaauggagauaacggcagagaggggaaggacgaagauaaacgggacggaaauaacgaggauaacgaaaagcugcgcaagcccaaacacaagaaacugaagcagccugcggacggcaauccggaucccaacgcuaauccuaacguggaccccaaugccaacccuaauguggaucccaacgccaauccuaacgucgacccgaaugcuaaccccaaugccaacccuaaugcuaaccccaacgccaauccuaacgcgaaucccaacgccaauccgaacgcuaauccuaacgccaaucccaacgcuaauccuaacgccaaucccaacgcgaaucccaacgccaacccuaaugcuaacccgaaugccaaccccaauguggauccuaacgcuaaucccaacgccaauccuaacgccaaucccaacgcuaauccgaacgcgaauccuaacgccaaccccaaugcuaacccuaaugccaaccccaaugccaacccuaaugcuaaccccaaugccaacccgaaugcgaacccuaaugcuaaccccaaugccaaccccaaugccaacccuaacgcuaauccgaacgccaaucccaacgcuaauccuaacaaaaauaaccagggcaaugggcaaggacauaacaugcccaaugacccuaacagaaauguugacgagaacgccaaugcgaacaacgccgugaagaauaacaauaacgaggaacccagcgauaagcacauuacggaguaucucaaacggauccaaaauucccugagcaccgaauggucuccuuguuccgucacaugcggcaacgggauucaggugcgcaucaagcccggaagcgcuggcaaaucuaagaaugagcuugacuacgaaaacgauauugagaaaaagaucuguaaaauggagaagugcuccagcguuuuuaauguggucaacucuuccaucgggcugauuauggugcucagcuuccuguuucuuaauuga

SEQ ID NO: 5059 - RNA, 1215 nt, Artificial Sequence
  derived and/or modified CDS sequence (opt5) from Pf(Yaounde)__AAN87588.1__CSP
augaugagaaagcuggccauccucagcguguccucuuuccuguuugucgaggcucuuuuccaggaauaccaaugcuauggcagcuccucuaacacccggguucugaaugagcucaacuacgacaaugccgggacaaaccuguauaaugaacuugagaugaacuacuauggaaaacaggaaaauugguacagccugaagaaaaacucccgcucucucggcgagaaugaugacgggaacaauaacaauggagauaacggcagagaggggaaggacgaagauaaacgggacggaaauaacgaggauaacgaaaagcugcgcaagcccaaacacaagaaacugaagcagccugcggacggcaauccggaucccaacgcuaauccuaacguggaccccaaugccaacccuaauguggaucccaacgccaauccuaacgucgacccgaaugcuaaccccaaugccaacccuaaugcuaaccccaacgccaauccuaacgcgaaucccaacgccaauccgaacgcuaauccuaacgccaaucccaacgcuaauccuaacguggaucccaaugccaaccccaaugcgaacccuaacgccaauccgaacgcuaaucccaacgccaauccuaacgcuaaucccaacgccaauccuaacgccaaucccaacgcuaauccgaacgcgaauccuaacgccaaccccaaugcuaacccuaaugccaaccccaaugccaacccuaaugcuaaccccaaugccaacccgaaugcgaacccuaaugcuaaccccaaugccaaccccaaugccaacccuaacgcuaauccgaacgccaaucccaacgcuaauccuaacaaaaauaaccagggcaaugggcaaggacauaacaugcccaaugacccuaacagaaauguugacgagaacgccaaugcgaacaacgccgugaagaauaacaauaacgaggaacccagcgaucagcacauugagaaguaucucaauaaaaucaagaacucccugagcacggaauggucuccuugcuccgugaccugcggcaaugggauucagguccggaucaaacccggaagcgcuaacaagccgaaagaccagcuugauuacgccaaugacauugagaagaaaaucuguaagauggaaaaguguucuuccguuuuuaacguggucaauagcucuaucggccugauuauggugcucuccuuccuguuucuuaacuga

SEQ ID NO: 5060 - RNA, 1209 nt, Artificial Sequence
  derived and/or modified CDS sequence (opt5) from Pf(CMC247)__ADF48384.1__CSP
augagaaagcuggccauccucagcguguccucuuuccuguuugucgaggcucuuuuccaggaauaccaaugcuauggcagcuccucuaacacccggguucugaaugagcucaacuacgacaaugccgggacaaaccuguauaaugaacuugagaugaacuacuauggaaaacaggaaaauugguacagccugaagaaaaacucccgcucucucggcgagaaugaugacgggaacaauaacaauggagauaacggcagagaggggaaggacgaagauaaacgggacggaaauaacgaggauaacgaaaagcugcgcaagcccaaacacaagaaacugaagcagccuggcgacggcaauccggaucccaacgcgaauccuaacguggaccccaaugcuaacccuaauguggaucccaacgccaauccuaacgucgacccgaaugccaaccccaaugcuaacccuaaugccaaccccaacgcuaauccuaacgccaaucccaacgcgaauccgaacgccaauccuaacgcuaaucccaacgccaauccuaacgcuaaucccaacgccaaucccaacgcgaacccuaaugccaacccgaaugcuaaccccaaugccaacccuaaugcuaaccccaaugccaacccuaaugccaaccccaaugcuaacccgaaugcgaacccuaacgccaaucccaacgcuaauccuaacgccaaucccaacgccaauccuaacgcuaaucccaacgccaauccgaacgcgaauccuaacgcuaaucccaacgccaaucccaacgccaacccuaaugcuaacccgaaugccaaccccaaugcuaacccuaauaaaaacaaucaggggaacggacaaggccauaauaugcccaacgauccuaauagaaacguggacgagaaugccaacgcgaacaaugacgagaacaauaacaaugaggaacccagcgauaagcacauugaacaguaucucaagaaaauccaguacucccugagcacggaguggucuccuugcuccguuaccugcgggaacggcauucaggugcggaucaagcccggaagcgccgacaaaccgaaggaucaacuugacuacgaaaaugauauugagaaaaagaucuguaaaauggagaaguguucuuccgucuuuaacgugguuaauagcucuaucgggcugauuauggugcucuccuuccuguuucuuaacuga

SEQ ID NO: 5061 - RNA, 1206 nt, Artificial Sequence
  derived and/or modified CDS sequence (opt5) from Pf(Gha1109-215)__BAM84833.1__CSP
augaugagaaagcuggccauccucagcguguccucuuuccuguuugucgaggcucuuuuccaggaauaccaaugcuauggcagcuccucuaacacccggguucugaaugagcucaacuacgacaaugccgggacaaaccuguauaaugaacuugagaugaacuacuauggaaaacaggaaaauugguacagccugaagaaaaacucccgcucucucggcgagaaugaugacgggaacaaugaggauaacgaaaagcugagaaaacccaagcacaagaaacugaagcagccugcggacggaaauccggaucccaacgcuaauccuaacguggaccccaacgccaauccuaacguggaucccaaugccaacccuaaugucgacccgaacgcuaaucccaacgccaauccuaacgcuaaucccaacgccaauccuaacgcgaaucccaacgccaacccgaaugcuaacccuaaugccaaccccaaugcuaacccuaaugccaaccccaaugcgaaccccaaugccaacccuaaugcuaacccgaaugccaaccccaacgcuaauccuaacgccaaucccaacgccaauccuaacguggaucccaaugcuaacccgaaugcgaacccuaaugccaaccccaaugcuaacccuaaugccaaccccaacgccaauccuaacgcuaaucccaacgccaauccgaacgcgaauccuaacgcuaaucccaacgccaaucccaacgccaauccuaacgcuaauccgaacgccaaucccaacgcuaacccuaaugccaaccccaaugcgaacccuaaugccaaccccaaugcuaacccuaauaaaaacaaucagggcaacgggcaaggacauaauaugcccaacgacccgaaucggaacguugaugagaacgccaaggcuaauaacgccgugaaaaauaacaauaacgaggaaccuagcgacaagcacauugagcaguaucucaagacgauccaaaauucccugagcaccgaauggucucccugcuccgucacaugcggcaacggcauucaggugcgcaucaaaccugggagcgcgaauaagcccaaagaucagcuugacuacgagaacgacauugaaaagaaaaucuguaagauggagaaauguucuuccguuuuuaauguggucaacagcucuaucggacugauuauggugcucuccuuccuguuucuuaauuga

SEQ ID NO: 5062 - RNA, 1203 nt, Artificial Sequence
  derived and/or modified CDS sequence (opt5) from Pf(Gha1109-199)__BAM84831.1__CSP
augaugagaaagcuggccauccucagcguguccucuuuccuguuugucgaggcucuuuuccaggaauaccaaugcuauggcagcuccucuaacacccggguucugaaugagcucaacuacgacaaugccgggacaaaccuguauaaugaacuugagaugaacuacuauggaaaacaggaaaauugguacagccugaagaaaaacucccgcucucucggcgagaaugaugacgggaacaauaacaauggagauaacggcagagaggggaaggacgaagauaaacgggacggaaauaacgaggauaacgaaaagcugcgcaagcccaaacacaagaaacugaagcagccugcggacggcaauccggaucccaacgcuaauccuaacguggaccccaaugccaacccuaauguggaucccaacgccaauccuaacgucgacccgaaugcuaaccccaaugccaacccuaaugcuaaccccaacgccaauccuaacgcgaaucccaacgccaauccgaacgcuaauccuaacgccaaucccaacgcuaauccuaacgccaaucccaacgcgaaucccaacgccaacccuaauguggauccgaacgcuaaucccaacgccaauccuaacgcuaaucccaacgccaauccuaacgccaaucccaacgcuaauccgaacgcgaauccuaacgccaaccccaaugcuaacccuaaugccaaccccaaugccaacccuaaugcuaaccccaaugccaacccgaaugcgaacccuaaugcuaaccccaaugccaaccccaaugccaacccuaacgcuaauccgaacgccaaucccaacaaaaauaaccagggcaaugggcaaggacauaacaugccuaaugaccccaacagaaauguugacgagaacgcuaaugccaacagcgcggugaagaauaacaacaaugaggaaccuuccgauaagcacauuaaagaguaucucaacaagauccagaauagccugucuacggaauggucccccuguagcgugaccugcggcaacgggauucagguccggaucaaaccuggaucugccaauaagcccaaagacgagcuugauuacgcuaacgacauugaaaagaaaaucuguaagauggagaagugcuccagcguuuuuaauguggucaacucuuccaucggccugauuauggugcucagcuuccuguuucuuaauuga

SEQ ID NO: 5063 - RNA, 1194 nt, Artificial Sequence
  derived and/or modified CDS sequence (opt5) from Pf(Asembo Bay)__AAN87582.1__CSP
augaugagaaagcuggccauccucagcguguccucuuuccuguuugucgaggcucuuuuccaggaauaccaaugcuauggcagcuccucuaacacccggguucugaaugagcucaacuacgacaaugccgggacaaaccuguauaaugaacuugagaugaacuacuauggaaaacaggaaaauugguacagccugaagaaaaacucccgcucucucggcgagaaugaugacgggaacaaugaggauaacgaaaagcugagaaaacccaagcacaagaaacugaagcagccugcggacggaaauccggaucccaacgcuaauccuaacguggaccccaacgccaauccuaacguggaucccaaugccaacccuaaugucgacccgaacgcuaaucccaacgccaauccuaacgcuaaucccaacgccaauccuaacgcgaaucccaacgccaacccgaaugcuaacccuaaugccaaccccaaugcuaacccuaaugccaaccccaaugcgaaccccaaugccaacccuaaugcuaacccgaaugccaaccccaacgcuaauccuaacgccaaucccaacgccaauccuaacguggaucccaaugcuaacccgaaugcgaacccuaaugccaaccccaaugcuaacccuaaugccaaccccaacgccaauccuaacgcuaaucccaacgccaauccgaacgcgaauccuaacgcuaaucccaacgccaaucccaacgccaauccuaacgcuaauccgaacgccaaucccaacgcuaacccuaaugccaaccccaaugcgaacccuaaugccaaccccaauaaaaacaaucagggcaacgggcaaggacauaauaugccuaacgaccccaaucggaacguugaugagaaugcuaacgccaacaaugcugugaagaacaauaacaaugaggaaccgagcgaccagcacauugagaaauaucucaagacgauccagaacucccugagcaccgaauggucuccuugcuccgucacaugcggcaauggcauucaggugcgcaucaagcccgggagcgccaacaaaccuaaggaucaacuugacuacgcgaaugacauugagaaaaagaucuguaaaauggaaaaguguucuuccguuuuuaacguggucaauagcucuaucggacugauuauggugcucuccuuccuguuucuuaacuga

SEQ ID NO: 5064 - RNA, 1194 nt, Artificial Sequence
  derived and/or modified CDS sequence (opt5) from Pf(Tz98-017)__BAM84782.1__CSP
augaugagaaagcuggccauccucagcguguccucuuuccuguuugucgaggcucuuuuccaggaauaccaaugcuauggcagcuccucuaacacccggguucugaaugagcucaacuacgacaaugccgggacaaaccuguauaaugaacuugagaugaacuacuauggaaaacaggaaaauugguacagccugaagaaaaacucccgcucucucggcgagaaugaugacgggaacaaugaggauaacgaaaagcugagaaaacccaagcacaagaaacugaagcagccugcggacggaaauccggaucccaacgcuaauccuaacguggaccccaacgccaauccuaacguggaucccaaugccaacccuaaugucgacccgaacgcuaaucccaacgccaauccuaacgcuaaucccaacgccaauccuaacgcgaaucccaacgccaacccgaaugcuaacccuaaugccaaccccaaugcuaacccuaaugccaaccccaaugcgaaccccaaugccaacccuaaugcuaacccgaaugccaaccccaacgcuaauccuaacgccaaucccaacgccaauccuaacguggaucccaaugcuaacccgaaugcgaacccuaaugccaaccccaaugcuaacccuaaugccaaccccaacgccaauccuaacgcuaaucccaacgccaauccgaacgcgaauccuaacgcuaaucccaacgccaaucccaacgccaauccuaacgcuaauccgaacgccaaucccaacgcuaacccuaaugccaaccccaaugcgaacccuaaugccaaccccaauaaaaacaaucagggcaacgggcaaggacauaauaugccuaacgaccccaaucggaacguugaugagaaugcuaacgccaacaaugcugugaagaacaauaacaaugaggaaccgagcgacaaacacauugagcaguaucucaacaagaucaaaaauuccauuagcacggaauggucuccuugcuccgugaccugcggcaacggcauccagguccgcauuaagcccgggagcgccaauaagccuaaagaugagcugaacuacgaaaaugacaucgagaagaaaaucuguaagauggaaaaauguucuuccguuuuuaacguggucaauagcucuauuggacuuaucauggugcuguccuuccucuuucugaacuga

SEQ ID NO: 5065 - RNA, 1194 nt, Artificial Sequence
  derived and/or modified CDS sequence (opt5) from Pf(Yaounde)__AAN87583.1__CSP
augaugagaaagcuggccauccucagcguguccucuuuccuguuugucgaggcucuuuuccaggaauaccaaugcuauggcagcuccucuaacacccggguucugaaugagcucaacuacgacaaugccgggacaaaccuguauaaugaacuugagaugaacuacuauggaaaacaggaaaauugguacagccugaagaaaaacucccgcucucucggcgagaaugaugacgggaacaaugaggauaacgaaaagcugagaaaacccaagcacaagaaacugaagcagccugcggacggaaauccggaucccaacgcuaauccuaacguggaccccaacgccaauccuaacguggaucccaaugccaacccuaaugucgacccgaacgcuaaucccaacgccaauccuaacgcuaaucccaacgccaauccuaacgcgaaucccaacgccaacccgaaugcuaacccuaaugccaaccccaaugcuaacccuaaugccaaccccaaugcgaaccccaaugccaacccuaaugcuaacccgaaugccaaccccaacgcuaauccuaacgccaaucccaacgccaauccuaacguggaucccaaugcuaacccgaaugcgaacccuaaugccaaccccaaugcuaacccuaaugccaaccccaacgccaauccuaacgcuaaucccaacgccaauccgaacgcgaauccuaacgcuaaucccaacgccaaucccaacgccaauccuaacgcuaauccgaacgccaaucccaacgcuaacccuaaugccaaccccaaugcgaacccuaaugccaaccccaauaaaaacaaucagggcaacgggcaaggacauaauaugccuaacgaccccaaucggaacguugaugagaaugcuaacgccaacaaugcugugaagaacaauaacaaugaggaaccgagcgaccagcacauugagaaauaucucaagcgcauccagaacucccugagcacggaauggucuccuugcuccgugaccugcggcaauggcauucaggucagaaucaagcccgggagcgccaacaaaccuaaggaucaacuugacuacgcgaaugacauugagaaaaagaucuguaaaauggaaaaguguucuuccguuuuuaacguggucaauagcucuaucggacugauuauggugcucuccuuccuguuucuuaacuga

SEQ ID NO: 5066 - RNA, 1191 nt, Artificial Sequence
  derived and/or modified CDS sequence (opt5) from Pf(Amazonas)__AAN87593.1__CSP
augaugagaaagcuggccauccucagcguguccucuuuccuguuugucgaggcucuuuuccaggaauaccagugcuauggcagcuccucuaacacccggguucugaaugagcucaacuacgacaaugccgggacaaaccuguauaaugaacuugagaugaacuacuauggaaaacaggaaaauugguacagccugaagaaaaacucccgcucucucggcgagaaugaugacgggaacaauaacaauggagauaacggcagagaggggaaggacgaagauaaacgggacggaaauaacgaggauaacgaaaagcugcgcaagcccaaacacaagaaacugaagcagccugcggacggcaauccggaucccaacgcuaauccuaacguggaccccaaugccaacccuaauguggaucccaacgccaauccuaacgucgacccgaaugcuaaccccaaugccaacccuaaugcuaaccccaacgccaauccuaacgcgaaucccaacgccaauccgaacgcuaauccuaacgccaaucccaacgcuaauccuaacgccaaucccaacgcgaaucccaacgccaacccuaauguggauccgaacgcuaaucccaacgccaauccuaacgcuaaucccaacgccaauccuaacgccaaucccaacgcuaauccgaacgcgaauccuaacgccaaccccaaugcuaacccuaaugccaaccccaaugccaacccuaaugcuaaccccaaugccaacccgaaugcgaacccuaaugcuaaccccaaugccaaccccaaugccaacccuaacgcuaauccgaacaaaaauaaccagggcaaugggcaaggacauaacaugcccaaugacccuaacagaaauguugacgagaacgccaaugcuaacaaugccgugaagaacaauaacaacgaggaacccagcgauaagcacauuacggaguaucucaaacggauccaaaauucccugagcaccgaauggucuccuuguuccgucacaugcggcaacgggauucaggugcgcaucaagcccggaagcgcgggcaaaucuaagaaugagcuugacuacgaaaacgauauugagaaaaagaucuguaaaauggagaagugcuccagcguuuuuaauguggucaacucuuccaucgggcugauuauggugcucagcuuccuguuucuuaauuga

SEQ ID NO: 5067 - RNA, 1191 nt, Artificial Sequence
  derived and/or modified CDS sequence (opt5) from Pf(Amazonas)__AAN87594.1__CSP
augaugagaaagcuggccauccucagcguguccucuuuccuguuugucgaggcucuuuuccaggaauaccaaugcuauggcagcuccucuaacacccggguucugaaugagcucaacuacgacaaugccgggacaaaccuguauaaugaacuugagaugaacuacuauggaaaacaggaaaauugguacagccugaagaaaaacucccgcucucucggcgagaaugaugacgggaacaauaacaauggagauaacggcagagaggggaaggacgaagauaaacgggacggaaauaacgaggauaacgaaaaucugcgcaagcccaagcacaaaaagcugaaacagccugcggacggcaacccggaucccaaugcuaacccuaauguggaccccaacgccaauccuaacguggaucccaaugccaacccuaaugucgacccgaacgcuaaucccaacgccaauccuaacgcuaaccccaaugccaacccuaaugcgaaccccaaugccaacccgaaugcuaacccuaaugccaaccccaaugcuaacccuaaugccaaccccaaugcgaaccccaacgccaauccuaacguggauccgaaugcuaaccccaaugccaacccuaaugcuaaccccaaugccaacccuaaugccaaccccaaugcuaacccgaaugcgaacccuaacgccaaucccaacgcuaauccuaacgccaaucccaacgccaauccuaacgcuaaucccaacgccaauccgaacgcgaauccuaacgcuaaucccaacgccaaucccaacgccaacccuaaugcuaacccgaauaagaacaaucagggcaacgggcaaggacauaauaugcccaacgacccuaauagaaacguugacgagaaugccaacgcuaauaacgccgugaaaaauaacaacaaugaggaacccagcgauaagcacauuacggaguaucucaagcggauccagaacucccugagcaccgaauggucuccuuguuccgucacaugcggcaaugggauucaggugcgcaucaaacccggaagcgcgggcaagucuaaaaacgagcuugacuacgaaaaugauauugagaagaaaaucuguaagauggagaaaugcuccagcguuuuuaacguggucaauucuuccaucgggcugauuauggugcucagcuuccuguuucuuaacuga

SEQ ID NO: 5068 - RNA, 1191 nt, Artificial Sequence
  derived and/or modified CDS sequence (opt5) from Pf(Bolivar)__AAN87592.1__CSP
augaugagaaagcuggccauccucagcguguccucuuuccuguuugucgaggcucuuuuccaggaauaccagugcuauggcagcuccucuaacacccggguucugaaugagcucaacuacgacaaugccgggacaaaccuguauaaugaacuugagaugaacuacuauggaaaacaggaaaauugguacagccugaagaaaaacucccgcucucucggcgagaaugaugacgggaacaauaacaauggagauaacggcagagaggggaaggacgaagauaaacgggacggaaauaacgaggauaacgaaaagcugcgcaagcccaaacacaagaaacugaagcagccugcggacggcaauccggaucccaacgcuaauccuaacguggaccccaaugccaacccuaauguggaucccaacgccaauccuaacgucgacccgaaugcuaaccccaaugccaacccuaaugcuaaccccaacgccaauccuaacgcgaaucccaacgccaauccgaacgcuaauccuaacgccaaucccaacgcuaauccuaacgccaaucccaacgcgaaucccaacgccaacccuaauguggauccgaacgcuaaucccaacgccaauccuaacgcuaaucccaacgccaauccuaacgccaaucccaacgcuaauccgaacgcgaauccuaacgccaaccccaaugcuaacccuaaugccaaccccaaugccaacccuaaugcuaaccccaaugccaacccgaaugcgaacccuaaugcuaaccccaaugccaaccccaaugccaacccuaacgcuaauccgaacaaaaauaaccagggcaaugggcaaggacauaacaugcccaaugacccuaacagaaauguugacgagaacgccaaugcuaacaaugccgugaagaacaauaacaacgaggaacccagcgauaagcacauuacggaguaucucaaacggauccaaaauucccugagcaccgaauggucuccuuguuccgucacaugcggcaacgggauucaggugcgcaucaagcccggaagcgcgggcaaaucuaagaaucagcuugacuacgagaacgauauugagaaaaagaucuguaaaauggaaaagugcuccagcguuuuuaauguggucaacucuuccaucgggcugauuauggugcucagcuuccuguuucuuaauuga

SEQ ID NO: 5069 - RNA, 1182 nt, Artificial Sequence
  derived and/or modified CDS sequence (opt5) from Pf(30)__AGR53781.1__CSP
augaugagaaagcuggccauccucagcguguccucuuuccuguuugucgaggcucuuuuccaggaauaccaaugcuauggcagcuccucuaacacccggguucugaaugagcucaacuacgacaaugccgggacaaaccuguauaaugaacuugagaugaacuacuauggaaaacaggaaaauugguacagccugaagaaaaacucccgcucucucggcgagaaugaugacgggaacaaugaggauaacgaaaagcugagaaaacccaagcacaagaaacugaagcagccuggagacggcaauccggaucccaacgcgaauccuaacguggaccccaacgcuaauccuaacguggaucccaaugccaacccuaaugucgacccgaacgccaaucccaacgcuaauccuaacgccaaucccaacgcuaauccuaacgccaaucccaacgcgaacccgaaugccaacccuaaugcuaaccccaaugccaacccuaaugcuaaccccaaugccaaccccaaugcgaacccuaaugccaacccgaaugcuaaccccaacgccaauccuaacguggaucccaaugcuaacccuaaugccaaccccaaugccaacccgaaugcuaacccuaaugcgaaccccaaugccaacccuaaugcuaaccccaacgccaauccuaacgccaaucccaacgcuaauccgaacgccaauccuaacgcgaaucccaacgcuaaucccaacgccaauccuaacgccaauccgaacgcuaaucccaacgccaacccuaaugcuaaccccaaugccaacccuaauaaaaacaaucaggggaacggacaaggccauaauaugcccaacgacccuaaucggaacguugaugagaaugcgaacgccaauaacgcugugaagaacaauaacaaugaggaacccagcgacaaacacauuacggaguaucucaagaagauccagaacucccugagcaccgaauggucuccguguuccgucacaugcggcaaugggauucaggugcgcaucaaaccuggaagcgccggcaagucuaaaaacgagcuugauuacgaaaaugacauugagaagaaaaucuguaagauggaaaaaugcuccagcguuuuuaacguggucaauucuuccaucgggcugauuauggugcucagcuuccuguuucuuaacuga

SEQ ID NO: 5070 - RNA, 1182 nt, Artificial Sequence
  derived and/or modified CDS sequence (opt5) from Pf(Gha1108-087)__BAM84819.1__CSP
augaugagaaagcuggccauccucagcguguccucuuuccuguuugucgaggcucuuuuccaggaauaccaaugcuauggcagcuccucuaacacccggguucugaaugagcucaacuacgacaaugccgggacaaaccuguauaaugaacuugagaugaacuacuauggaaaacaggaaaauugguacagccugaagaaaaacucccgcucucucggcgagaaugaugacgggaacaaugaggauaacgaaaagcugagaaaacccaagcacaagaaacugaagcagccugcggacggaaauccggaucccaacgcuaauccuaacguggaccccaacgccaauccuaacguggaucccaaugccaacccuaaugucgacccgaacgcuaaucccaacgccaauccuaacgcuaaucccaacgccaauccuaacgcgaaucccaacgccaacccgaaugcuaacccuaaugccaaccccaaugcuaacccuaaugccaaccccaaugcgaaccccaaugccaacccuaaugcuaacccgaaugccaaccccaacgcuaauccuaacgccaaucccaacguggauccuaaugccaaccccaaugcuaacccgaaugcgaacccuaaugccaaccccaaugcuaacccuaaugccaaccccaacgccaauccuaacgcuaaucccaacgccaauccgaacgcgaauccuaacgcuaaucccaacgccaaucccaacgccaauccuaacgcuaauccgaacgccaaucccaacgcuaacccuaaugccaaccccaaugcgaacccuaauaaaaacaaucagggcaacgggcaaggacauaauaugcccaacgacccuaaucggaacguugaugagaaugccaacgcuaauaacgccgugaagaacaauaacaaugaggaacccagcgaccagcacauugagaaauaucucaagcgcauccagaacucccugagcacggaauggucuccgugcuccgugaccugcggcaauggcauucaggucagaaucaagccugggagcgcuaacaaacccaaggaucaacuugacuacgccaaugacauugagaaaaagaucuguaaaauggaaaaguguucuuccguuuuuaacguggucaauagcucuaucggacugauuauggugcucuccuuccuguuucuuaacuga

SEQ ID NO: 5071 - RNA, 1182 nt, Artificial Sequence
  derived and/or modified CDS sequence (opt5) from Pf(Gha1108-098)__BAM84821.1__CSP
augaugagaaagcuggccauccucagcguguccucuuuccuguuugucgaggcucuuuuccaggaauaccaaugcuauggcagcuccucuaacacccggguucugaaugagcucaacuacgacaaugccgggacaaaccuguauaaugaacuugagaugaacuacuauggaaaacaggaaaauugguacagccugaagaaaaacucccgcucucucggcgagaaugaugacgggaacaaugaggauaacgaaaagcugagaaaacccaagcacaagaaacugaagcagccuggagacggcaauccggaucccaacgcgaauccuaacguggaccccaacgcuaauccuaacguggaucccaaugccaacccuaaugucgacccgaacgccaaucccaacgcuaauccuaacgccaaucccaacgcuaauccuaacgccaaucccaacgcgaacccgaaugccaacccuaaugcuaaccccaaugccaacccuaaugcuaaccccaaugccaaccccaaugcgaacccuaaugccaacccgaaugcuaaccccaacgccaauccuaacguggaucccaaugcuaacccuaaugccaaccccaaugccaacccgaaugcuaacccuaaugcgaaccccaaugccaacccuaaugcuaaccccaacgccaauccuaacgccaaucccaacgcuaauccgaacgccaauccuaacgcgaaucccaacgcuaaucccaacgccaauccuaacgccaauccgaacgcuaaucccaacgccaacccuaaugcuaaccccaaugccaacccuaauaaaaacaaucaggggaacggacaaggccauaauaugcccaacgagccuaaucggaacguugacgaaaaugcgaacgccaauaacgcugugaagaacaauaacaaugaggagcccagcgauaaacacauugaacaguaucucaacaagauccaaaauucccugagcacggaguggucuccgugcuccgugaccugcggcaacgggauucagguccgcaucaagccuggaagcgccaauaaacccaaggaccagcuugauuacgcuaacgacauugagaaaaagaucuguaaaauggaaaaguguucuuccguuuuuaauguggucaacagcucuaucggccugauuauggugcucuccuuccuguuucuuaauuga

SEQ ID NO: 5072 - RNA, 1182 nt, Artificial Sequence
  derived and/or modified CDS sequence (opt5) from Pf(Gha1108-101)__BAM84808.1__CSP
augaugagaaagcuggccauccucagcguguccucuuuccuguuugucgaggcucuuuuccaggaauaccaaugcuauggcagcuccucuaacacccggguucugaaugagcucaacuacgacaaugccgggacaaaccuguauaaugaacuugagaugaacuacuauggaaaacaggaaaauugguacagccugaagaaaaacucccgcucucucggcgagaaugaugacgggaacaaugaggauaacgaaaagcugagaaaacccaagcacaagaaacugaagcagccugcggacggaaauccggaucccaacgcuaauccuaacguggaccccaacgccaauccuaacguggaucccaaugccaacccuaaugucgacccgaacgcuaaucccaacgccaauccuaacgcuaaucccaacgccaauccuaacgcgaaucccaacgccaacccgaaugcuaacccuaaugccaaccccaaugcuaacccuaaugccaaccccaaugcgaaccccaaugccaacccuaaugcuaacccgaaugccaaccccaacgcuaauccuaacguggaucccaaugccaacccuaaugccaaccccaaugcuaacccgaaugcgaacccuaaugccaaccccaaugcuaacccuaaugccaaccccaacgccaauccuaacgcuaaucccaacgccaauccgaacgcgaauccuaacgcuaaucccaacgccaaucccaacgccaauccuaacgcuaauccgaacgccaaucccaacgcuaacccuaaugccaaccccaaugcgaacccuaauaaaaacaaucagggcaacgggcaaggacauaauaugcccaacgacccuaaucggaacguugaugagaaugccaacgcuaauaacgccgugaagaacaauaacaaugaggaacccagcgaccagcacauugagaaauaucucaacaagaucaaaaauucccugagcacggaauggucuccgugcuccgugaccugcggcaacggcauucagguccgcaucaagccugggagcgcuaauaagcccaaagaucagcuugacuacgccaacgacauugagaagaaaaucuguaagauggaaaaauguucuuccguuuuuaauguggucaacagcucuaucggacugauuauggugcucuccuuccuguuucuuaauuga

SEQ ID NO: 5073 - RNA, 1182 nt, Artificial Sequence
  derived and/or modified CDS sequence (opt5) from Pf(Gha1108-148)__BAM84814.1__CSP
augaugagaaagcuggccauccucagcguguccucuuuccuguuugucgaggcucuuuuccaggaauaccaaugcuauggcagcuccucuaacacccggguucugaaugagcucaacuacgacaaugccgggacaaaccuguauaaugaacuugagaugaacuacuauggaaaacaggaaaauugguacagccugaagaaaaacucccgcucucucggcgagaaugaugacgggaacaaugaggauaacgaaaagcugagaaaacccaagcacaagaaacugaagcagccuggagacggcaauccggaucccaacgcgaauccuaacguggaccccaacgcuaauccuaacguggaucccaaugccaacccuaaugucgacccgaacgccaaucccaacgcuaauccuaacgccaaucccaacgcuaauccuaacgccaaucccaacgcgaacccgaaugccaacccuaaugcuaaccccaaugccaacccuaaugcuaaccccaaugccaaccccaaugcgaacccuaaugccaacccgaaugcuaaccccaacgccaauccuaacguggaucccaaugcuaacccuaaugccaaccccaaugccaacccgaaugcuaacccuaaugcgaaccccaaugccaacccuaaugcuaaccccaacgccaauccuaacgccaaucccaacgcuaauccgaacgccaauccuaacgcgaaucccaacgcuaaucccaacgccaauccuaacgccaauccgaacgcuaaucccaacgccaacccuaaugcuaaccccaaugccaacccuaauaaaaacaaucaggggaacggacaaggccauaauaugcccaacgacccuaaucggaacguugaugagaaugcgaacgccaauagcgcugugaagaacaacaauaacgaggaacccuccgacaaacacauuaaggaguaucucaauaagauccagaacagccugucuacggaaugguccccguguagcgugaccugcggcaaugggauucagguccgcaucaaaccuggaucugccaacaagcccaaagaugagcuugacuacgcuaaugacauugaaaagaaaaucuguaagauggagaaaugcuccagcguuuuuaacguggucaauucuuccaucggccugauuauggugcucagcuuccuguuucuuaacuga

SEQ ID NO: 5074 - RNA, 1182 nt, Artificial Sequence
  derived and/or modified CDS sequence (opt5) from Pf(Gha1109-097)__BAM84838.1__CSP
augaugagaaagcuggccauccucagcguguccucuuuccuguuugucgaggcucuuuuccaggaauaccaaugcuauggcagcuccucuaacacccggguucugaaugagcucaacuacgacaaugccgggacaaaccuguauaaugaacuugagaugaacuacuauggaaaacaggaaaauugguacagccugaagaaaaacucccgcucucucggcgagaaugaugacgggaacaaugaggauaacgaaaagcugagaaaacccaagcacaagaaacugaagcagccugcggacggaaauccggaucccaacgcuaauccuaacguggaccccaacgccaauccuaacguggaucccaaugccaacccuaaugucgacccgaacgcuaaucccaacgccaauccuaacgcuaaucccaacgccaauccuaacgcgaaucccaacgccaacccgaaugcuaacccuaaugccaaccccaaugcuaacccuaaugccaaccccaaugcgaaccccaaugccaacccuaaugcuaacccgaaugccaaccccaacgcuaauccuaacguggaucccaaugccaacccuaaugccaaccccaaugcuaacccgaaugcgaacccuaaugccaaccccaaugcuaacccuaaugccaaccccaacgccaauccuaacgcuaaucccaacgccaauccgaacgcgaauccuaacgcuaaucccaacgccaaucccaacgccaauccuaacgcuaauccgaacgccaaucccaacgcuaacccuaaugccaaccccaaugcgaacccuaauaaaaacaaucagggcaacgggcaaggacauaauaugcccaacgacccuaaucggaacguugaugagaaugccaaggcuaacaaugccgugaaaaacaacaauaacgaggaacccagcgacaagcacauugagcaguaucucaagacgauccaaaauucccugagcaccgaauggucuccgugcuccgucacaugcggcaacggcauucaggugcgcaucaaaccugggagcgcuaauaagcccaaagaucagcuugacuacgagaacgacauugaaaagaaaaucuguaagauggagaaauguucuuccguuuuuaauguggucaacagcucuaucggacugauuauggugcucuccuuccuguuucuuaauuga

SEQ ID NO: 5075 - RNA, 1182 nt, Artificial Sequence
  derived and/or modified CDS sequence (opt5) from Pf(Gha1110-021)__BAM84839.1__CSP
augaugagaaagcuggccauccucagcguguccucuuuccuguuugucgaggcucuuuuccaggaauaccaaugcuauggcagcuccucuaacacccggguucugaaugagcucaacuacgacaaugccgggacaaaccuguauaaugaacuugagaugaacuacuauggaaaacaggaaaauugguacagccugaagaaaaacucccgcucucucggcgagaaugaugacgggaacaaugaggauaacgaaaagcugagaaaacccaagcacaagaaacugaagcagccugcggacggaaauccggaucccaacgcuaauccuaacguggaccccaacgccaauccuaacguggaucccaaugccaacccuaaugucgacccgaacgcuaaucccaacgccaauccuaacgcuaaucccaacgccaauccuaacgcgaaucccaacgccaacccgaaugcuaacccuaaugccaaccccaaugcuaacccuaaugccaaccccaaugcgaaccccaaugccaacccuaaugcuaacccgaaugccaaccccaacgcuaauccuaacguggaucccaaugccaacccuaaugccaaccccaaugcuaacccgaaugcgaacccuaaugccaaccccaaugcuaacccuaaugccaaccccaacgccaauccuaacgcuaaucccaacgccaauccgaacgcgaauccuaacgcuaaucccaacgccaaucccaacgccaauccuaacgcuaauccgaacgccaaucccaacgcuaacccuaaugccaaccccaaugcgaacccuaauaaaaacaaucagggcaacgggcaaggacauaauaugcccaacgacccuaaucggaacguugaugagaaugccaacgcuaauaacgccgugaagaacaauaacaaugaggaacccagcgacaaacacauugagcaguaucucaagacgaucaagaacucccugagcaccgaauggucuccgugcuccgucacaugcggcaauggcauucaggugcgcaucaaaccugggagcgcuaacaagcccaaagaugagcuuaauuacgaaaacgacauugagaagaaaaucuguaagauggaaaaauguucuuccguuuuuaauguggucaacagcucuaucggacugauuauggugcucuccuuccuguuucuuaauuga

SEQ ID NO: 5076 - RNA, 1182 nt, Artificial Sequence
  derived and/or modified CDS sequence (opt5) from Pf(Tz03-068)__BAM84802.1__CSP
augaugagaaagcuggccauccucagcguguccucuuuccuguuugucgaggcucuuuuccaggaauaccaaugcuauggcagcuccucuaacacccggguucugaaugagcucaacuacgacaaugccgggacaaaccuguauaaugaacuugagaugaacuacuauggaaaacaggaaaauugguacagccugaagaaaaacucccgcucucucggcgagaaugaugacgggaacaaugaggauaacgaaaagcugagaaaacccaagcacaagaaacugaagcagccugcggacggaaauccggaucccaacgcuaauccuaacguggaccccaacgccaauccuaacguggaucccaaugccaacccuaaugucgacccgaacgcuaaucccaacgccaauccuaacgcuaaucccaacgccaauccuaacgcgaaucccaacgccaacccgaaugcuaacccuaaugccaaccccaaugcuaacccuaaugccaaccccaaugcgaaccccaaugccaacccuaaugcuaacccgaaugccaaccccaacgcuaauccuaacguggaucccaaugccaacccuaaugccaaccccaaugcuaacccgaaugcgaacccuaaugccaaccccaaugcuaacccuaaugccaaccccaacgccaauccuaacgcuaaucccaacgccaauccgaacgcgaauccuaacgcuaaucccaacgccaaucccaacgccaauccuaacgcuaauccgaacgccaaucccaacgcuaacccuaaugccaaccccaaugcgaacccuaauaaaaacaaucagggcaacgggcaaggacauaauaugcccaacgacccuaaucggaacguugaugagaaugccaacgcuaauaacgccgugaagaacaauaacaaugaggaacccagcgaccagcacauugagaaauaucucaagaucauucagaacucccugagcacggaauggucuccgugcuccgugaccugcggcaauggcauccagguccgcauuaagccugggagcgcuaacaaacccaaggaucaacuugacuacgccaaugacaucgagaaaaagaucuguaaaauggaaaaguguucuuccguuuuuaacguggucaauagcucuauuggacugaucauggugcucuccuuccuguuucuuaacuga

SEQ ID NO: 5077 - RNA, 1182 nt, Artificial Sequence
  derived and/or modified CDS sequence (opt5) from Pf(Tz03-070)__BAM84803.1__CSP
augaugagaaagcuggccauccucagcguguccucuuuccuguuugucgaggcucuuuuccaggaauaccaaugcuauggcagcuccucuaacacccggguucugaaugagcucaacuacgacaaugccgggacaaaccuguauaaugaacuugagaugaacuacuauggaaaacaggaaaauugguacagccugaagaaaaacucccgcucucucggcgagaaugaugacgggaacaaugaggauaacgaaaagcugagaaaacccaagcacaagaaacugaagcagccugcggacggaaauccggaucccaacgcuaauccuaacguggaccccaacgccaauccuaacguggaucccaaugccaacccuaaugucgacccgaacgcuaaucccaacgccaauccuaacgcuaaucccaacgccaauccuaacgcgaaucccaacgccaacccgaaugcuaacccuaaugccaaccccaaugcuaacccuaaugccaaccccaaugcgaaccccaaugccaacccuaaugcuaacccgaaugccaaccccaacgcuaauccuaacgccaaucccaacguggauccuaaugccaaccccaaugcuaacccgaaugcgaacccuaaugccaaccccaaugcuaacccuaaugccaaccccaacgccaauccuaacgcuaaucccaacgccaauccgaacgcgaauccuaacgcuaaucccaacgccaaucccaacgccaauccuaacgcuaauccgaacgccaaucccaacgcuaacccuaaugccaaccccaaugcgaacccuaauaaaaacaaucagggcaacgggcaaggacauaauaugcccaacgacccuaaucggaacguugaugagaaugccaacgcuaauaacgccgugaagaacaauaacaaugaagaacccagcgaccagcacauugagaaauaucuccagaagauccagaacucccugagcacggaauggucuccgugcuccgugaccugcggcaauggcauucaaguccgcaucaagccugggagcgcuaacaaacccaaggaucagcuuaauuacgagaacgacauugagaaaaagaucuguaaaauggagaaguguucuuccguuuuuaauguggucaacagcucuaucggacugauuauggugcucuccuuccuguuucuuaauuga

SEQ ID NO: 5078 - RNA, 1182 nt, Artificial Sequence
  derived and/or modified CDS sequence (opt5) from Pf(Yaounde)__AAN87579.1__CSP
augaugagaaagcuggccauccucagcguguccucuuuccuguuugucgaggcucuuuuccaggaauaccaaugcuauggcagcuccucuaacacccggguucugaaugagcucaacuacgacaaugccgggacaaaccuguauaaugaacuugagaugaacuacuauggaaaacaggaaaauugguacagccugaagaaaaacucccgcucucucggcgagaaugaugacgggaacaaugaggauaacgaaaagcugagaaaacccaagcacaagaaacugaagcagccuggagacggcaauccggaucccaacgcgaauccuaacguggaccccaacgcuaauccuaacguggaucccaaugccaacccuaaugucgacccgaacgccaaucccaacgcuaauccuaacgccaaucccaacgcuaauccuaacgccaaucccaacgcgaacccgaaugccaacccuaaugcuaaccccaaugccaacccuaaugcuaaccccaaugccaaccccaaugcgaacccuaaugccaacccgaaugcuaaccccaacgccaauccuaacguggaucccaaugcuaacccuaaugccaaccccaaugccaacccgaaugcuaacccuaaugcgaaccccaaugccaacccuaaugcuaaccccaacgccaauccuaacgccaaucccaacgcuaauccgaacgccaauccuaacgcgaaucccaacgcuaaucccaacgccaauccuaacgccaauccgaacgcuaaucccaacgccaacccuaaugcuaaccccaaugccaacccuaauaaaaacaaucaggggaacggacaaggccauaauaugcccaacgacccuaaucggaacguugauaagaaugcgaacgccaauaacgcugugaaaaacaauaacaaugaggaacccagcgacaagcacauugaggaguaucucaagaaaaucaagaacuccauuagcacggaauggucuccgugcuccgugaccugcggcaaugggauccagguccgcauuaaaccuggaagcgccaacaagcccaaagaugagcuggacuacgaaaaugacaucgagaagaaaaucuguaagauggaaaaguguucuuccguuuuuaacguggucaauagcucuauuggccuuaucauggugcuguccuuccucuuucugaacuga

SEQ ID NO: 5079 - RNA, 1182 nt, Artificial Sequence
  derived and/or modified CDS sequence (opt5) from Pf(Yaounde)__AAN87578.1__CSP
augaugagaaagcuggccauccucagcguguccucuuuccuguuugucgaggcucuuuuccaggaauaccagugcuauggcagcuccucuaacacccggguucugaaugagcucaacuacgacaaugccgggacaaaccuguauaaugaacuugagaugaacuacuauggaaaacaggaaaauugguacagccugaagaaaaacucccgcucucucggcgagaaugaugacgggaacaaugaggauaacgaaaagcugagaaaacccaagcacaagaaacugaagcagccuggagacggcaauccggaucccaacgcgaauccuaacguggaccccaacgcuaauccuaacguggaucccaaugccaacccuaaugucgacccgaacgccaaucccaacgcuaauccuaacgccaaucccaacgcuaauccuaacgccaaucccaacgcgaacccgaaugccaacccuaaugcuaaccccaaugccaacccuaaugcuaaccccaaugccaaccccaaugcgaacccuaaugccaacccgaaugcuaaccccaacgccaauccuaacguggaucccaaugcuaacccuaaugccaaccccaaugccaacccgaaugcuaacccuaaugcgaaccccaaugccaacccuaaugcuaaccccaacgccaauccuaacgccaaucccaacgcuaauccgaacgccaauccuaacgcgaaucccaacgcuaaucccaacgccaauccuaacgccaauccgaacgcuaaucccaacgccaacccuaaugcuaaccccaaugccaacccuaauaaaaacaaucaggggaacggacaaggccauaauaugcccaacgacccuaaucggaacguuaaugagaacgcgaaugccaacaacgcugugaagaauaacaauaacgaggaacccagcgauaaacacauugagaaguaucucaaggaaauccaaaauucccugagcacggaguggucuccgugcuccgugaccugcggcaacgggauucagguccgcaucaaaccuggaagcgccggcaagcccaaaaaugaacuugacuacgagaacgauauugaaaagaaaaucuguaagauggagaaauguucuuccguuuuuaauguggucaacagcucuaucgggcugauuauggugcucuccuuccuguuucuuaauuga

SEQ ID NO: 5080 - RNA, 1179 nt, Artificial Sequence
  derived and/or modified CDS sequence (opt5) from Pf(Asembo Bay)__AAN87607.1__CSP
augaugagaaagcuggccauccucagcguguccucuuuccuguuugucgaggcucuuuuccaggaauaccaaugcuauggcagcuccucuaacacccggguucugaaugagcucaacuacgacaaugccgggacaaaccuguauaaugaacuugagaugaacuacuauggaaaacaggaaaauugguacagccugaagaaaaacucccgcucucucggcgagaaugaugacgggaacaauaacaauggagauaacggcagagaggggaaggacgaagauaaacgggacggaaauaacgaggauaacgaaaagcugcgcaagcccaaacacaagaaacugaagcagccugcggacggcaauccggaucccaacgcuaauccuaacguggaccccaaugccaacccuaauguggaucccaacgccaauccuaacgcuaauccgaacgccaaucccaacgcuaauccuaacgccaaccccaaugcgaacccuaaugccaaccccaaugcuaacccgaaugccaacccuaaugcuaaccccaaugccaacccuaaugcgaaccccaaugucgaccccaacgccaacccuaaugcuaacccgaaugccaaccccaaugcuaacccuaaugccaaccccaaugccaacccuaaugcuaaccccaaugcgaacccgaaugccaacccuaacgcuaaucccaacgccaauccuaacgccaaucccaacgcuaauccuaacgccaaucccaacgcgaauccgaacgcuaauccuaacgccaaucccaacgccaaucccaacgcuaacccuaauaaaaacaaucagggcaacgggcaaggacauaauaugccgaacgaucccaauagaaacguggacgagaaugccaacgcuaauaacgccguuaagaauaacaauaacgaggaaccuagcgacaagcacauugagcaguaucucaacaaaaucaaaaauuccauuagcacggaauggucucccugcuccgugaccugcggcaacgggauccagguccggauuaagccuggaagcgcgaauaagcccaaagaucagcuggacuacgagaacgauaucgaaaagaaaaucuguaagauggagaaguguucuuccguguuuaauguugugaacagcucuauuggccuuaucaugguccuguccuuccucuuucugaauuga

SEQ ID NO: 5081 - RNA, 1179 nt, Artificial Sequence
  derived and/or modified CDS sequence (opt5) from Pf(Asembo Bay)__AAN87608.1__CSP
augaugagaaagcuggccauccucagcguguccucuuuccuguuugucgaggcucuuuuccaggaauaccaaugcuauggcagcuccucuaacacccggguucugaaugagcucaacuacgacaaugccgggacaaaccuguauaaugaacuugagaugaacuacuauggaaaacaggaaaauugguacagccugaagaaaaacucccgcucucucggcgagaaugaugacgggaacaauaacaauggagauaacggcagagaggggaaggacgaagauaaacgggacggaaauaacgaggauaacgaaaagcugcgcaagcccaaacacaagaaacugaagcagccugcggacggcaauccggaucccaacgcuaauccuaacguggaccccaaugccaacccuaauguggaucccaacgccaauccuaacgucgacccgaaugcuaaccccaaugccaacccuaaugcuaaccccaacgccaauccuaacgcgaaucccaacgccaauccgaacgcuaauccuaacgccaaucccaacgcuaauccuaacgccaaucccaacguggaucccaaugcgaacccuaacgccaauccgaacgcuaaucccaacgccaauccuaacgcuaaucccaacgccaauccuaacgccaaucccaacgcuaauccgaacgcgaauccuaacgccaaccccaaugcuaacccuaaugccaaccccaaugccaacccuaaugcuaaccccaaugccaacccgaaugcgaacccuaaugcuaaccccaaugccaaccccaaugccaacccuaacaaaaauaaccagggcaaugggcaaggacauaacaugccgaaugaccccaacagaaauguugacgagaacgcuaaugccaacaaugcugugaagaacaauaacaaugaggaaccuagcgauaagcacauugagcaguaucucaaaaucauuaagaacucccugagcacggaauggucucccugcuccgugaccugcggcaacgggauccagguccggauuaaaccuggaagcgccaauaagcccaaagacgagcuugauuacgcgaacgacaucgaaaagaaaaucuguaagauggagaaguguucuuccguuuuuaauguggucaacagcucuauuggccugaucauggugcucuccuuccuguuucuuaauuga

SEQ ID NO: 5082 - RNA, 1179 nt, Artificial Sequence
  derived and/or modified CDS sequence (opt5) from Pf(Asembo Bay)__AAN87595.1__CSP
augaugagaaagcuggccauccucagcguguccucuuuccuguuugucgaggcucuuuuccaggaauaccaaugcuauggcagcuccucuaacacccggguucugaaugagcucaacuacgacaaugccgggacaaaccuguauaaugaacuugagaugaacuacuauggaaaacaggaaaauugguacagccugaagaaaaacucccgcucucucggcgagaaugaugacgggaacaauaacaauggagauaacggcagagaggggaaggacgaagauaaacgggacggaaauaacgaggauaacgaaaagcugcgcaagcccaaacacaagaaacugaagcagccugcggacggcaauccggaucccaacgcuaauccuaacguggaccccaaugccaacccuaauguggaucccaacgccaauccuaacgucgacccgaaugcuaaccccaaugccaacccuaaugcuaaccccaacgccaauccuaacgcgaaucccaacgccaauccgaacgcuaauccuaacgccaaucccaacgcuaauccuaacgccaaucccaacguggaucccaaugcgaacccuaacgccaauccgaacgcuaaucccaacgccaauccuaacgcuaaucccaacgccaauccuaacgccaaucccaacgcuaauccgaacgcgaauccuaacgccaaccccaaugcuaacccuaaugccaaccccaaugccaacccuaaugcuaaccccaaugccaacccgaaugcgaacccuaaugcuaaccccaaugccaaccccaaugccaacccuaacaaaaauaaccagggcaaugggcaaggacauaacaugccgaaugaccccaacagaaauguugacgagaacgcuaaugccaacaaugcugugaagaacaauaacaaugaggaaccuagcgauaagcacauuacggaguaucucaaacggauccagaacucccugagcaccgaauggucucccuguuccgucacaugcggcaacgggauucaggugcgcaucaagccuggaagcgccggcaaaucuaagaaugagcuugacuacgaaaacgauauugagaaaaagaucuguaaaauggagaagugcuccagcguuuuuaauguggucaacucuuccaucgggcugauuauggugcucagcuuccuguuucuuaauuga

SEQ ID NO: 5083 - RNA, 1179 nt, Artificial Sequence
  derived and/or modified CDS sequence (opt5) from Pf(India)__AAN87618.1__CSP
augaugagaaagcuggccauccucagcguguccucuuuccuguuugucgaggcucuuuuccaggaauaccaaugcuauggcagcuccucuaacacccggguucugaaugagcucaacuacgacaaugccgggacaaaccuguauaaugaacuugagaugaacuacuauggaaaacaggaaaauugguacagccugaagaaaaacucccgcucucucggcgagaaugaugacgggaacaauaacaauggagauaacggcagagaggggaaggacgaagauaaacgggacggaaauaacgaggauaacgaaaagcugcgcaagcccaaacacaagaaacugaagcagccuggcggcgacaauccggaucccaacgcgaauccuaacguggaccccaaugcuaacccuaaugccaaccccaaugccaacccuaaugcuaacccgaaugccaaccccaaugcuaacccuaacgccaaucccaacgcgaauccuaacgccaaucccaacgcuaauccgaacgccaauccuaacgcuaaucccaacgccaauccuaacgcgaaucccaacgccaaccccaaugcuaacccuaaugccaacccgaaugcuaaccccaaugccaacccuaaugccaaccccaaugcuaacccuaaugcgaaccccaaugccaacccgaacgcuaauccuaacgccaaucccaacgccaauccuaacgcuaaucccaacgccaauccuaacgcgaaucccaacgcuaauccgaacgccaauccuaacgccaaucccaacgcuaaccccaaugccaacccuaauaaaaacaaucaggggaacggacaaggccauaauaugccgaacgaucccaauagaaacguggacgagaaugcuaacgccaauaacgcggucaagaauaacaacaaugaggaaccuagcgauaagcacauugagcaguaucucaaaaagauccagaacucccugagcacggaauggucucccugcuccgugaccugcgggaauggcauucagguucggaucaaaccuggaagcgccaacaagcccaaagacgagcuugacuacgaaaaugauauugagaagaaaaucuguaagauggagaaguguucuuccguguuuaacgucgugaauagcucuaucgggcugauuaugguucucuccuuccuguuucuuaacuga

SEQ ID NO: 5084 - RNA, 1170 nt, Artificial Sequence
  derived and/or modified CDS sequence (opt5) from Pf(Asembo Bay)__AAN87585.1__CSP
augaugagaaagcuggccauccucagcguguccucuuuccuguuugucgaggcucuuuuccaggaauaccaaugcuauggcagcuccucuaacacccggguucugaaugagcucaacuacgacaaugccgggacaaaccuguauaaugaacuugagaugaacuacuauggaaaacaggaaaauugguacagccugaagaaaaacucccgcucucucggcgagaaugaugacgggaacaaugaggauaacgaaaagcugagaaaacccaagcacaagaaacugaagcagccugcggacggaaauccggaucccaacgcuaauccuaacguggaccccaacgccaauccuaacguggaucccaaugccaacccuaaugucgacccgaacgcuaaucccaacgccaauccuaacgcuaaucccaacgccaauccuaacgcgaaucccaacgccaacccgaaugcuaacccuaaugccaaccccaaugcuaacccuaaugccaaccccaaugcgaaccccaaugccaacccuaaugcuaacccgaaugccaaccccaacgcuaauccuaacguggaucccaaugccaacccuaaugccaaccccaaugcuaacccgaaugcgaacccuaaugccaaccccaaugcuaacccuaaugccaaccccaacgccaauccuaacgcuaaucccaacgccaauccgaacgcgaauccuaacgcuaaucccaacgccaaucccaacgccaauccuaacgcuaauccgaacgccaaucccaacgcuaacccuaaugccaaccccaauaaaaacaaucagggcaacgggcaaggacauaauaugccuaacgaccccaaucggaacguugaugagaaugcgaacgccaauaacgcugugaagaauaacaacaaugaggaaccuagcgaccagcacauugagaaauaucucaagacgauccagaacucccugagcaccgaauggucucccugcuccgucacaugcggcaauggcauucaggugcgcaucaagccggggagcgccaacaaaccuaaggaucaacuugacuacgcuaaugacauugagaaaaagaucuguaaaauggaaaaguguucuuccguuuuuaacguggucaauagcucuaucggacugauuauggugcucuccuuccuguuucuuaacuga

SEQ ID NO: 5085 - RNA, 1170 nt, Artificial Sequence
  derived and/or modified CDS sequence (opt5) from Pf(Asembo Bay)__AAN87577.1__CSP
augaugagaaagcuggccauccucagcguguccucuuuccuguuugucgaggcucuuuuccaggaauaccagugcuauggcagcuccucuaacacccggguucugaaugagcucaacuacgacaaugccgggacaaaccuguauaaugaacuugagaugaacuacuauggaaaacaggaaaauugguacagccugaagaaaaacucccgcucucucggcgagaaugaugacgggaacaaugaggauaacgaaaagcugagaaaacccaagcacaagaaacugaagcagccuggagacggcaauccggaucccaacgcgaauccuaacguggaccccaacgcuaauccuaacguggaucccaaugccaacccuaaugucgacccgaacgccaaucccaacgcuaauccuaacgccaaucccaacgcuaauccuaacgccaaucccaacgcgaacccgaaugccaacccuaaugcuaaccccaaugccaacccuaaugcuaaccccaaugccaaccccaaugcgaacccuaaugccaacccgaaugcuaaccccaacguggauccuaaugccaaccccaaugcuaacccuaaugccaaccccaaugccaacccgaaugcuaacccuaaugcgaaccccaaugccaacccuaaugcuaaccccaacgccaauccuaacgccaaucccaacgcuaauccgaacgccaauccuaacgcgaaucccaacgcuaaucccaacgccaauccuaacgccaauccgaacgcuaaucccaacgccaacccuaaugcuaaccccaauaaaaacaaucaggggaacggacaaggccauaauaugccuaacgaccccaaucggaacguuaaugagaacgccaaugcgaacaaugccgugaagaacaacaauaacgaggaaccuagcgauaaacacauugagaaguaucucaaggaaauccaaaauucccugagcacggaguggucucccugcuccgugaccugcggcaacgggauucagguccgcaucaaaccgggaagcgcuggcaagccuaaaaaugaacuugacuacgagaacgauauugaaaagaaaaucuguaagauggagaaauguucuuccguuuuuaauguggucaacagcucuaucgggcugauuauggugcucuccuuccuguuucuuaauuga

SEQ ID NO: 5086 - RNA, 1170 nt, Artificial Sequence
  derived and/or modified CDS sequence (opt5) from Pf(Gha1108-043)__BAM84815.1__CSP
augaugagaaagcuggccauccucagcguguccucuuuccuguuugucgaggcucuuuuccaggaauaccaaugcuauggcagcuccucuaacacccggguucugaaugagcucaacuacgacaaugccgggacaaaccuguauaaugaacuugagaugaacuacuauggaaaacaggaaaauugguacagccugaagaaaaacucccgcucucucggcgagaaugaugacgggaacaaugaggauaacgaaaagcugagaaaacccaagcacaagaaacugaagcagccuggagacggcaauccggaucccaacgcgaauccuaacguggaccccaacgcuaauccuaacguggaucccaaugccaacccuaaugucgacccgaacgccaaucccaacgcuaauccuaacgccaaucccaacgcuaauccuaacgccaaucccaacgcgaacccgaaugccaacccuaaugcuaaccccaaugccaacccuaaugcuaaccccaaugccaaccccaaugcgaacccuaaugccaacccgaaugcuaaccccaacguggauccuaaugccaaccccaaugcuaacccuaaugccaaccccaaugccaacccgaaugcuaacccuaaugcgaaccccaaugccaacccuaaugcuaaccccaacgccaauccuaacgccaaucccaacgcuaauccgaacgccaauccuaacgcgaaucccaacgcuaaucccaacgccaauccuaacgccaauccgaacgcuaaucccaacgccaacccuaaugcuaaccccaauaaaaacaaucaggggaacggacaaggccauaauaugccuaacgaccccaaucggaacguugaugagaaugccaacgcgaauagcgccgugaagaacaauaacaacgaggaaccuuccgacaaacacauuaaggaguaucucaauaagauccagaacagccugucuacggaauggucccccuguagcgugaccugcggcaaugggauucagguccgcaucaaaccgggaucugcuaacaagccuaaagaugagcuugacuacgccaaugacauugaaaagaaaaucuguaagauggagaaaugcuccagcguuuuuaacguggucaauucuuccaucggccugauuauggugcucagcuuccuguuucuuaacuga

SEQ ID NO: 5087 - RNA, 1170 nt, Artificial Sequence
  derived and/or modified CDS sequence (opt5) from Pf(Gha1108-052)__BAM84816.1__CSP
augaugagaaagcuggccauccucagcguguccucuuuccuguuugucgaggcucuuuuccaggaauaccaaugcuauggcagcuccucuaacacccggguucugaaugagcucaacuacgacaaugccgggacaaaccuguauaaugaacuugagaugaacuacuauggaaaacaggaaaauugguacagccugaagaaaaacucccgcucucucggcgagaaugaugacgggaacaaugaggauaacgaaaagcugagaaaacccaagcacaagaaacugaagcagccugcggacggaaauccggaucccaacgcuaauccuaacguggaccccaacgccaauccuaacguggaucccaaugccaacccuaaugucgacccgaacgcuaaucccaacgccaauccuaacgcuaaucccaacgccaauccuaacgcgaaucccaacgccaacccgaaugcuaacccuaaugccaaccccaaugcuaacccuaaugccaaccccaaugcgaaccccaaugccaacccuaaugcuaacccgaaugccaaccccaacguggauccuaaugcuaaccccaaugccaacccuaaugccaaccccaaugcuaacccgaaugcgaacccuaaugccaaccccaaugcuaacccuaaugccaaccccaacgccaauccuaacgcuaaucccaacgccaauccgaacgcgaauccuaacgcuaaucccaacgccaaucccaacgccaauccuaacgcuaauccgaacgccaaucccaacgcuaacccuaaugccaaccccaauaaaaacaaucagggcaacgggcaaggacauaauaugccuaacgaccccaaucggaacguugaugagaaugcgaacgccaauagcgcugugaagaacaauaacaacgaagaaccuuccgacaaacacauugagcaguaucucaagacgauccagaauagccugucuaccgaauggucccccuguagcgucacaugcggcaacggcauucaggugcgcaucaagccggggucugccaauaaaccuaaggaucaacuugacuacgagaacgacauugagaaaaagaucuguaaaauggagaagugcuccagcguuuuuaauguggucaacucuuccaucggacugauuauggugcucagcuuccuguuucuuaauuga

SEQ ID NO: 5088 - RNA, 1170 nt, Artificial Sequence
  derived and/or modified CDS sequence (opt5) from Pf(Gha1108-124)__BAM84812.1__CSP
augaugagaaagcuggccauccucagcguguccucuuuccuguuugucgaggcucuuuuccaggaauaccaaugcuauggcagcuccucuaacacccggguucugaaugagcucaacuacgacaaugccgggacaaaccuguauaaugaacuugagaugaacuacuauggaaaacaggaaaauugguacagccugaagaaaaacucccgcucucucggcgagaaugaugacgggaacaaugaggauaacgaaaagcugagaaaacccaagcacaagaaacugaagcagccugcggacggaaauccggaucccaacgcuaauccuaacguggaccccaacgccaauccuaacguggaucccaaugccaacccuaaugucgacccgaacgcuaaucccaacgccaauccuaacgcuaaucccaacgccaauccuaacgcgaaucccaacgccaacccgaaugcuaacccuaaugccaaccccaaugcuaacccuaaugccaaccccaaugcgaaccccaaugccaacccuaaugcuaacccgaaugccaaccccaacgcuaauccuaacguggaucccaaugccaacccuaaugccaaccccaaugcuaacccgaaugcgaacccuaaugccaaccccaaugcuaacccuaaugccaaccccaacgccaauccuaacgcuaaucccaacgccaauccgaacgcgaauccuaacgcuaaucccaacgccaaucccaacgccaauccuaacgcuaauccgaacgccaaucccaacgcuaacccuaaugccaaccccaauaaaaacaaucagggcaacgggcaaggacauaauaugccuaacgaccccaaucggaacguugaugagaaugcgaacgccaauaacgcugugaagaauaacaacaaugaggaaccuagcgaccagcacauugagaaauaucucaacaagaucaaaaauucccugagcacggaauggucucccugcuccgugaccugcggcaacggcauucagguccgcaucaagccggggagcgccaauaagccuaaagaucagcuugacuacgcuaacgacauugagaagaaaaucuguaagauggaaaaauguucuuccguuuuuaauguggucaacagcucuaucggacugauuauggugcucuccuuccuguuucuuaauuga

SEQ ID NO: 5089 - RNA, 1170 nt, Artificial Sequence
  derived and/or modified CDS sequence (opt5) from Pf(Gha1109-003)__BAM84834.1__CSP
augaugagaaagcuggccauccucagcguguccucuuuccuguuugucgaggcucuuuuccaggaauaccaaugcuauggcagcuccucuaacacccggguucugaaugagcucaacuacgacaaugccgggacaaaccuguauaaugaacuugagaugaacuacuauggaaaacaggaaaauugguacagccugaagaaaaacucccgcucucucggcgagaaugaugacgggaacaaugaggauaacgaaaagcugagaaaacccaagcacaagaaacugaagcagccugcggacggaaauccggaucccaacgcuaauccuaacguggaccccaacgccaauccuaacguggaucccaaugccaacccuaaugucgacccgaacgcuaaucccaacgccaauccuaacgcuaaucccaacgccaauccuaacgcgaaucccaacgccaacccgaaugcuaacccuaaugccaaccccaaugcuaacccuaaugccaaccccaaugcgaaccccaaugccaacccuaaugcuaacccgaaugccaaccccaacguggauccuaaugcuaaccccaaugccaacccuaaugccaaccccaaugcuaacccgaaugcgaacccuaaugccaaccccaaugcuaacccuaaugccaaccccaacgccaauccuaacgcuaaucccaacgccaauccgaacgcgaauccuaacgcuaaucccaacgccaaucccaacgccaauccuaacgcuaauccgaacgccaaucccaacgcuaacccuaaugccaaccccaauaaaaacaaucagggcaacgggcaaggacauaauaugccuaacgaccccaaucggaacguugaugagaaugcgaacgccaaugacgcugugaagaacaauaacaacgaggaaccuagcgaucagcacauugagaaauaucucaagaucauuaaaaauucccugagcacggaauggucucccugcuccgugaccugcggcaacggcauccagguccgcauuaagccggggagcgccaauaagccuaaagaccagcuugacuacgcuaacgauaucgagaagaaaaucuguaagauggaaaaauguucuuccguuuuuaauguggucaacagcucuauuggacugaucauggugcucuccuuccuguuucuuaauuga

SEQ ID NO: 5090 - RNA, 1170 nt, Artificial Sequence
  derived and/or modified CDS sequence (opt5) from Pf(Gha1109-058)__BAM84835.1__CSP
augaugagaaagcuggccauccucagcguguccucuuuccuguuugucgaggcucuuuuccaggaauaccaaugcuauggcagcuccucuaacacccggguucugaaugagcucaacuacgacaaugccgggacaaaccuguauaaugaacuugagaugaacuacuauggaaaacaggaaaauugguacagccugaagaaaaacucccgcucucucggcgagaaugaugacgggaacaaugaggauaacgaaaagcugagaaaacccaagcacaagaaacugaagcagccuggagacggcaauccggaucccaacgcgaauccuaacguggaccccaacgcuaauccuaacguggaucccaaugccaacccuaaugucgacccgaacgccaaucccaacgcuaauccuaacgccaaucccaacgcuaauccuaacgccaaucccaacgcgaacccgaaugccaacccuaaugcuaaccccaaugccaacccuaaugcuaaccccaaugccaaccccaaugcgaacccuaaugccaacccgaaugcuaaccccaacguggauccuaaugccaaccccaaugcuaacccuaaugccaaccccaaugccaacccgaaugcuaacccuaaugcgaaccccaaugccaacccuaaugcuaaccccaacgccaauccuaacgccaaucccaacgcuaauccgaacgccaauccuaacgcgaaucccaacgcuaaucccaacgccaauccuaacgccaauccgaacgcuaaucccaacgccaacccuaaugcuaaccccaauaaaaacaaucaggggaacggacaaggccauaauaugccuaacgaccccaaucggaacguugaugagaaugccaacgcgaauaacgccgugaagaauaacaacaaugaggaaccuagcgacaaacacauuacggaguaucucaagaagauccagaacucccugagcaccgaauggucucccuguuccgucacaugcggcaaugggauucaggugcgcaucaaaccgggaagcgcuggcaagucuaaaaacgagcuugauuacgaaaaugacauugagaagaaaaucuguaagauggaaaaaugcuccagcguuuuuaacguggucaauucuuccaucgggcugauuauggugcucagcuuccuguuucuuaacuga

SEQ ID NO: 5091 - RNA, 1170 nt, Artificial Sequence
  derived and/or modified CDS sequence (opt5) from Pf(Gha1109-105)__BAM84822.1__CSP
augaugagaaagcuggccauccucagcguguccucuuuccuguuugucgaggcucuuuuccaggaauaccaaugcuauggcagcuccucuaacacccggguucugaaugagcucaacuacgacaaugccgggacaaaccuguauaaugaacuugagaugaacuacuauggaaaacaggaaaauugguacagccugaagaaaaacucccgcucucucggcgagaaugaugacgggaacaaugaggauaacgaaaagcugagaaaacccaagcacaagaaacugaagcagccugcggacggaaauccggaucccaacgcuaauccuaacguggaccccaacgccaauccuaacgccaaucccaacgcuaauccuaacgccaauccgaacgcuaaucccaacgccaauccuaacguggaucccaaugcgaacccuaaugucgaccccaacgccaacccgaaugcuaacccuaaugccaaccccaaugcuaacccuaaugccaaccccaaugcgaaccccaaugccaacccuaaugcuaacccgaauguggaucccaacgccaacccuaaugcuaaccccaaugccaacccuaaugccaaccccaaugcuaacccgaaugcgaacccuaaugccaaccccaaugcuaacccuaaugccaaccccaacgccaauccuaacgcuaaucccaacgccaauccgaacgcgaauccuaacgcuaaucccaacgccaaucccaacgccaauccuaacgcuaauccgaacgccaaucccaacgcuaacccuaaugccaaccccaauaaaaacaaucagggcaacgggcaaggacauaauaugccuaacgaccccaaucggaacguugaugagaaugcgaaggccaacaaugcugugaaaaacaauaacaacgaggaaccuagcgacaagcacauugagcaguaucucaagacgauccaaaauucccugagcaccgaauggucucccugcuccgucacaugcggcaacggcauucaggugcgcaucaaaccggggagcgccaauaagccuaaagaucagcuugacuacgagaacgacauugaaaagaaaaucuguaagauggagaaauguucuuccguuuuuaauguggucaacagcucuaucggacugauuauggugcucuccuuccuguuucuuaauuga

SEQ ID NO: 5092 - RNA, 1170 nt, Artificial Sequence
  derived and/or modified CDS sequence (opt5) from Pf(Gha1109-111)__BAM84823.1__CSP
augaugagaaagcuggccauccucagcguguccucuuuccuguuugucgaggcucuuuuccaggaauaccagugcuauggcagcuccucuaacacccggguucugaaugagcucaacuacgacaaugccgggacaaaccuguauaaugaacuugagaugaacuacuauggaaaacaggaaaauugguacagccugaagaaaaacucccgcucucucggcgagaaugaugacgggaacaaugaggauaacgaaaagcugagaaaacccaagcacaagaaacugaagcagccuggagacggcaauccggaucccaacgcgaauccuaacguggaccccaacgcuaauccuaacguggaucccaaugccaacccuaaugucgacccgaacgccaaucccaacgcuaauccuaacgccaaucccaacgcuaauccuaacgccaaucccaacgcgaacccgaaugccaacccuaaugcuaaccccaaugccaacccuaaugcuaaccccaaugccaaccccaaugcgaacccuaaugccaacccgaaugcuaaccccaacguggauccuaaugccaaccccaaugcuaacccuaaugccaaccccaaugccaacccgaaugcuaacccuaaugcgaaccccaaugccaacccuaaugcuaaccccaacgccaauccuaacgccaaucccaacgcuaauccgaacgccaauccuaacgcgaaucccaacgcuaaucccaacgccaauccuaacgccaauccgaacgcuaaucccaacgccaacccuaaugcuaaccccaauaaaaacaaucaggggaacggacaaggccauaauaugccuaacgaccccaaucggaacguugaugagaaugccaacgcgaauaacgccgugaagaauaacaacaaugaggaaccuagcgacaaacacauuaaggaguaucucaacaagauccaaaauuccauuagcacggaauggucucccugcuccgugaccugcggcaacgggauccagguccgcauuaaaccgggaagcgcugauaagccuaaagaccagcuggacuacaucaaugauaucgagaagaaaauuuguaagauggaaaaauguucuuccguuuuuaacguggucaauagcucuaucggccuuauuauggugcuguccuuccucuuucugaacuga

SEQ ID NO: 5093 - RNA, 1170 nt, Artificial Sequence
  derived and/or modified CDS sequence (opt5) from Pf(Gha1109-125)__BAM84824.1__CSP
augaugagaaagcuggccauccucagcguguccucuuuccuguuugucgaggcucuuuuccaggaauaccaaugcuauggcagcuccucuaacacccggguucugaaugagcucaacuacgacaaugccgggacaaaccuguauaaugaacuugagaugaacuacuauggaaaacaggaaaauugguacagccugaagaaaaacucccgcucucucggcgagaaugaugacgggaacaaugaggauaacgaaaagcugagaaaacccaagcacaagaaacugaagcagccugcggacggaaauccggaucccaacgcuaauccuaacguggaccccaacgccaauccuaacguggaucccaaugccaacccuaaugucgacccgaacgcuaaucccaacgccaauccuaacgcuaaucccaacgccaauccuaacgcgaaucccaacgccaacccgaaugcuaacccuaaugccaaccccaaugcuaacccuaaugccaaccccaaugcgaaccccaaugccaacccuaaugcuaacccgaaugccaaccccaacgcuaauccuaacguggaucccaaugccaacccuaaugccaaccccaaugcuaacccgaaugcgaacccuaaugccaaccccaaugcuaacccuaaugccaaccccaacgccaauccuaacgcuaaucccaacgccaauccgaacgcgaauccuaacgcuaaucccaacgccaaucccaacgccaauccuaacgcuaauccgaacgccaaucccaacgcuaacccuaaugccaaccccaauaaaaacaaucagggcaacgggcaaggacauaauaugccuaacgaccccaaucggaacguugaugagaaugcgaacgccaauaacgcugugaagaauaacaacaaugaggaaccuagcgaccagcacauugagaaauaucucaagacgaucaagaacucccugagcaccgaauggucucccugcuccgucacaugcggcaauggcauucaggugcgcaucaaaccggggagcgccaacaagccuaaagaucagcuugacuacgcuaaugacauugagaagaaaaucuguaagauggaaaaauguucuuccguuuuuaacguggucaauagcucuaucggacugauuauggugcucuccuuccuguuucuuaacuga

SEQ ID NO: 5094 - RNA, 1170 nt, Artificial Sequence
  derived and/or modified CDS sequence (opt5) from Pf(Gha1109-127)__BAM84825.1__CSP
augaugagaaagcuggccauccucagcguguccucuuuccuguuugucgaggcucuuuuccaggaauaccaaugcuauggcagcuccucuaacacccggguucugaaugagcucaacuacgacaaugccgggacaaaccuguauaaugaacuugagaugaacuacuauggaaaacaggaaaauugguacagccugaagaaaaacucccgcucucucggcgagaaugaugacgggaacaaugaggauaacgaaaagcugagaaaacccaagcacaagaaacugaagcagccuggagacggcaauccggaucccaacgcgaauccuaacguggaccccaacgcuaauccuaacguggaucccaaugccaacccuaaugucgacccgaacgccaaucccaacgcuaauccuaacgccaaucccaacgcuaauccuaacgccaaucccaacgcgaacccgaaugccaacccuaaugcuaaccccaaugccaacccuaaugcuaaccccaaugccaaccccaaugcgaacccuaaugccaacccgaaugcuaaccccaacguggauccuaaugccaaccccaaugcuaacccuaaugccaaccccaaugccaacccgaaugcuaacccuaaugcgaaccccaaugccaacccuaaugcuaaccccaacgccaauccuaacgccaaucccaacgcuaauccgaacgccaauccuaacgcgaaucccaacgcuaaucccaacgccaauccuaacgccaauccgaacgcuaaucccaacgccaacccuaaugcuaaccccaauaaaaacaaucaggggaacggacaaggccauaauaugccuaacgaccccaaucggaacguugaugagaaugccaacgcgaauaacgccgugaagaauaacaacaaugaggaaccuagcgacaaacacauuacggaguaucucaagaagaucaaaaacucccugagcaccgaauggucucccuguuccgucacaugcggcaaugggauucaggugcgcaucaagccgggaagcgcuggcaaaucuaagaacgagcuugauuacgaaaaugacauugagaaaaagaucuguaaaauggaaaagugcuccagcguuuuuaacguggucaauucuuccaucgggcugauuauggugcucagcuuccuguuucuuaacuga

SEQ ID NO: 5095 - RNA, 1170 nt, Artificial Sequence
  derived and/or modified CDS sequence (opt5) from Pf(Gha1109-158)__BAM84826.1__CSP
augaugagaaagcuggccauccucagcguguccucuuuccuguuugucgaggcucuuuuccaggaauaccaaugcuauggcagcuccucuaacacccggguucugaaugagcucaacuacgacaaugccgggacaaaccuguauaaugaacuugagaugaacuacuauggaaaacaggaaaauugguacagccugaagaaaaacucccgcucucucggcgagaaugaugacgggaacaaugaggauaacgaaaagcugagaaaacccaagcacaagaaacugaagcagccugcggacggaaauccggaucccaacgcuaauccuaacguggaccccaacgccaauccuaacguggaucccaaugccaacccuaaugucgacccgaacgcuaaucccaacgccaauccuaacgcuaaucccaacgccaauccuaacgcgaaucccaacgccaacccgaaugcuaacccuaaugccaaccccaaugcuaacccuaaugccaaccccaaugcgaaccccaaugccaacccuaaugcuaacccgaaugccaaccccaacguggauccuaaugcuaaccccaaugccaacccuaaugccaaccccaaugcuaacccgaaugcgaacccuaaugccaaccccaaugcuaacccuaaugccaaccccaacgccaauccuaacgcuaaucccaacgccaauccgaacgcgaauccuaacgcuaaucccaacgccaaucccaacgccaauccuaacgcuaauccgaacgccaaucccaacgcuaacccuaaugccaaccccaauaaaaacaaucagggcaacgggcaaggacauaauaugccuaacgaccccaaucggaacguugaugagaaugcgaacgccaauaacgcugugaagaauaacaacaaugaggaaccuagcgacaaacacauugagcaguaucucaagacgaucaagaacucccugagcaccgaauggucucccugcuccgucacaugcggcaauggcauucaggugcgcaucaaaccggggagcgccaacaagccuaaagaucagcuugacuacgcuaaugacauugagaagaaaaucuguaagauggaaaaauguucuuccguuuuuaacguggucaauagcucuaucggacugauuauggugcucuccuuccuguuucuuaacuga

SEQ ID NO: 5096 - RNA, 1170 nt, Artificial Sequence
  derived and/or modified CDS sequence (opt5) from Pf(Gha1109-205)__BAM84832.1__CSP
augaugagaaagcuggccauccucagcguguccucuuuccuguuugucgaggcucuuuuccaggaauaccaaugcuauggcagcuccucuaacacccggguucugaaugagcucaacuacgacaaugccgggacaaaccuguauaaugaacuugagaugaacuacuauggaaaacaggaaaauugguacagccugaagaaaaacucccgcucucucggcgagaaugaugacgggaacaaugaggauaacgaaaagcugagaaaacccaagcacaagaaacugaagcagccugcggacggaaauccggaucccaacgcuaauccuaacguggaccccaacgccaauccuaacguggaucccaaugccaacccuaaugucgacccgaacgcuaaucccaacgccaauccuaacgcuaaucccaacgccaauccuaacgcgaaucccaacgccaacccgaaugcuaacccuaaugccaaccccaaugcuaacccuaaugccaaccccaaugcgaaccccaaugccaacccuaaugcuaacccgaaugccaaccccaacguggauccuaaugcuaaccccaaugccaacccuaaugccaaccccaaugcuaacccgaaugcgaacccuaaugccaaccccaaugcuaacccuaaugccaaccccaacgccaauccuaacgcuaaucccaacgccaauccgaacgcgaauccuaacgcuaaucccaacgccaaucccaacgccaauccuaacgcuaauccgaacgccaaucccaacgcuaacccuaaugccaaccccaauaaaaacaaucagggcaacgggcaaggacauaauaugccuaacgaccccaaucggaacguugaugagaaugcgaacgccaauaacgcugugaagaauaacaacaaugaggaaccuagcgaccagcacauugagaaauaucucaagaucauucagaacucccugagcacggaauggucucccugcuccgugaccugcggcaauggcauccagguccgcauuaagccggggagcgccaacaaaccuaaggaucaacuugacuacgcuaaugacaucgagaaaaagaucuguaaaauggaaaaguguucuuccguuuuuaacguggucaauagcucuauuggacugaucauggugcucuccuuccuguuucuuaacuga

SEQ ID NO: 5097 - RNA, 1170 nt, Artificial Sequence
  derived and/or modified CDS sequence (opt5) from Pf(T9/96)__BAD73957.1__CSP
augaugagaaagcuggccauccucagcguguccucuuuccuguuugucgaggcucuuuuccaggaauaccaaugcuauggcagcuccucuaacacccggguucugaaugagcucaacuacgacaaugccgggacaaaccuguauaaugaacuugagaugaacuacuauggaaaacaggaaaauugguacagccugaagaaaaacucccgcucucucggcgagaaugaugacgggaacaaugaggauaacgaaaagcugagaaaacccaagcacaagaaacugaagcagccugcggacggaaauccggaucccaacgcuaauccuaacguggaccccaacgccaauccuaacguggaucccaaugccaacccuaaugucgacccgaacgcuaaucccaacgccaauccuaacgcuaaucccaacgccaauccuaacgcgaaucccaacgccaacccgaaugcuaacccuaaugccaaccccaaugcuaacccuaaugccaaccccaaugcgaaccccaaugccaacccuaaugcuaacccgaaugccaaccccaacguggauccuaaugcuaaccccaaugccaacccuaaugccaaccccaaugcuaacccgaaugcgaacccuaaugccaaccccaaugcuaacccuaaugccaaccccaacgccaauccuaacgcuaaucccaacgccaauccgaacgcgaauccuaacgcuaaucccaacgccaaucccaacgccaauccuaacgcuaauccgaacgccaaucccaacgcuaacccuaaugccaaccccaauaaaaacaaucagggcaacgggcaaggacauaauaugccuaacgaccccaaucggaacguugaugagaaugcgaacgccaauaacgcugugaagaauaacaacaaugaggaaccuagcgacaaacacauugagcaguaucucaagacgaucaagaacucccugagcaccgaauggucucccugcuccgucacaugcggcaauggcauucaggugcgcaucaaaccggggagcgccaacaagccuaaagaugagcuugacuacgcuaaugacauugaaaagaaaaucuguaagauggagaaauguucuuccguuuuuaacguggucaauagcucuaucggacugauuauggugcucuccuuccuguuucuuaacuga

SEQ ID NO: 5098 - RNA, 1170 nt, Artificial Sequence
  derived and/or modified CDS sequence (opt5) from Pf(Tz93-015)__BAM84752.1__CSP
augaugagaaagcuggccauccucagcguguccucuuuccuguuugucgaggcucuuuuccaggaauaccaaugcuauggcagcuccucuaacacccggguucugaaugagcucaacuacgacaaugccgggacaaaccuguauaaugaacuugagaugaacuacuauggaaaacaggaaaauugguacagccugaagaaaaacucccgcucucucggcgagaaugaugacgggaacaaugaggauaacgaaaagcugagaaaacccaagcacaagaaacugaagcagccuggagacggcaauccggaucccaacgcgaauccuaacguggaccccaacgcuaauccuaacguggaucccaaugccaacccuaaugucgacccgaacgccaaucccaacgcuaauccuaacgccaaucccaacgcuaauccuaacgccaaucccaacgcgaacccgaaugccaacccuaaugcuaaccccaaugccaacccuaaugcuaaccccaaugccaaccccaaugcgaacccuaaugccaacccgaaugcuaaccccaacguggauccuaaugccaaccccaaugcuaacccuaaugccaaccccaaugccaacccgaaugcuaacccuaaugcgaaccccaaugccaacccuaaugcuaaccccaacgccaauccuaacgccaaucccaacgcuaauccgaacgccaauccuaacgcgaaucccaacgcuaaucccaacgccaauccuaacgccaauccgaacgcuaaucccaacgccaacccuaaugcuaaccccaauaaaaacaaucaggggaacggacaaggccauaauaugccuaacgaccccaaucggaacguugaugagaaugccaacgcgaaugacgccgugaagaacaauaacaacgaggaaccuagcgaucagcacauugagaaauaucucaagaucauuaaaaauucccugagcacggaauggucucccugcuccgugaccugcggcaacgggauccagguccgcauuaagccgggaagcgcuaauaagccuaaagaccagcuugacuacgccaacgauaucgagaagaaaaucuguaagauggaaaaauguucuuccguuuuuaauguggucaacagcucuauuggccugaucauggugcucuccuuccuguuucuuaauuga

SEQ ID NO: 5099 - RNA, 1170 nt, Artificial Sequence
  derived and/or modified CDS sequence (opt5) from Pf(Tz93-050)__BAM84762.1__CSP
augaugagaaagcuggccauccucagcguguccucuuuccuguuugucgaggcucuuuuccaggaauaccaaugcuauggcagcuccucuaacacccggguucugaaugagcucaacuacgacaaugccgggacaaaccuguauaaugaacuugagaugaacuacuauggaaaacaggaaaauugguacagccugaagaaaaacucccgcucucucggcgagaaugaugacgggaacaaugaggauaacgaaaagcugagaaaacccaagcacaagaaacugaagcagccuggagacggcaauccggaucccaacgcgaauccuaacguggaccccaacgcuaauccuaacguggaucccaaugccaacccuaaugucgacccgaacgccaaucccaacgcuaauccuaacgccaaucccaacgcuaauccuaacgccaaucccaacgcgaacccgaaugccaacccuaaugcuaaccccaaugccaacccuaaugcuaaccccaaugccaaccccaaugcgaacccuaaugccaacccgaaugcuaaccccaacguggauccuaaugccaaccccaaugcuaacccuaaugccaaccccaaugccaacccgaaugcuaacccuaaugcgaaccccaaugccaacccuaaugcuaaccccaacgccaauccuaacgccaaucccaacgcuaauccgaacgccaauccuaacgcgaaucccaacgcuaaucccaacgccaauccuaacgccaauccgaacgcuaaucccaacgccaacccuaaugcuaaccccaauaaaaacaaucaggggaacggacaaggccauaauaugccuaacgaccccaaucggaacguugaugagaaugccaacgcgaauaacccugugaagaauaacaacaaugaggaacccagcgacaaacacauuacggaguaucucaagaagaucaaaaacuccauuagcaccgaauggucuccgugcuccgucacaugcggcaaugggauccaggugcgcauuaagccuggaagcgccaacaaacccaaggaugagcuggacuacgaaaaugacaucgagaaaaagaucuguaaaauggaaaaguguucuuccguuuuuaacguggucaauagcucuauuggccuuaucauggugcuguccuuccucuuucugaacuga

SEQ ID NO: 5100 - RNA, 1170 nt, Artificial Sequence
  derived and/or modified CDS sequence (opt5) from Pf(Tz93-105)__BAM84774.1__CSP
augaugagaaagcuggccauccucagcguguccucuuuccuguuugucgaggcucuuuuccaggaauaccaaugcuauggcagcuccucuaacacccggguucugaaugagcucaacuacgacaaugccgggacaaaccuguauaaugaacuugagaugaacuacuauggaaaacaggaaaauugguacagccugaagaaaaacucccgcucucucggcgagaaugaugacgggaacaaugaggauaacgaaaagcugagaaaacccaagcacaagaaacugaagcagccuggagacggcaauccggaucccaacgcgaauccuaacguggaccccaacgcuaauccuaacguggaucccaaugccaacccuaaugucgacccgaacgccaaucccaacgcuaauccuaacgccaaucccaacgcuaauccuaacgccaaucccaacgcgaacccgaaugccaacccuaaugcuaaccccaaugccaacccuaaugcuaaccccaaugccaaccccaaugcgaacccuaaugccaacccgaaugcuaaccccaacguggauccuaaugccaaccccaaugcuaacccuaaugccaaccccaaugccaacccgaaugcuaacccuaaugcgaaccccaaugccaacccuaaugcuaaccccaacgccaauccuaacgccaaucccaacgcuaauccgaacgccaauccuaacgcgaaucccaacgcuaaucccaacgccaauccuaacgccaauccgaacgcuaaucccaacgccaacccuaaugcuaaccccaauaaaaacaaucaggggaacggacaaggccauaauaugccuaacgaccccaaucggaacguugaugagaaugccaacgcgaauaacgccgugaagaauaacaacaaugaggaaccuagcgaccagcacauugagaaauaucucaagaucauucagaacucccugagcacggaauggucucccugcuccgugaccugcggcaaugggauccagguccgcauuaagccgggaagcgcuaacaaaccuaaggaucaacuugacuacgccaaugacaucgagaaaaagaucuguaaaauggaaaaguguucuuccguuuuuaacguggucaauagcucuauuggccugaucauggugcucuccuuccuguuucuuaacuga

SEQ ID NO: 5101 - RNA, 1170 nt, Artificial Sequence
  derived and/or modified CDS sequence (opt5) from Pf(Tz93-121)__BAM84777.1__CSP
augaugagaaagcuggccauccucagcguguccucuuuccuguuugucgaggcucuuuuccaggaauaccaaugcuauggcagcuccucuaacacccggguucugaaugagcucaacuacgacaaugccgggacaaaccuguauaaugaacuugagaugaacuacuauggaaaacaggaaaauugguacagccugaagaaaaacucccgcucucucggcgagaaugaugacgggaacaaugaggauaacgaaaagcugagaaaacccaagcacaagaaacugaagcagccuggagacggcaauccggaucccaacgcgaauccuaacguggaccccaacgcuaauccuaacguggaucccaaugccaacccuaaugucgacccgaacgccaaucccaacgcuaauccuaacgccaaucccaacgcuaauccuaacgccaaucccaacgcgaacccgaaugccaacccuaaugcuaaccccaaugccaacccuaaugcuaaccccaaugccaaccccaauguggauccuaacgcgaauccgaacgccaaucccaacgcuaacccuaaugccaaccccaaugcuaacccuaaugccaaccccaaugccaacccgaaugcuaacccuaaugcgaaccccaaugccaacccuaaugcuaaccccaacgccaauccuaacgccaaucccaacgcuaauccgaacgccaauccuaacgcgaaucccaacgcuaaucccaacgccaauccuaacgccaauccgaacgcuaaucccaacgccaacccuaaugcuaaccccaauaaaaacaaucaggggaacggacaaggccauaauaugccuaacgaccccaaucggaacguugaugagaaugccaacgcgaauaacgccgugaagaauaacaacaaugaggaaccuagcgaccagcacauugagaaauaucucaagaagaucaaaaacuccauuagcacggaauggucucccugcuccgugaccugcggcaaugggauccagguccgcauuaagccgggaagcgcuaacaaaccuaaggaugagcuggacuacgaaaaugacaucgagaaaaagaucuguaaaauggaaaaguguucuuccguuuuuaacguggucaauagcucuauuggccuuaucauggugcuguccuuccucuuucugaacuga

SEQ ID NO: 5102 - RNA, 1170 nt, Artificial Sequence
  derived and/or modified CDS sequence (opt5) from Pf(Tz98-032)__BAM84786.1__CSP
augaugagaaagcuggccauccucagcguguccucuuuccuguuugucgaggcucuuuuccaggaauaccaaugcuauggcagcuccucuaacacccggguucugaaugagcucaacuacgacaaugccgggacaaaccuguauaaugaacuugagaugaacuacuauggaaaacaggaaaauugguacagccugaagaaaaacucccgcucucucggcgagaaugaugacgggaacaaugaggauaacgaaaagcugagaaaacccaagcacaagaaacugaagcagccugcggacggaaauccggaucccaacgcuaauccuaacguggaccccaacgccaauccuaacguggaucccaaugccaacccuaaugucgacccgaacgcuaaucccaacgccaauccuaacgcuaaucccaacgccaauccuaacgcgaaucccaacgccaacccgaaugcuaacccuaaugccaaccccaaugcuaacccuaaugccaaccccaaugcgaaccccaaugccaacccuaaugcuaacccgaaugccaaccccaacgcuaauccuaacguggaucccaaugccaacccuaaugccaaccccaaugcuaacccgaaugcgaacccuaaugccaaccccaaugcuaacccuaaugccaaccccaacgccaauccuaacgcuaaucccaacgccaauccgaacgcgaauccuaacgcuaaucccaacgccaaucccaacgccaauccuaacgcuaauccgaacgccaaucccaacgcuaacccuaaugccaaccccaauaaaaacaaucagggcaacgggcaaggacauaauaugccuaacgaccccaaucggaacguugaugagaaugcgaacgccaauaacgcugugaagaauaacaacaaugaggaaccuagcgacaaacacauugagcaguaucucaacaagaucaaaaauuccauuagcacggaauggucucccugcuccgugaccugcggcaacggcauccagguccgcauuaagccggggagcgccaauaagccuaaagaugagcugaacuacgaaaaugacaucgagaagaaaaucuguaagauggaaaaauguucuuccguuuuuaacguggucaauagcucuauuggacuuaucauggugcuguccuuccucuuucugaacuga

SEQ ID NO: 5103 - RNA, 1170 nt, Artificial Sequence
  derived and/or modified CDS sequence (opt5) from Pf(Tz98-107)__BAM84796.1__CSP
augaugagaaagcuggccauccucagcguguccucuuuccuguuugucgaggcucuuuuccaggaauaccaaugcuauggcagcuccucuaacacccggguucugaaugagcucaacuacgacaaugccgggacaaaccuguauaaugaacuugagaugaacuacuauggaaaacaggaaaauugguacagccugaagaaaaacucccgcucucucggcgagaaugaugacgggaacaaugaggauaacgaaaagcugagaaaacccaagcacaagaaacugaagcagccugcggacggaaauccggaucccaacgcuaauccuaacguggaccccaacgccaauccuaacguggaucccaaugccaacccuaaugucgacccgaacgcuaaucccaacgccaauccuaacgcuaaucccaacgccaauccuaacgcgaaucccaacgccaacccgaaugcuaacccuaaugccaaccccaaugcuaacccuaaugccaaccccaaugcgaaccccaaugccaacccuaaugcuaacccgaaugccaaccccaacguggauccuaaugcuaaccccaaugccaacccuaaugccaaccccaaugcuaacccgaaugcgaacccuaaugccaaccccaaugcuaacccuaaugccaaccccaacgccaauccuaacgcuaaucccaacgccaauccgaacgcgaauccuaacgcuaaucccaacgccaaucccaacgccaauccuaacgcuaauccgaacgccaaucccaacgcuaacccuaaugccaaccccaauaaaaacaaucagggcaacgggcaaggacauaauaugccuaacgaccccaaucggaacguugaugagaaugcgaacgccaauaacgcugugaagaauaacaacaaugaggaaccuagcgaccagcacauugagaaauaucucaagcgcauccagaacucccugagcacggaauggucucccugcuccgugaccugcggcaauggcauucaggucagaaucaagccggggagcgccaacaaaccuaaggaucaacuugacuacgcuaaugacauugagaaaaagaucuguaaaauggaaaaguguucuuccguuuuuaacguggucaauagcucuaucggacugauuauggugcucuccuuccuguuucuuaacuga

SEQ ID NO: 5104 - RNA, 1167 nt, Artificial Sequence
  derived and/or modified CDS sequence (opt5) from Pf(Asembo Bay)__AAN87599.1__CSP
augaugagaaagcuggccauccucagcguguccucuuuccuguuugucgaggcucuuuuccaggaauaccaaugcuauggcagcuccucuaacacccggguucugaaugagcucaacuacgacaaugccgggacaaaccuguauaaugaacuugagaugaacuacuauggaaaacaggaaaauugguacagccugaagaaaaacucccgcucucucggcgagaaugaugacgggaacaauaacaauggagauaacggcagagaggggaaggacgaagauaaacgggacggaaauaacgaggauaacgaaaagcugcgcaagcccaaacacaagaaacugaagcagccugcggacggcaauccggaucccaacgcuaauccuaacguggaccccaaugccaacccuaauguggaucccaacgccaauccuaacgucgacccgaaugcuaaccccaaugccaacccuaaugcuaaccccaacgccaauccuaacgcgaaucccaacgccaauccgaacgcuaauccuaacgccaaucccaacgcuaauccuaacguggaucccaaugccaaccccaaugcgaacccuaacgccaauccgaacgcuaaucccaacgccaauccuaacgcuaaucccaacgccaauccuaacgccaaucccaacgcuaauccgaacgcgaauccuaacgccaaccccaaugcuaacccuaaugccaaccccaaugccaacccuaaugcuaaccccaaugccaacccgaaugcgaacccuaaugcuaaccccaaugccaaccccaauaaaaacaaccagggcaaugggcaaggacauaacaugccuaaugacccgaacagaaauguugacgagaacgccaaugcuaacaaugccgugaagaacaauaacaaugaggaacccagcgauaagcacauugagcaguaucucaacaaaauccaaaauucccugagcacggaauggucuccuugcuccgugaccugcggcaacgggauucagguccggaucaagcccggaagcgcuaacaaaccuaaggaccagcuugauuacgccaaugacauugagaaaaagaucuguaaaauggaaaaguguucuuccguuuuuaacguggucaauagcucuaucggccugauuauggugcucuccuuccuguuucuuaacuga

SEQ ID NO: 5105 - RNA, 1158 nt, Artificial Sequence
  derived and/or modified CDS sequence (opt5) from Pf(Asembo Bay)__AAN87581.1__CSP
augaugagaaagcuggccauccucagcguguccucuuuccuguuugucgaggcucuuuuccaggaauaccaaugcuauggcagcuccucuaacacccggguucugaaugagcucaacuacgacaaugccgggacaaaccuguauaaugaacuugagaugaacuacuauggaaaacaggaaaauugguacagccugaagaaaaacucccgcucucucggcgagaaugaugacgggaacaaugaggauaacgaaaagcugagaaaacccaagcacaagaaacugaagcagccugcggacggaaauccggaucccaacgcuaauccuaacguggaccccaacgccaauccuaacguggaucccaaugccaacccuaaugucgacccgaacgcuaaucccaacgccaauccuaacgcuaaucccaacgccaauccuaacgcgaaucccaacgccaacccgaaugcuaacccuaaugccaaccccaaugcuaacccuaaugccaaccccaaugcgaaccccaaugccaacccuaaugcuaacccgaauguggaucccaacgccaacccuaaugcuaaccccaaugccaacccuaaugccaaccccaaugcuaacccgaaugcgaacccuaaugccaaccccaaugcuaacccuaaugccaaccccaacgccaauccuaacgcuaaucccaacgccaauccgaacgcgaauccuaacgcuaaucccaacgccaaucccaacgccaauccuaacgcuaauccgaacgccaaucccaacgcuaacccuaauaaaaacaaucagggcaacgggcaaggacauaauaugcccaacgacccuaaucggaacguugaugagaaugccaaggcgaacaaugccgugaaaaacaauaacaaugaggaacccagcgacaagcacauuaagcaguaucucaaaaagauccagaacuccauuagcacggaguggucuccuugcuccgugaccugcggcaacggcauccagguccgcauuaaacccgggagcgcugauaagccgaaagaccaacuggacuacgauaaugacaucgaaaagaaaaucuguaagauggagaaguguucuuccguuuuuaacguggucaauagcucuauuggacuuaucauggugcuguccuuccucuuucugaacuga

SEQ ID NO: 5106 - RNA, 1158 nt, Artificial Sequence
  derived and/or modified CDS sequence (opt5) from Pf(Gha1108-115)__BAM84810.1__CSP
augaugagaaagcuggccauccucagcguguccucuuuccuguuugucgaggcucuuuuccaggaauaccaaugcuauggcagcuccucuaacacccggguucugaaugagcucaacuacgacaaugccgggacaaaccuguauaaugaacuugagaugaacuacuauggaaaacaggaaaauugguacagccugaagaaaaacucccgcucucucggcgagaaugaugacgggaacaaugaggauaacgaaaagcugagaaaacccaagcacaagaaacugaagcagccugcggacggaaauccggaucccaacgcuaauccuaacguggaccccaacgccaauccuaacguggaucccaaugccaacccuaaugucgacccgaacgcuaaucccaacgccaauccuaacgcuaaucccaacgccaauccuaacgcgaaucccaacgccaacccgaaugcuaacccuaaugccaaccccaaugcuaacccuaaugccaaccccaauguggaucccaacgcgaauccuaacgccaauccgaacgcuaaucccaacgccaacccuaaugcuaaccccaaugccaacccuaaugccaaccccaaugcuaacccgaaugcgaacccuaaugccaaccccaaugcuaacccuaaugccaaccccaacgccaauccuaacgcuaaucccaacgccaauccgaacgcgaauccuaacgcuaaucccaacgccaaucccaacgccaauccuaacgcuaauccgaacgccaaucccaacgcuaacccuaauaaaaacaaucagggcaacgggcaaggacauaauaugcccaacgacccuaaucggaacguugaugagaaugccaacgcgaauaacgccgugaagaauaacaauaacgaagaacccagcgaccagcacauugagaaauaucuccagaagauccagaacucccugagcacggaauggucuccuugcuccgugaccugcggcaauggcauucaaguccgcaucaagcccgggagcgcuaacaaaccgaaggaucagcuuaauuacgagaacgacauugagaaaaagaucuguaaaauggagaaguguucuuccguuuuuaauguggucaacagcucuaucggacugauuauggugcucuccuuccuguuucuuaauuga

SEQ ID NO: 5107 - RNA, 1158 nt, Artificial Sequence
  derived and/or modified CDS sequence (opt5) from Pf(Gha1108-119)__BAM84811.1__CSP
augaugagaaagcuggccauccucagcguguccucuuuccuguuugucgaggcucuuuuccaggaauaccaaugcuauggcagcuccucuaacacccggguucugaaugagcucaacuacgacaaugccgggacaaaccuguauaaugaacuugagaugaacuacuauggaaaacaggaaaauugguacagccugaagaaaaacucccgcucucucggcgagaaugaugacgggaacaaugaggauaacgaaaagcugagaaaacccaagcacaagaaacugaagcagccuggagacggcaauccggaucccaacgcgaauccuaacguggaccccaacgcuaauccuaacguggaucccaaugccaacccuaaugucgacccgaacgccaaucccaacgcuaauccuaacgccaaucccaacgcuaauccuaacgccaaucccaacgcgaacccgaaugccaacccuaaugcuaaccccaaugccaacccuaaugcuaaccccaaugccaaccccaaugcgaacccuaaugccaacccgaauguggaucccaacgcuaacccuaaugccaaccccaaugcuaacccuaaugccaaccccaaugccaacccgaaugcuaacccuaaugcgaaccccaaugccaacccuaaugcuaaccccaacgccaauccuaacgccaaucccaacgcuaauccgaacgccaauccuaacgcgaaucccaacgcuaaucccaacgccaauccuaacgccaauccgaacgcuaaucccaacgccaacccuaauaaaaacaaucaggggaacggacaaggccauaauaugcccaacgacccuaaucggaacguugaugagaaugcuaacgccaauaacgcggugaagaauaacaauaacgaggaacccagcgaccagcacauugagaaauaucucaagacgaucaagaacucccugagcaccgaauggucuccuugcuccgucacaugcggcaaugggauucaggugcgcaucaaacccggaagcgccaacaagccgaaagaucagcuugacuacgagaaugacauugaaaagaaaaucuguaagauggagaaauguucuuccguuuuuaacguggucaauagcucuaucggccugauuauggugcucuccuuccuguuucuuaacuga

SEQ ID NO: 5108 - RNA, 1158 nt, Artificial Sequence
  derived and/or modified CDS sequence (opt5) from Pf(Gha1109-071)__BAM84836.1__CSP
augaugagaaagcuggccauccucagcguguccucuuuccuguuugucgaggcucuuuuccaggaauaccaaugcuauggcagcuccucuaacacccggguucugaaugagcucaacuacgacaaugccgggacaaaccuguauaaugaacuugagaugaacuacuauggaaaacaggaaaauugguacagccugaagaaaaacucccgcucucucggcgagaaugaugacgggaacaaugaggauaacgaaaagcugagaaaacccaagcacaagaaacugaagcagccuggagacggcaauccggaucccaacgcgaauccuaacguggaccccaacgcuaauccuaacguggaucccaaugccaacccuaaugucgacccgaacgccaaucccaacgcuaauccuaacgccaaucccaacgcuaauccuaacgccaaucccaacgcgaacccgaaugccaacccuaaugcuaaccccaaugccaacccuaaugcuaaccccaaugccaaccccaaugcgaacccuaaugccaacccgaaugcuaaccccaacguggauccuaaugccaaccccaaugcuaacccuaaugccaaccccaaugccaacccgaaugcuaacccuaaugcgaaccccaaugccaacccuaaugcuaaccccaacgccaauccuaacgccaaucccaacgcuaauccgaacgccaauccuaacgcgaaucccaacgcuaaucccaacgccaauccuaacgccaauccgaacgcuaaucccaacgccaacccuaauaaaaacaaucaggggaacggacaaggccauaauaugcccaacgacccuaaucggaacguugaugagaaugcuaacgccaauaacgcggugaagaauaacaauaacgaggaacccagcgaccagcacauugagaaauauaucaagaagauucagaacucccucagcacggaauggucuccuugcuccgugaccugcggcaaugggauccagguccgcauuaaacccggaagcgccaacaagccgaaagaugagcugaauuacgaaaacgacaucgagaagaaaaucuguaagauggaaaaauguucuuccguuuuuaauguggucaacagcucuauuggccuuaucauggugcuguccuuccucuuucugaauuga

SEQ ID NO: 5109 - RNA, 1158 nt, Artificial Sequence
  derived and/or modified CDS sequence (opt5) from Pf(Gha1109-163)__BAM84827.1__CSP
augaugagaaagcuggccauccucagcguguccucuuuccuguuugucgaggcucuuuuccaggaauaccaaugcuauggcagcuccucuaacacccggguucugaaugagcucaacuacgacaaugccgggacaaaccuguauaaugaacuugagaugaacuacuauggaaaacaggaaaauugguacagccugaagaaaaacucccgcucucucggcgagaaugaugacgggaacaaugaggauaacgaaaagcugagaaaacccaagcacaagaaacugaagcagccugcggacggaaauccggaucccaacgcuaauccuaacguggaccccaacgccaauccuaacguggaucccaaugccaacccuaaugucgacccgaacgcuaaucccaacgccaauccuaacgcuaaucccaacgccaauccuaacgcgaaucccaacgccaacccgaaugcuaacccuaaugccaaccccaaugcuaacccuaaugccaaccccaaugcgaaccccaaugccaacccuaaugcuaacccgaaugccaaccccaacguggauccuaaugcuaaccccaaugccaacccuaaugccaaccccaaugcuaacccgaaugcgaacccuaaugccaaccccaaugcuaacccuaaugccaaccccaacgccaauccuaacgcuaaucccaacgccaauccgaacgcgaauccuaacgcuaaucccaacgccaaucccaacgccaauccuaacgcuaauccgaacgccaaucccaacgcuaacccuaauaaaaacaaucagggcaacgggcaaggacauaauaugcccaacgacccuaaucggaacguugaugagaaugccaacgcgaauaacgccgugaagaauaacaauaacgaggaacccagcgaccagcacauugagaaauaucucaagacgauccagaacucccugagcaccgaauggucuccuugcuccgucacaugcggcaauggcauucaggugcgcaucaagcccgggagcgcuaacaaaccgaaggaucaacuugacuacgccaaugacauugagaaaaagaucuguaaaauggaaaaguguucuuccguuuuuaacguggucaauagcucuaucggacugauuauggugcucuccuuccuguuucuuaacuga

SEQ ID NO: 5110 - RNA, 1158 nt, Artificial Sequence
  derived and/or modified CDS sequence (opt5) from Pf(Tz93-007)__BAM84748.1__CSP
augaugagaaagcuggccauccucagcguguccucuuuccuguuugucgaggcucuuuuccaggaauaccaaugcuauggcagcuccucuaacacccggguucugaaugagcucaacuacgacaaugccgggacaaaccuguauaaugaacuugagaugaacuacuauggaaaacaggaaaauugguacagccugaagaaaaacucccgcucucucggcgagaaugaugacgggaacaaugaggauaacgaaaagcugagaaaacccaagcacaagaaacugaagcagccugcggacggaaauccggaucccaacgcuaauccuaacguggaccccaacgccaauccuaacguggaucccaaugccaacccuaaugucgacccgaacgcuaaucccaacgccaauccuaacgcuaaucccaacgccaauccuaacgcgaaucccaacgccaacccgaaugcuaacccuaaugccaaccccaaugcuaacccuaaugccaaccccaaugcgaaccccaaugccaacccuaaugcuaacccgaauguggaucccaacgccaacccuaaugcuaaccccaaugccaacccuaaugccaaccccaaugcuaacccgaaugcgaacccuaaugccaaccccaaugcuaacccuaaugccaaccccaacgccaauccuaacgcuaaucccaacgccaauccgaacgcgaauccuaacgcuaaucccaacgccaaucccaacgccaauccuaacgcuaauccgaacgccaaucccaacgcuaacccuaauaaaaacaaucagggcaacgggcaaggacauaauaugcccaacgacccuaaucggaacguugaugagaaugccaacgcgaauaacgccgugaagaauaacaauaacgaggaacccagcgacaaacacauugagcaguaucucaagacgaucaagaacucccugagcaccgaauggucuccuugcuccgucacaugcggcaauggcauucaggugcgcaucaaacccgggagcgcuaacaagccgaaagaugagcuugacuacgccaaugacauugaaaagaaaaucuguaagauggagaaauguucuuccguuuuuaacguggucaauagcucuaucggacugauuauggugcucuccuuccuguuucuuaacuga

SEQ ID NO: 5111 - RNA, 1158 nt, Artificial Sequence
  derived and/or modified CDS sequence (opt5) from Pf(Tz93-008)__BAM84749.1__CSP
augaugagaaagcuggccauccucagcguguccucuuuccuguuugucgaggcucuuuuccaggaauaccaaugcuauggcagcuccucuaacacccggguucugaaugagcucaacuacgacaaugccgggacaaaccuguauaaugaacuugagaugaacuacuauggaaaacaggaaaauugguacagccugaagaaaaacucccgcucucucggcgagaaugaugacgggaacaaugaggauaacgaaaagcugagaaaacccaagcacaagaaacugaagcagccugcggacggaaauccggaucccaacgcuaauccuaacguggaccccaacgccaauccuaacguggaucccaaugccaacccuaaugucgacccgaacgcuaaucccaacgccaauccuaacgcuaaucccaacgccaauccuaacgcgaaucccaacgccaacccgaaugcuaacccuaaugccaaccccaaugcuaacccuaaugccaaccccaaugcgaaccccaaugccaacccuaaugcuaacccgaauguggaucccaacgccaacccuaaugcuaaccccaaugccaacccuaaugccaaccccaaugcuaacccgaaugcgaacccuaaugccaaccccaaugcuaacccuaaugccaaccccaacgccaauccuaacgcuaaucccaacgccaauccgaacgcgaauccuaacgcuaaucccaacgccaaucccaacgccaauccuaacgcuaauccgaacgccaaucccaacgcuaacccuaauaaaaacaaucagggcaacgggcaaggacauaauaugcccaacgacccuaaucggaacguugaugagaaugccaacgcgaauaacgccgugaagaauaacaauaacgaggaacccagcgacaaacacauuacggaguaucucaagaagauccagaacucccugagcaccgaauggucuccuuguuccgucacaugcggcaauggcauucaggugcgcaucaaacccgggagcgcuggaaagucuaaaaacgagcuugauuacgaaaaugacauugagaagaaaaucuguaagauggaaaaaugcuccagcguuuuuaacguggucaauucuuccaucggccugauuauggugcucagcuuccuguuucuuaacuga

SEQ ID NO: 5112 - RNA, 1158 nt, Artificial Sequence
  derived and/or modified CDS sequence (opt5) from Pf(Tz93-013)__BAM84751.1__CSP
augaugagaaagcuggccauccucagcguguccucuuuccuguuugucgaggcucuuuuccaggaauaccagugcuauggcagcuccucuaacacccggguucugaaugagcucaacuacgacaaugccgggacaaaccuguauaaugaacuugagaugaacuacuauggaaaacaggaaaauugguacagccugaagaaaaacucccgcucucucggcgagaaugaugacgggaacaaugaggauaacgaaaagcugagaaaacccaagcacaagaaacugaagcagccugcggacggaaauccggaucccaacgcuaauccuaacguggaccccaacgccaauccuaacguggaucccaaugccaacccuaaugucgacccgaacgcuaaucccaacgccaauccuaacgcuaaucccaacgccaauccuaacgcgaaucccaacgccaacccgaaugcuaacccuaaugccaaccccaaugcuaacccuaaugccaaccccaaugcgaaccccaaugccaacccuaaugcuaacccgaauguggaucccaacgccaacccuaaugcuaaccccaaugccaacccuaaugccaaccccaaugcuaacccgaaugcgaacccuaaugccaaccccaaugcuaacccuaaugccaaccccaacgccaauccuaacgcuaaucccaacgccaauccgaacgcgaauccuaacgcuaaucccaacgccaaucccaacgccaauccuaacgcuaauccgaacgccaaucccaacgcuaacccuaauaaaaacaaucagggcaacgggcaaggacauaauaugcccaacgacccuaaucggaacguuaaugagaacgccaaugcgaacaaugccgugaagaacaauaacaacgaggaacccagcgauaaacacauuacggaguaucucaagaagauccaaaauucccugagcaccgaauggucuccuuguuccgucacaugcggcaacggcauucaggugcgcaucaaacccgggagcgcuggaaagucuagagacgagcuugauuacgaaaaugacauugagaaaaagaucuguaaaauggaaaagugcuccagcguuuuuaacguggucaauucuuccaucggccugauuauggugcucagcuuccuguuucuuaacuga

SEQ ID NO: 5113 - RNA, 1158 nt, Artificial Sequence
  derived and/or modified CDS sequence (opt5) from Pf(Tz93-048)__BAM84761.1__CSP
augaugagaaagcuggccauccucagcguguccucuuuccuguuugucgaggcucuuuuccaggaauaccaaugcuauggcagcuccucuaacacccggguucugaaugagcucaacuacgacaaugccgggacaaaccuguauaaugaacuugagaugaacuacuauggaaaacaggaaaauugguacagccugaagaaaaacucccgcucucucggcgagaaugaugacgggaacaaugaggauaacgaaaagcugagaaaacccaagcacaagaaacugaagcagccugcggacggaaauccggaucccaacgcuaauccuaacguggaccccaacgccaauccuaacguggaucccaaugccaacccuaaugucgacccgaacgcuaaucccaacgccaauccuaacgcuaaucccaacgccaauccuaacgcgaaucccaacgccaacccgaaugcuaacccuaaugccaaccccaaugcuaacccuaaugccaaccccaaugcgaaccccaaugccaacccuaaugcuaacccgaaugccaaccccaacguggauccuaaugcuaaccccaaugccaacccuaaugccaaccccaaugcuaacccgaaugcgaacccuaaugccaaccccaaugcuaacccuaaugccaaccccaacgccaauccuaacgcuaaucccaacgccaauccgaacgcgaauccuaacgcuaaucccaacgccaaucccaacgccaauccuaacgcuaauccgaacgccaaucccaacgcuaacccuaauaaaaacaaucagggcaacgggcaaggacauaauaugcccaacgacccuaaucggaacguugaugagaaugccaacgcgaauaacgccgugaagaauaacaauaacgaggaacccagcgaccagcacauugagaaauaucucaagaucauuaagaacucccugagcacggaauggucuccuugcuccgugaccugcggcaauggcauccagguccgcauuaaacccgggagcgcuaacaagccgaaagaucagcuugacuacgccaaugacaucgagaagaaaaucuguaagauggaaaaauguucuuccguuuuuaacguggucaauagcucuauuggacugaucauggugcucuccuuccuguuucuuaacuga

SEQ ID NO: 5114 - RNA, 1158 nt, Artificial Sequence
  derived and/or modified CDS sequence (opt5) from Pf(Tz93-120)__BAM84776.1__CSP
augaugagaaagcuggccauccucagcguguccucuuuccuguuugucgaggcucuuuuccaggaauaccaaugcuauggcagcuccucuaacacccggguucugaaugagcucaacuacgacaaugccgggacaaaccuguauaaugaacuugagaugaacuacuauggaaaacaggaaaauugguacagccugaagaaaaacucccgcucucucggcgagaaugaugacgggaacaaugaggauaacgaaaagcugagaaaacccaagcacaagaaacugaagcagccugcggacggaaauccggaucccaacgcuaauccuaacguggaccccaacgccaauccuaacguggaucccaaugccaacccuaaugucgacccgaacgcuaaucccaacgccaauccuaacgcuaaucccaacgccaauccuaacgcgaaucccaacgccaacccgaaugcuaacccuaaugccaaccccaaugcuaacccuaaugccaaccccaaugcgaaccccaaugccaacccuaaugcuaacccgaauguggaucccaacgccaacccuaaugcuaaccccaaugccaacccuaaugccaaccccaaugcuaacccgaaugcgaacccuaaugccaaccccaaugcuaacccuaaugccaaccccaacgccaauccuaacgcuaaucccaacgccaauccgaacgcgaauccuaacgcuaaucccaacgccaaucccaacgccaauccuaacgcuaauccgaacgccaaucccaacgcuaacccuaauaaaaacaaucagggcaacgggcaaggacauaauaugcccaacgacccuaaucggaacguugaugagaaugccaacgcgaauaacgccgugaagaauaacaauaacgaggaacccagcgaccagcacauugagaaauaucucaagaucauucagaacucccugagcacggaauggucuccuugcuccgugaccugcggcaauggcauccagguccgcauuaagcccgggagcgcuaacaaaccgaaggaucaacuugacuacgccaaugacaucgagaaaaagaucuguaaaauggaaaaguguucuuccguuuuuaacguggucaauagcucuauuggacugaucauggugcucuccuuccuguuucuuaacuga

SEQ ID NO: 5115 - RNA, 1158 nt, Artificial Sequence
  derived and/or modified CDS sequence (opt5) from Pf(Tz98-101)__BAM84794.1__CSP
augaugagaaagcuggccauccucagcguguccucuuuccuguuugucgaggcucuuuuccaggaauaccaaugcuauggcagcuccucuaacacccggguucugaaugagcucaacuacgacaaugccgggacaaaccuguauaaugaacuugagaugaacuacuauggaaaacaggaaaauugguacagccugaagaaaaacucccgcucucucggcgagaaugaugacgggaacaaugaggauaacgaaaagcugagaaaacccaagcacaagaaacugaagcagccugcggacggaaauccggaucccaacgcuaauccuaacguggaccccaacgccaauccuaacguggaucccaaugccaacccuaaugucgacccgaacgcuaaucccaacgccaauccuaacgcuaaucccaacgccaauccuaacgcgaaucccaacgccaacccgaaugcuaacccuaaugccaaccccaaugcuaacccuaaugccaaccccaaugcgaaccccaaugccaacccuaaugcuaacccgaaugccaaccccaacguggauccuaaugcuaaccccaaugccaacccuaaugccaaccccaaugcuaacccgaaugcgaacccuaaugccaaccccaaugcuaacccuaaugccaaccccaacgccaauccuaacgcuaaucccaacgccaauccgaacgcgaauccuaacgcuaaucccaacgccaaucccaacgccaauccuaacgcuaauccgaacgccaaucccaacgcuaacccuaauaaaaacaaucagggcaacgggcaaggacauaauaugcccaacgacccuaaucggaacguugaugagaaugccaacgcgaauaacgccgugaagaauaacaauaacgaggaacccagcgacaaacacauuacggaguaucucaagcgcauccagaacucccugagcaccgaauggucuccuuguuccgucacaugcggcaauggcauucaggugagaaucaagcccgggagcgcuggaaaaucuaagaacgagcuugauuacgaaaaugacauugagaaaaagaucuguaaaauggaaaagugcuccagcguuuuuaacguggucaauucuuccaucggccugauuauggugcucagcuuccuguuucuuaacuga

SEQ ID NO: 5116 - RNA, 1158 nt, Artificial Sequence
  derived and/or modified CDS sequence (opt5) from Pf(Yaounde)__AAN87580.1__CSP
augaugagaaagcuggccauccucagcguguccucuuuccuguuugucgaggcucuuuuccaggaauaccaaugcuauggcagcuccucuaacacccggguucugaaugagcucaacuacgacaaugccgggacaaaccuguauaaugaacuugagaugaacuacuauggaaaacaggaaaauugguacagccugaagaaaaacucccgcucucucggcgagaaugaugacgggaacaaugaggauaacgaaaagcugagaaaacccaagcacaagaaacugaagcagccugcggacggaaauccggaucccaacgcuaauccuaacguggaccccaacgccaauccuaacguggaucccaaugccaacccuaaugucgacccgaacgcuaaucccaacgccaauccuaacgcuaaucccaacgccaauccuaacgcgaaucccaacgccaacccgaaugcuaacccuaaugccaaccccaaugcuaacccuaaugccaaccccaaugcgaaccccaaugccaacccuaaugcuaacccgaauguggaucccaacgccaacccuaaugcuaaccccaaugccaacccuaaugccaaccccaaugcuaacccgaaugcgaacccuaaugccaaccccaaugcuaacccuaaugccaaccccaacgccaauccuaacgcuaaucccaacgccaauccgaacgcgaauccuaacgcuaaucccaacgccaaucccaacgccaauccuaacgcuaauccgaacgccaaucccaacgcuaacccuaauaaaaacaaucagggcaacgggcaaggacauaauaugcccaacgacccuaaucggaacguugaugagaaugccaaggcgaacaaugccgugaaaaacaauaacaaugaggaacccagcgacaagcacauugagcaguaucucaagacgauccagaacucccugagcaccgaauggucuccuugcuccgucacaugcggcaacggcauucaggugcgcaucaaacccgggagcgcuaauaagccgaaagaucaacuugacuacgagaacgacauugaaaagaaaaucuguaagauggagaaauguucuuccguuuuuaauguggucaacagcucuaucggacugauuauggugcucuccuuccuguuucuuaauuga

SEQ ID NO: 5117 - RNA, 1143 nt, Artificial Sequence
  derived and/or modified CDS sequence (opt5) from Pf(Asembo Bay)__AAN87610.1__CSP
augaugagaaagcuggccauccucagcguguccucuuuccuguuugucgaggcucuuuuccaggaauaccaaugcuauggcagcuccucuaacacccggguucugaaugagcucaacuacgacaaugccgggacaaaccuguauaaugaacuugagaugaacuacuauggaaaacaggaaaauugguacagccugaagaaaaacucccgcucucucggcgagaaugaugacgggaacaauaacaauggagauaacggcagagaggggaaggacgaagauaaacgggacggaaauaacgaggauaacgaaaagcugcgcaagcccaaacacaagaaacugaagcagccuggcgacggcaauccggaucccaacgcgaauccuaacguggaccccaaugcuaacccuaauguggaucccaacgccaauccuaacgucgacccgaaugccaaccccaaugcuaacccuaaugccaaccccaacgcuaauccuaacgccaaucccaacgcgaauccgaacgccaauccuaacgcuaaucccaacgccaauccuaacgcuaaucccaacgccaaucccaacgcgaacccuaaugccaacccgaaugcuaaccccaaugccaacccuaaugcuaaccccaaugccaacccuaaugccaaccccaaugcuaacccgaaugcgaacccuaacgccaaucccaacgcuaauccuaacgccaaucccaacgccaauccuaacgcuaaucccaacgccaauccgaacgcgaauccuaacaaaaauaaccaggggaauggacaaggccauaacaugcccaacgaucccaauagaaacguggacgagaaugcuaacgccaauaacgccguuaagaauaacaauaacgaggaaccuagcgacaagcacauugagcaguaucucaauaaaaucaagaacuccauuagcacggaauggucuccgugcuccgugaccugcgggaauggaauccagguccggauuaaacccggcagcgcuaacaagccuaaagaucagcuggacuacgccaaugauaucgagaagaaaaucuguaagauggaaaaguguucuuccguguuuaacguugugaacagcucuauugggcuuaucaugguccuguccuuccucuuucugaauuga

SEQ ID NO: 5118 - RNA, 1143 nt, Artificial Sequence
  derived and/or modified CDS sequence (opt5) from Pf(India)__AAN87619.1__CSP
augaugagaaagcuggccauccucagcguguccucuuuccuguuugucgaggcucuuuuccaggaauaccagugcuauggcagcuccucuaacacccggguucugaaugagcucaacuacgacaaugccgggacaaaccuguauaaugaacuugagaugaacuacuauggaaaacaggaaaauugguacagccugaagaaaaacucccgcucucucggcgagaaugaugacgggaacaauaacaauggagauaacggcagagaggggaaggacgaagauaaacgggacggaaauaacgaggauaacgaaaagcugcgcaagcccaaacacaagaaacugaagcagccuggcggcgacaauccggaucccaacgcgaauccuaacgcuaaucccaacgccaauccuaacgccaaucccaacgcuaauccuaacgccaauccgaacguggaccccaaugcuaacccuaacgccaaucccaacgcgaauccuaacgccaaucccaacgcuaauccgaacgccaauccuaacgcuaaucccaacgccaauccuaacgcgaaucccaacgccaaccccaaugcuaacccuaaugccaacccgaaugcuaaccccaaugccaacccuaaugccaaccccaaugcuaacccuaaugcgaaccccaaugccaacccgaacgcuaauccuaacgccaaucccaacgccaauccuaacgcuaaucccaacgccaauccuaacgcgaaucccaacgcuaauccgaacgccaauccuaacaaaaauaaccaggggaacggacaaggccauaauaugcccaacgaucccaauagaaacguggacgagaaugccaacgcuaauaacgccgucaagaauaacaauaacgaggaaccuagcgauaagcacauugagcaguaucucaaaaagauccaaaauucccugagcacggaauggucuccgugcuccgugaccugcgggaacggcauucagguucggaucaaacccggaagcgcuaauaagccuaaagacgagcuugacuacgaaaacgauauugagaagaaaaucuguaagauggagaaguguucuuccguguuuaacgucgugaauagcucuaucgggcugauuaugguucucuccuuccuguuucuuaacuga

SEQ ID NO: 5119 - RNA, 1107 nt, Artificial Sequence
  derived and/or modified CDS sequence (opt5) from Pf(India)__AAN87617.1__CSP
augaugagaaagcuggccauccucagcguguccucuuuccuguuugucgaggcucuuuuccaggaauaccagugcuauggcagcuccucuaacacccggguucugaaugagcucaacuacgacaaugccgggacaaaccuguauaaugaacuugagaugaacuacuauggaaaacaggaaaauugguacagccugaagaaaaacucccgcucucucggcgagaaugaugacgggaacaauaacaauggagauaacggcagagaggggaaggacgaagauaaacgggacggaaauaacgaggauaacgaaaagcugcgcaagcccaaacacaagaaacugaagcagccuggcggcgacaauccggaucccaacgcgaauccuaacguggaccccaaugcuaacccuaaugccaaccccaaugccaacccuaaugcuaacccgaaugccaaccccaaugcuaacccuaacgccaaucccaacgcgaauccuaacgccaaucccaacgcuaauccgaacgccaauccuaacgcuaaucccaacgccaauccuaacgcgaaucccaacgccaaccccaaugcuaacccuaaugccaacccgaaugcuaaccccaaugccaacccuaaugccaaccccaaugcuaacccuaaugcgaaccccaaugccaacccgaacgcuaauccuaacgccaaucccaacgccaauccuaacgcuaaucccaacgccaauccuaacaaaaauaaccaggggaauggacaaggccauaacaugcccaaugauccgaacagaaauguggacgagaacgcgaacgcuaauaacgccgucaagaauaacaauaacgaggaaccuagcgauaagcacauugagcaguaucucaaaaagauccaaaauucccugagcacggaauggucucccugcuccgugaccugcgggaacggcauucagguucggaucaaacccggaagcgccaauaagccuaaagacgagcuugacuacgaaaacgauauugagaagaaaaucuguaagauggagaaguguucuuccguguuuaaugucgugaacagcucuaucgggcugauuaugguucucuccuuccuguuucuuaauuga

SEQ ID NO: 5120 - RNA, 1095 nt, Artificial Sequence
  derived and/or modified CDS sequence (opt5) from Pf(India)__AAN87616.1__CSP
augaugagaaagcuggccauccucagcguguccucuuuccuguuugucgaggcucuuuuccaggaauaccagugcuauggcagcuccucuaacacccggguucugaaugagcucaacuacgacaaugccgggacaaaccuguauaaugaacuugagaugaacuacuauggaaaacaggaaaauugguacagccugaagaaaaacucccgcucucucggcgagaaugaugacgggaacaauaacaauggagauaacggcagagaggggaaggacgaagauaaacgggacggaaauaacgaggauaacgaaaagcugcgcaagcccaaacacaagaaacugaagcagccuggcggcgacaauccggaucccaacgcgaauccuaacguggaccccaaugcuaacccuaaugccaaccccaaugccaacccuaaugcuaacccgaaugccaaccccaaugcuaacccuaacgccaaucccaacgcgaauccuaacgccaaucccaacgcuaauccgaacgccaauccuaacgcuaaucccaacgccaauccuaacgcgaaucccaacgccaaccccaaugcuaacccuaaugccaacccgaaugcuaaccccaaugccaacccuaaugccaaccccaaugcuaacccuaaugcgaaccccaaugccaacccgaacgcuaauccuaacgccaaucccaacgccaauccuaacgcuaaucccaacaaaaauaaccaggggaauggacaaggccauaacaugccuaaugaucccaacagaaauguggacgagaacgccaaugcgaacaacgcugucaagaauaacaauaacgaggaaccgagcgauaagcacauugagcaguaucucaaaaagauccaaaauucccugagcacggaauggucuccuugcuccgugaccugcgggaacggcauucagguucggaucaaacccggaagcgccaauaagcccaaagacgagcuugacuacgaaaacgauauugagaagaaaaucuguaagauggagaaguguucuuccguguuuaaugucgugaacagcucuaucgggcugauuaugguucucuccuuccuguuucuuaauuga

SEQ ID NO: 5121 - RNA, 1092 nt, Artificial Sequence
  derived and/or modified CDS sequence (opt5) from Pf(Bolivar)__AAN87600.1__CSP
augaugagaaagcuggccauccucagcguguccucuuuccuguuugucgaggcucuuuuccaggaauaccaaugcuauggcagcuccucuaacacccggguucugaaugagcucaacuacgacaaugccgggacaaaccuguauaaugaacuugagaugaacuacuauggaaaacaggaaaauugguacagccugaagaaaaacucccgcucucucggcgagaaugaugacgggaacaauaacaauggagauaacggcagagaggggaaggacgaagauaaacgggacggaaauaacgaggauaacgaaaagcugcgcaagcccaaacacaagaaacugaagcagccugcggacggcaauccggaucccaacgcuaauccuaacguggaccccaaugccaacccuaaucccaacgccaauccuccgaacgcuaaucccaacgccaauccuaacgcuaaucccaacgccaacccuaauguggaucccaacgcgaauccgaacgccaauccuaacgcuaaucccaacgccaauccuaacgcuaaucccaacgccaaucccaacgcgaauccuaacgccaacccgaaugcuaaccccaaugccaacccuaaugcuaaccccaaugccaacccuaaugccaaccccaaugcuaacccgaaugcgaacccuaaugccaaccccaacgcuaauccuaacgccaaucccaacgccaauccuaacaaaaauaaccagggcaaugggcaaggacauaacaugcccaaugacccgaacagaaaugucgaugagaacgcuaaugccaacaaugcggugaagaacaacaauaacgaggaaccuagcgacaagcacauugagcaguaucucaauaaaauccagaacucccugagcacggaauggucucccugcuccguuaccugcggcaaugggauucaggugcggaucaagcccggaagcgcuaacaaaccuaaggaccaacuugauuacgccaaugacauugagaaaaagaucuguaaaauggaaaaguguucuuccgucuuuaacgugguuaauagcucuaucggccugauuauggugcucuccuuccuguuucuuaacuga

SEQ ID NO: 5122 - RNA, 1083 nt, Artificial Sequence
  derived and/or modified CDS sequence (opt5) from Pf(Asembo Bay)__AAN87597.1__CSP
augaugagaaagcuggccauccucagcguguccucuuuccuguuugucgaggcucuuuuccaggaauaccaaugcuauggcagcuccucuaacacccggguucugaaugagcucaacuacgacaaugccgggacaaaccuguauaaugaacuugagaugaacuacuauggaaaacaggaaaauugguacagccugaagaaaaacucccgcucucucggcgagaaugaugacgggaacaauaacaauggagauaacggcagagaggggaaggacgaagauaaacgggacggaaauaacgaggauaacgaaaagcugcgcaagcccaaacacaagaaacugaagcagccugcggacggcaauccggaucccaacgcuaauccuaacguggaccccaaugccaacccuaaugccaaccccaaugcuaacccuaaugccaacccgaaugcuaaccccaaugccaacccuaacguggaucccaaugcgaacccuaaugccaaccccaaugcuaacccgaaugccaacccuaaugcuaaccccaaugccaacccuaaugcgaaccccaaugccaaccccaacgcuaauccuaacgccaauccgaacgcuaaucccaacgccaauccuaacgccaaucccaacgcuaauccuaacgcgaaucccaacgccaauccgaacgcuaacccuaaugccaaccccaaugccaacccuaauaaaaacaaucagggcaacgggcaaggacauaauaugcccaacgacccuaauagaaacgucgaugagaaugcuaacgccaauaacgcggugaagaauaacaacaaugaggaacccagcgacaagcacauuaaagaguaucucaagaucauuccgaacucccugagcacggaauggucuccuugcuccguuaccugcggcaaugggauccaggugcggauuaaacccggaagcgcuggcaagcccaaagacgagcuugauuacgccaacgacaucgaaaagaaaaucuguaagauggagaaguguucuuccgucuuuaaugugguuaacagcucuauugggcugaucauggugcucuccuuccuguuucuuaauuga

SEQ ID NO: 5123 - RNA, 1083 nt, Artificial Sequence
  derived and/or modified CDS sequence (opt5) from Pf(Asembo Bay)__AAN87596.1__CSP
augaugagaaagcuggccauccucagcguguccucuuuccuguuugucgaggcucuuuuccaggaauaccaaugcuauggcagcuccucuaacacccggguucugaaugagcucaacuacgacaaugccgggacaaaccuguauaaugaacuugagaugaacuacuauggaaaacaggaaaauugguacagccugaagaaaaacucccgcucucucggcgagaaugaugacgggaacaauaacaauggagauaacggcagagaggggaaggacgaagauaaacgggacggaaauaacgaggauaacgaaaagcugcgcaagcccaaacacaagaaacugaagcagccugcggacggcaauccggaucccaacgcuaauccuaacguggaccccaaugccaacccuaaugccaaccccaaugcuaacccuaaugccaacccgaaugcuaaccccaaugccaacccuaacguggaucccaaugcgaacccuaaugccaaccccaaugcuaacccgaaugccaacccuaaugcuaaccccaaugccaacccuaaugcgaaccccaaugccaaccccaacgcuaauccuaacgccaauccgaacgcuaaucccaacgccaauccuaacgccaaucccaacgcuaauccuaacgcgaaucccaacgccaauccgaacgcuaacccuaaugccaaccccaaugccaacccuaauaaaaacaaucagggcaacgggcaaggacauaauaugcccaacgacccuaauagaaacgucgaugagaaugcuaacgccaauaacgcggugaagaauaacaacaaugaggaacccagcgacaagcacauuaaagaguaucucaagaucauucagaacucccugagcacggaauggucuccgugcuccguuaccugcggcaaugggauccaggugcggauuaaaccuggaagcgcuggcaagcccaaagacgagcuugauuacgccaacgacaucgaaaagaaaaucuguaagauggagaaguguucuuccgucuuuaaugugguuaacagcucuauugggcugaucauggugcucuccuuccuguuucuuaauuga

SEQ ID NO: 5124 - RNA, 1071 nt, Artificial Sequence
  derived and/or modified CDS sequence (opt5) from Pf(India)__AAN87615.1__CSP
augaugagaaagcuggccauccucagcguguccucuuuccuguuugucgaggcucuuuuccaggaauaccagugcuauggcagcuccucuaacacccggguucugaaugagcucaacuacgacaaugccgggacaaaccuguauaaugaacuugagaugaacuacuauggaaaacaggaaaauugguacagccugaagaaaaacucccgcucucucggcgagaaugaugacgggaacaauaacaauggagauaacggcagagaggggaaggacgaagauaaacgggacggaaauaacgaggauaacgaaaagcugcgcaagcccaaacacaagaaacugaagcagccuggcgacggcaauccggaucccaacgcgaauccuaacguggaccccaaugcuaacccuaaugccaaccccaaugccaacccuaaugcuaacccgaaugccaaccccaaugcuaacccuaacgccaaucccaacgcgaauccuaacgccaaucccaacgcuaauccgaacgccaauccuaacgcuaaucccaacgugaauccuaacgccaaucccaacgcgaaccccaaugccaacccuaaugcuaacccgaaugccaaccccaaugcuaacccuaaugccaaccccaaugccaacccuaaugcuaaccccaaugcgaacccgaacgccaauccuaacgcuaaucccaacaaaaauaaccaggggaauggacaaggccauaacaugccuaaugaucccaacagaaaugucgacgagaacgccaaugugaacaaugccguuaagaacaauaacaacgaggaaccuagcgauaagcacauugagcaguaucucaaaaagauccaaaauucccugagcacggaauggucucccugcuccgugaccugcgggaacggcauucagguccggaucaaaccgggaagcgcuaauaagccuaaagacgagcuugacuacgaaaacgauauugagaagaaaaucuguaagauggagaaguguucuuccguguuuaauguugugaacagcucuaucgggcugauuaugguccucuccuuccuguuucuuaauuga

SEQ ID NO: 5125 - RNA, 1110 nt, Artificial Sequence
  derived and/or modified CDS sequence (opt5) from Pk(UMMAC6)__AHF20622.1__CSP
augaagaacuucauccugcucgccgugagcuccauucugcuugucgaccugcuccccacccacuuugagcauaauguugaucugucuagagcuaucaacgugaauggcgugagcuucaacaaugucgacacauccucucuuggggccgcucaggugcggcaaagcgcgucccgcggaagaggccugggggaaaaaccuaaggagggagccgauaaagaaaagaaaaaggagaaggaaaaagagaaggaggaggaaccgaaaaagcccaacgaaaauaaacucauucagccugagcagcccgccgcuggcgccgggggagagcagccugcugccggcgcgggcggggaacaacccgccgcuggagccggcggggagcagccugcugccggagcgggcggggaacagccggccgcuggagccggcggcgagcagcccgcugccggggcccggggagaacaaccugcugcgggcgccgggggagagcagcccgcugccggcgccgggggagagcagccugcugccggcgcgggcggggaacagcccgcugccggagccggcggggagcaaccggcugccggagcuggcggggaacagccugccgcgggcgcccgcggagagcagcccgcugccggcgcugggggagaacaaccugccgcgggcgccgggggagagcagcccgcucccgccccuagacgggagcagccggcugccggcgccgggggcgaacagcccgcuccugcgccccgcagagagcaaccugcccccggagcuggcgccggggacggagcccggggcgggaacgcuggagccggcaaggggcagggccagaauaaccagggagcgaauguuccgaacgaaaagguggucaaugauuaccugcacaaaauccgcucuagcgugacgaccgaguggacaccuugcuccguuaccuguggcaacggggugcggauuagacgcaagggacaugcuggcaauaaaaaggccgaagaccugacaauggaugaccucgaggucgaggccugcgugauggauaaaugugcugggaucuuuaacguggucagcaacucucugggacuuguuauccugcucgugcuggcccuuuucaauuga

SEQ ID NO: 5126 - RNA, 1092 nt, Artificial Sequence
  derived and/or modified CDS sequence (opt5) from Pk(H (SL1_PK))__XP_002259002.1__CSP
augaagaacuucauccugcucgccgugagcuccauucugcuugucgaccugcuccccacccacuuugagcauaauguugaucugucuagagcuaucaacgugaauggcgugagcuucaacaaugucgacacauccucucuuggggccgcucaggugcggcaaagcgcgucccgcggaagaggccugggggaaaaaccuaaggagggagccgauaaagaaaagaaaaaggagaagggcaaagaaaaggaggaggaaccgaaaaagcccaacgagaauaaacucaagcagccuaacgaagggcagccccaggcccaaggagacggcgcuaaugccggccagccucaggcucagggggauggagccaacgcgggccaaccccaggcccagggggacggagcuaaugccggccagccucaagcucagggggauggagccaacgcgggccagccgcaagcccagggcgacggggcuaaugccggacagccccaggcucaaggcgauggggccaacgccggacagccucaggcucagggcgacggggcgaaugccggacaaccccaggcucagggcgauggcgccaacgccgggcagccucaagcucagggagacggcgccaacgcggggcagccccaggcucaaggagauggcgccaaugccgggcagccgcaggcucaaggcgaccgggccaacgcuggacagccucaggcccagggcgacggggcgaauguuccccgccaaggaagaaacggcgggggagccccugcuggcgggaaugagggcaacaagcaggccggaaaaggccaggggcagaauaaccaaggagcuaaugcccccaacgagaagguggucaaugauuaccugcacaaaauucggucuagcgugacgaccgaauggacacccugcuccguuaccuguggcaacggggugcgcaucagacggaaggcgcaugccggaaauaaaaaggcugaggaccugacaauggaugaccucgaagucgaggccugcgugauggauaaaugugcuggcauuuuuaacguggucagcaauucucuggggcuuguuauccugcucgugcuggcccuuuucaacuga

SEQ ID NO: 5127 - RNA, 1443 nt, Artificial Sequence
  derived and/or modified CDS sequence (opt5) from Pk(SGEHIH2-im-Y09-12)__AFD97213.1__CSP
augaagaacuucauccugcucgccgugagcuccauucugcuugucgaccugcuccccacccacuuugagcauaauguugaucugucuagagcuaucaacgugaauggcgugagcuucaacaaugucgacacauccucucuuggggccgcucaggugcggcaaagcgcgucccgcggaagaggccugggggaaaaaccuaaggagggagaugacaaagaaaagaaaaaggagaaggaaaaagaggaggaaccgaagaaacucaacgagaauaaccccaagaaaccuaaugaagagggcgauggggccaagcugaagcagcccaacgaggaaggagacggcgccaaacugaagcagccuaaugcugagggcggggccaaacucaagcagcccaacgcugaaggaggcgccaaugcggggcaaccuaacgccgagggaggcgcuaaugccgggcagccgaacgcugaaggaggcgccaacgcgggccagcccaaugccgggggagcuaacgccggccagccuaaugcugagggaggggccaacgccggccaacccaaugcugaagggggagcgaacgccggccagccuaaugcugagggcggggccaacgcccggcagcccaaugcugagggaggcgccaacgcgcgccagccgaaugcugaagggggagccaacgccggccaaccuaaugcugaagggggcgccaacgcuggacagcccaaugccgagggcggggcgaacgccggacagccuaacgcugagggcggggccaaugcuagacaacccaacgccgagggaggcgcgaaugccgggcagcccaacgcugaaggcggagccaaugcuggccagccuaacgccgagggaggggccaaugcuggccagccgaacgcggaagggggagccaaugcuggccaacccaacgccgaagggggcgccaaugcucggcagccuaacgccgagggaggcgcgaaugcugggcagcccaacgccgagggaggcgccaaugcugggcagccuaacgccgagggaggcgcgaacgcucgccaaccccaggccgaagggggcggagccaaugcuagacagccgcaggccgagggcgggggagcuaacgcccggcaaggcgggaaugaaggaaacaaacaggcgggcaagggccaggggcagaauaaccaaggagccaaugcuccuaacgagaaaguugugaaugauuaccugcagaagauucgcucuagcgucacgaucgaguggacccccugcuccgugacauguggcaacgggguucggauuagacgcagagcccacgcugacaagaaaaaggccgaagaucuuaccauggacgaucuggagguggaagccugcgucauggacaaaugugcuggaaucuuuaauguggugagcaacucucucggccuggucauccuucugguucucgcgcuguucaauuga

SEQ ID NO: 5128 - RNA, 1320 nt, Artificial Sequence
  derived and/or modified CDS sequence (opt5) from Pk(NB028)__AFG25469.1__CSP
augaagaacuucauccugcucgccgugagcuccauucugcuugucgaccugcuccccacccacuuugagcauaauguugaucugucuagagcuaucaacgugaauggcgugagcuucaacaaugucgacacauccucucuuggggccgcucaggugcggcaaagcgcuucccgcggaagaggccugggggaaaaaccuaaggagggagaugacaaagaaaagaaaaaggagaaggaaaaagaggaggaaccgaagaaccucaaugagaacaaacccaagcagccuaaugccgaaggcgauggggccaaacugaagcagcccaacgcugagggagacggcgccaagcugaaacagccucaagcugagggcgauggggccaaugcgcggcagccccaggccgaaggaaacggcgcuaaugcccgccagccucaagcugagggggacggagccaacgcgagacagccgcaggccgaaggcgauggggcuaaugcccggcagccccaagcugagggagacggcgccaacgcccgccagccucaggcugaaggcgauggggcgaacgccagacaaccccaggcugagggagacggcgccaaugcccggcagccucaggcugagggggauggagccaacgcgcgccaaccccaggcugaaggcgggggagccaaugccagacagccgcaggcugagggcgacggcgccaacgcucggcaaccucaggccgaaggggacggagcgaaugcccgccagccccaggcugagggcgauggggccaacgcuagacaaccucaggccgaaggagacggcgcgaaugcccggcagccccaggcugagggggauggcgccaacgcucgccaaccccaggccgagggaggcggggccaaugcuagacagccucaagcggaaggagacggcgccaacgcucggcaggcccaggcccagggggauggaggcaaugcuagacaagggggcaacggaggcggggccccggcgggaggcaaugaggggaacaagcaggcuggaaaaggccaggggcagaauaaccaaggcgccaacgcccccaaugaaaagguugugaacgacuaccuccagaaaauucgcucuagcgucacgaccgaguggacaccuugcuccgugaccuguggaaauggcguucggaucagacgccgggcucacgccgauaagaaaaaggcggaggaacugacaauggacgaucuugagguggaagcgugcgucauggacaagugugccgggauuuuuaacguggugagcaauucucugggacucgucauccugcuuguucuggcccucuucaacuga

SEQ ID NO: 5129 - RNA, 1278 nt, Artificial Sequence
  derived and/or modified CDS sequence (opt5) from Pk(SGEHIH1-im-Y09-102)__AFD97209.1__CSP
augaagaacuucauccugcucgccgugagcuccauucugcuugucgaccugcuccccacccacuuugagcauaauguugaucugucuagagcuaucaacgugaauggcgugagcuucaacaaugucgacacauccucucuuggggccgcucaggugcggcaaagcgcgucccgcggaagaggccugggggaaaaaccuaaggagggagaugacaaagaaaagaaaaaggagaaggaaaaagaggaggaaccgaagaaacucaacgagaauaaccccaagaaaccuaaugaagagggcgauggggccaagcugaagcagcccaacgaggaaggagacggcgccaaacugaagcagccuaaugcugagggcggggccaaacucaagcagcccaacgcugaaggaggcgccaaugcggggcaaccuaacgccgagggaggcgcuaaugccgggcagccgaacgcugaaggaggcgccaacgcgggccagcccaaugccgggggagcuaacgccggccagccuaaugcugagggaggggccaacgccggccaacccaaugcugaagggggagcgaacgccggccagccuaaugcugagggcggggccaacgcccggcagcccaaugcugagggaggcgccaacgcgcgccagccgaaugcugaagggggagccaacgccggccaaccuaaugcugaagggggcgccaacgcuggacagcccaaugccgagggcggggcgaacgccggacagccuaacgcugagggcggggccaaugcuagacaacccaacgccgagggaggcgcgaaugccgggcagcccaacgcugaaggcggagccaaugcuggccagccuaacgccgaagggggagccaaugcucggcagccgcaagcggagggcgggggagccaacgcucgccagccccaggccgagggcgggggcgccaaugcuagacagggaggcaacgaagggaauaaacaagccggaaagggccaggggcagaacaaucagggagcgaacgcuccuaaugagaaaguugugaacgauuaccugcaaaagauucggucuagcgucacgaucgaguggacccccugcuccgugacauguggcaacgggguucgcauuagacggcgcgcccacgccgacaagaaaaaggcugaagaucuuaccauggacgaucuggagguggaagccugcgucauggacagaugugcgggcaucuuuaauguggugagcaacucucucggacuggucauccuucugguucucgcucuguucaauuga

SEQ ID NO: 5130 - RNA, 1278 nt, Artificial Sequence
  derived and/or modified CDS sequence (opt5) from Pk(SGEHIH1-im-Y09-17)__AFD97205.1__CSP
augagaaacuucauccugcucgccgugagcuccauucugcuugucgaccugcuccccacccacuuugagcauaauguugaucugucucgggcuaucaacgugaauggcgugagcuucaacaaugucgacacauccucucuuggggccgcgcaagugcgccaaagcgcuuccagaggacggggccugggggaaaagccuaaagagggagaugacaaggagaaaaagaaagagaaggaaaaggaggaggaaccgaaaaagcucaacgagaauaaccccaaaaagccuaaugaagagggcgauggggccaaacugaagcagcccaacgaggaaggagacggcgccaagcugaaacagccuaaugcugagggcggggccaagcucaaacagcccaacgcugaaggaggcgccaaugcggggcaaccuaacgccgagggaggcgcuaaugccgggcagccgaacgcugaaggaggcgccaacgcgggccagcccaaugccgggggagcuaacgccggccagccuaaugcugaagggggagccaacgccggccaacccaaugcugaagggggagcgaacgccggccagccuaaugcugagggcggggccaacgcccgccagcccaaugcugagggaggcgccaacgcgagacagccgaaugcugaagggggagccaacgccggccaaccuaaugcugaagggggcgccaacgcuggacagcccaaugccgagggcggggcgaacgccggacagccuaacgcugagggcggggccaaugcucggcaacccaacgccgagggaggcgcgaaugccgggcagcccaacgcugaaggcggagccaaugcuggccagccuaacgccgaagggggagccaaugcucgccagccgcaagcggagggcgggggagccaacgcuagacagccccaggccgagggcgggggcgccaaugcucggcagggaggcaacgaagggaauaagcaagccggaaaaggccaggggcagaacaaucagggagcgaacgcuccuaaugagaagguugugaacgauuaccugcagaaaauucgcucuagcgucacgaucgaguggacccccugcuccgugacauguggcaacgggguucggauuagacgcagagcccacgccgacaagaagaaagcugaagaucuuaccauggacgaucuggagguggaagccugcgucauggacaagugugcgggcaucuuuaauguggugagcaacucucucggacuggucauccuucugguucucgcucuguucaauuga

SEQ ID NO: 5131 - RNA, 1278 nt, Artificial Sequence
  derived and/or modified CDS sequence (opt5) from Pk(SGEHIH1-im-Y09-25)__AFD97206.1__CSP
augaagaacuucauccugcucgccgugagcuccauucugcuugucgaccugcuccccacccacuuugagcauaauguugaucugucuagagcuaucaacgugaauggcgugagcuucaacaaugucgacacauccucucuuggggccgcucaggugcggcaaagcgcgucccgcggaagaggccugggggaaaaaccuaaggagggagaugacaaagaaaagaaaaaggagaaggaaaaagaggaggaaccgaagaaacucaacgagaauaaccccaagaaaccuaaugaagagggcgauggggccaagcugaagcagcccaacgaggaaggagacggcgccaaacugaagcagccuaaugcugagggcggggccaaacucaagcagcccaacgcugaaggaggcgccaaugcggggcaaccuaacgccgagggaggcgcuaaugccgggcagccgaacgcugaaggaggcgccaacgcgggccagcccaaugccgggggagcuaacgccggccagccuaaugcugagggaggggccaacgccggccaacccaaugcugaagggggagcgaacgccggccagccuaaugcugagggcggggccaacgcccggcagcccaaugcugagggaggcgccaacgcgcgccagccgaaugcugaagggggagccaacgccggccaaccuaaugcugaagggggcgccaacgcuggacagcccaaugccgagggcggggcgaacgccggacagccuaacgcugagggcggggccaaugcuagacaacccaacgccgagggaggcgcgaaugccgggcagcccaacgcugaaggcggagccaaugcuggccagccuaacgccgaagggggagccaaugcucggcagccgcaagcggagggcgggggagccaacgcucgccagccccaggccgagggcgggggcgccaaugcuagacagggaggcaacgaagggaauaaacaagccggaaagggccaggggcagaacaaucagggagcgaacgcuccuaaugagaaaguugugaacgauuaccugcaaaagauucggucuagcgucacgaucgaguggacccccugcuccgugacauguggcaacgggguucgcauuagacggcgcgcccacgccgacaagaaaaaggcugaagaucuuaccauggacgaucuggagguggaagccugcgucauggacaaaugugcgggcaucuuuaauguggugagcaacucucucggacuggucauccuucugguucucgcucuguucaauuga

SEQ ID NO: 5132 - RNA, 1278 nt, Artificial Sequence
  derived and/or modified CDS sequence (opt5) from Pk(SGEHIH2-im-Y09-11)__AFD97212.1__CSP
augaagaacuucauccugcucgccgugagcuccauucugcuugucgaccugcuccccacccacuuugagcauaauguugaucugucuagagcuaucaacgugaauggcgugagcuucaacaaugucgacacauccucucuuggggccgcucaggugcggcaaagcgcgucccgcggaagaggccugggggaaaaaccuaaggagggagaugacaaagaaaagaaaaaggagaaggaaaaagaggaggaaccgaagaaacucaacgagaauaaccccaagaaaccuaaugaagagggcgauggggccaagcugaagcagcccaacgaggaaggagacggcgccaaacugaagcagccuaaugcugagggcggggccaaacucaagcagcccaacgcugaaggaggcgccaaugcggggcaaccuaacgccgagggaggcgcuaaugccgggcagccgaacgcugaaggaggcgccaacgcgggccagcccaaugccgggggagcuaacgccggccagccuaaugcugagggaggggccaacgccggccaacccaaugcugaagggggagcgaacgccggccagccuaaugcugagggcggggccaacgcccggcagcccaaugcugagggaggcgccaacgcgcgccagccgaaugcugaagggggagccaacgccggccaaccuaaugcugaagggggcgccaacgcuggacagcccaaugccgagggcggggcgaacgccggacagccuaacgcugagggcggggccaaugcuagacaacccaacgccgagggaggcgcgaaugccgggcagcccaacgcugaaggcggagccaaugcuggccagccuaacgccgaagggggagccaaugcucggcagccgcaagcggagggcgggggagccaacgcucgccagccccaggccgagggcgggggcgccaaugcuagacagggaggcaacgaagggaauaaacaagccggaaagggccaggggcagaacaaucagggagcgaacgcuccuaaugagaaaguugugaacgauuaccugcaaaagauucggucuagcgucacgaucgaguggacccccugcuccgugacauguggcaacgggguucgcauuagacggcgcgcccacgccgacaagaaaagagcugaagaucuuaccauggacgaucuggagguggaagccugcgucauggacaagugugcgggcaucuuuaauguggugagcaacucucucggacuggucauccuucugguucucgcucuguucaauuga

SEQ ID NO: 5133 - RNA, 1278 nt, Artificial Sequence
  derived and/or modified CDS sequence (opt5) from Pk(SGEHIH2-im-Y09-18)__AFD97214.1__CSP
augaagaacuucauccugcucgccgugagcuccauucugcuugucgaccugcuccccacccacuuugagcauaauguugaucugacaagagcuaucaacgugaauggcgugucuuucaacaaugucgacacgagcucccuuggggccgcucaggugcggcaaucugcgagccgcggaagaggccugggggaaaaaccuaaggagggagaugacaaagaaaagaaaaaggagaaggaaaaagaggaggaaccgaagaaacucaacgagaauaaccccaagaaaccuaaugaagagggcgauggggccaagcugaagcagcccaacgaggaaggagacggcgccaaacugaagcagccuaaugcugagggcggggccaaacucaagcagcccaacgcugaaggaggcgccaaugcggggcaaccuaacgccgagggaggcgcuaaugccgggcagccgaacgcugaaggaggcgccaacgcgggccagcccaaugccgggggagcuaacgccggccagccuaaugcugagggaggggccaacgccggccaacccaaugcugaagggggagcgaacgccggccagccuaaugcugagggcggggccaacgcccggcagcccaaugcugagggaggcgccaacgcgcgccagccgaaugcugaagggggagccaacgccggccaaccuaaugcugaagggggcgccaacgcuggacagcccaaugccgagggcggggcgaacgccggacagccuaacgcugagggcggggccaaugcuagacaacccaacgccgagggaggcgcgaaugccgggcagcccaacgcugaaggcggagccaaugcuggccagccuaacgccgaagggggagccaaugcucggcagccgcaagcggagggcgggggagccaacgcucgccagccccaggccgagggcgggggcgccaaugcuagacagggaggcaacgaagggaauaaacaagccggaaagggccaggggcagaacaaucagggagcgaacgcuccuaaugagaaaguugugaacgauuaccugcaaaagauucgguccucugucaccaucgaguggacacccugcagcgugaccuguggcaacgggguucgcauuagacggcgcgcccacgccgacaagaaaaaggcugaagaucuuacaauggacgaucuggagguggaagccugcgucauggacaaaugugcgggcaucuuuaaugugguguccaacagccucggacuggucauccuucugguucucgcucuguucaauuga

SEQ ID NO: 5134 - RNA, 1278 nt, Artificial Sequence
  derived and/or modified CDS sequence (opt5) from Pk(SGEHIH2-im-Y09-3)__AFD97210.1__CSP
augaagaacuucauccugcucgccgugagcuccauucugcuugucgaccugcuccccacccacuuugagcauaauguugaucugucuagagcuaucaacgugaauggcgugagcuucaacaaugucgacacauccucucuuggggccgcucaggugcggcaaagcgcgucccgcggaagaggccugggggaaaaaccuaaggagggagaugacaaagaaaagaaaaaggagaaggaaaaagaggaggaaccgaagaaacucaacgagaauaaccccaagaaaccuaaugaagagggcgauggggccaagcugaagcagcccaacgaggaaggagacggcgccaaacugaagcagccuaaugcugagggcggggccaaacucaagcagcccaacgcugaaggaggcgccaaugcggggcaaccuaacgccgagggaggcgcuaaugccgggcagccgaacgcugaaggaggcgccaacgcgggccagcccaaugccgggggagcuaacgccggccagccuaaugcugaagggggagccaacgccggccaacccaaugcugaagggggagcgaacgccggccagccuaaugcugagggcggggccaacgcccggcagcccaaugcugagggaggcgccaacgcgcgccagccgaaugcugggggaggcgccaacgccgggcaaccuaaugcugagggcggagccaacgcuggccagcccaaugccgagggaggggcgaacgccggccagccuaacgcugaagggggagccaaugcuagacaacccaacgccgagggcggggcgaaugccggccagcccaacgcugagggaggcgccaaugcugggcagccuaacgccgaaggaggcgccaaugcucggcagccgcaagcggagggagggggcgccaacgcucgccagccccaggccgaagggggcggagccaaugcuagacagggcgggaacgagggaaauaaacaagccggcaaggggcagggacagaacaaucagggcgcgaacgcuccuaaugaaaaaguugugaacgauuaccugcaaaagauucggucuagcgucacgaucgaguggacccccugcuccgugacaugugggaacggcguucgcauuagacggcgcgcccacgccgacaagaaaaaggcugaggaucuuaccguggacgaucuggaagucgaggccugcgugauggacaaaugugcgggaaucuuuaauguggucagcaacucucucggccugguuauccuucuggugcucgcucuguucaauuga

SEQ ID NO: 5135 - RNA, 1278 nt, Artificial Sequence
  derived and/or modified CDS sequence (opt5) from Pk(SGEHIH2-im-Y09-7)__AFD97211.1__CSP
augagaaacuucauccugcucgccgugagcuccauucugcuugucgaccugcuccccacccacuuugagcauaauguugaucugucucgggcuaucaacgugaauggcgugagcuucaacaaugucgacacauccucucuuggggccgcgcaagugcgccaaagcgcuuccagaggacggggccugggggaaaagccuaaagagggagaugacaaggagaaaaagaaagagaaggaaaaggaggaggaaccgaaaaagcucaacgagaauaaccccaaaaagccuaaugaagagggcgauggggccaaacugaagcagcccaacgaggaaggagacggcgccaagcugaaacagccuaaugcugagggcggggccaagcucaaacagcccaacgcugaaggaggcgccaaugcggggcaaccuaacgccgagggaggcgcuaaugccgggcagccgaacgcugaaggaggcgccaacgcgggccagcccaaugccgggggagcuaacgccggccagccuaaugcugaagggggagccaacgccggccaacccaaugcugaagggggagcgaacgccggccagccuaaugcugagggcggggccaacgcccgccagcccaaugcugagggaggcgccaacgcgagacagccgaaugcugaagggggagccaacgccggccaaccuaaugcugaagggggcgccaacgcuggacagcccaaugccgagggcggggcgaacgccggacagccuaacgcugagggcggggccaaugcucggcaacccaacgccgagggaggcgcgaaugccgggcagcccaacgcugaaggcggagccaaugcuggccagccuaacgccgaagggggagccaaugcucgccagccgcaagcggagggcgggggagccaacgcuagacagccccaggccgagggcgggggcgccaaugcucggcagggaggcaacgaagggaauaagcaagccggaaaaggccaggggcagaacaaucagggagcgaacgcuccuaaugagaagguugugaacgauuaccugcagaaaauucgcucuagcgucacgaucgaguggacccccugcuccgugacauguggcaacgggguucggauuagacgcagagcccacgccgacaagaagaaagcugaagaucuuaccauggacgaucuggagguggaagccugcgucauggacaagugugcgggcaucuuuaauguggugagcaacacacucggacuggucauccuucugguucucgcucuguucaauuga

SEQ ID NO: 5136 - RNA, 1278 nt, Artificial Sequence
  derived and/or modified CDS sequence (opt5) from Pk(UMNGC3)__AHF20628.1__CSP
augaagaacuucauccugcucgccgugagcuccauucugcuugucgaccugcuccccacccacuuugagcauaauguugaucugucuagagcuaucaacgugaauggcgugagcuucaacaaugucgacacauccucucuuggggccgcucaggugcggcaaagcgcgucccgcggaagaggccugggggaaaaaccuaaggagggagaugacaaagaaaagaaaaaggagaaggaaaaagaggaggaaccgaagaaacucaacgagaauaaccccaagaaaccuaaugaagagggcgauggggccaagcuggagcagcccaacgaagagggagacggcgccaagcugaaacagccuaaugaagagggcgauggggcuaagcucaaacagcccaacgccgaaggaggcgcuaagcugaaacaaccuaaugccgaagggggagcgaacgccggccagccgaaugcugaagggggagccaacgcuggccagcccaacgccgagggcggggcgaaugccggacagccuaacgcuggcggggccaaugcuggacaacccaacgccgagggcggggccaaugcuggacagccuaacgcggagggcggcgccaaugcugggcagcccaacgccgagggaggcgccaaugcugggcagccgaacgccgaaggaggcgcgaaugcucggcaaccuaacgccgaagggggcgccaaugcuggacagcccaacgccgagggcggggcuaaugccggacagccuaacgcggagggcggggccaacgcuggacaacccaaugccgagggcggggcuaacgcccgccagcccaaugcggaaggcggagccaacgcuggccagccuaaugccgagggaggggcuaacgccggccagccgaaugccgaagggggagcuaacgcgagacaaccccaggccgagggcgggggcgcuaaugcccggcagggaggcaacgaggggaauaagcaggccggaaaaggccaagggcagaacaaucagggagcuaacgccccuaaugaaaagguugugaacgacuaccuucagaagauucgcucuagcgucacgaucgaguggacccccugcuccgugacauguggcaacgggguucggauuagacgcagagcgcacgcugauaaaaagaaagccgaagaccugaccaugggcgaucucgagguggaggccugcgucauggacaagugugcuggaguguuuaauguggucagcaacucucugggccuuguuauccugcucgugcuggcccuguucaauuga

SEQ ID NO: 5137 - RNA, 1275 nt, Artificial Sequence
  derived and/or modified CDS sequence (opt5) from Pk(prk-1)__ADX31295.1__CSP
augaagaacuucauccugcucgccgugagcuccauucugcuugucgaccugcuccccacccacuuugagcauaauguugaucugucuagagcuaucaacgugaauggcgugagcuucaacaaugucgacacauccucucuuggggccgcucaggugcggcaaagcgcgucccgcggaagaggccugggggaaaaaccuaaggagggagaugacaaagaaaagaaaaaggagaaggaaaaagaggaggaaccgaagaaacucaacgagaauaaccccaagaaaccuaaugaagagggcgauggggccaagcugaagcagcccgacgaggaaggagauggcgccaaacugaagcagccuaacgaggaaggcgacggggcuaaacucaagcagcccaaugccgagggaggcgcuaaacugaagcaaccuaacgccgaagggggagcgaaugccggccagccgaacgcugaagggggagccaaugcuggccagcccaacgccgagggcggggcgaacgccggacagccuaaugcuggcggggccaacgcuggacaacccaaugccgagggcggggccaacgcuggacagccuaaugcggagggcggcgccaacgcugggcagcccaaugccgaaggaggcgccaacgcugggcagccgaaugccgagggaggcgcgaacgcucggcaaccuaaugccgaagggggcgccaacgcuggacagcccaaugccgagggcggggcuaacgccggacagccuaaugcggagggcggggccaacgcuggacaacccaacgccgaaggcggggcuaaugcccgccagcccaacgcggagguugaacagacgcaggauaauagaaugcaaaaaguggagcagaugcagaccacagaaugccggucuggcaccaacgcccgccagccucaagcugagggaggcggggccaaugcuagacagggaggcaacgaggggaauaagcaggccggaaagggccaggggcaaaacaaucagggcgccaacgcuccgaaugaaaaagucgugaacgacuaccuucagaagauucggagcuccguuacaaucgaguggacccccuguagcgugacaugcggaaauggcguccgcauuagacggcgcgcgcacgccgauaaaaagaaagcugaagaccugaccauggaugaccucgagguggaggccugugugauggacaagugcgccgggaucuuuaacgucguuucuaauucccugggacuugugauccugcucgugcuggcucuguucaacuga

SEQ ID NO: 5138 - RNA, 1251 nt, Artificial Sequence
  derived and/or modified CDS sequence (opt5) from Pk(UM0018C10)__AHF20648.1__CSP
augaagaacuucauccugcucgccgugagcuccauucugcuugucgaccugcuccccacccacuuugagcauaauguugaucugucuagagcuaucaacgugaauggcgugagcuucaacaaugucgacacauccucucuuggggccgcgcaagugcggcaaagcgcuucccgcggaagaggccugggggaaaaaccuaaggagggagaugacaaagaaaagaaaaaggagaaggaaaaagaggaggaaccgaagaaacucaacgagaauaagcccaaacagccuaacguugaaggcgauggggccaagcugaagcagcccaaugaggagggagacggcgccaaacugaagcagccuaacgaagagggcgauggggcuaaacucaagcaacccaaugccgaaggaggcgcuaaacugaagcagccuaacgccgagggaggggcgaaugccggccagccgaacgcugaagggggagccaaugcuggccagcccaacgccgagggcggggcgaacgccggacaaccuaaugcugagggcggggccaacgcuggacagcccaaugccgaaggcggggccaacgcuggacagccuaaugcggagggcggcgccaacgcugggcagcccaaugccgaaggaggcgccaacgcugggcaaccgaaugccgagggaggcgcgaacgcucggcagccuaaugccgaagggggcgccaacgcucgccagcccaaugccgagggaggcgcuaacgccagacaaccuaaugcggagggaggggccaacgcuggccagcccaacgccgaagggggagcuaaugccggccagcccaacgcggaagggggcgccaaugcucggcagccucaagccgagggaggcggggcuaacgcccgccagccgcaggccgagggaggcggggcuaaugcgagacagggaggcaacgaagggaauaaacaagccggcaagggacagggccagaacaaucagggggcuaacgcccccaaugagaagguggucaacgacuaccuucagaaaauucggucuagcgugacgaccgaguggacaccuugcuccguuaccuguggaaauggcgugcgcaucagacggcgcgcccacgcugauaagaaaaaggccgaagaccugacaauggaugaccucgaggucgaagcgugcgugauggauaaaugugcugggauuuuuaacguggucagcaauucucugggacuuguuauccugcucgugcuggcccuguucaacuga

SEQ ID NO: 5139 - RNA, 1251 nt, Artificial Sequence
  derived and/or modified CDS sequence (opt5) from Pk(UM0018C6)__AHF20646.1__CSP
augaagaacuucauccugcucgccgugagcuccauucugcuugucgaccugcuccccacccacuuugagcauaauguugaucugucuagagcuaucaacgugaauggcgugagcuucaacaaugucgacacauccucucuuggggccgcucaggugcggcaaagcgcgucccgcggaagaggccugggggaaaaaccuaaggagggagaugacaaagaaaagaaaaaggagaaggaaaaagaggaggaaccgaagaaacucaacgagaauaagcccaaacagccuaacguugaaggcgauggggccaagcugaagcagcccaaugaggagggagacggcgccaaacugaagcagccuaacgaagagggcgauggggcuaaacucaagcaacccaaugccgaaggaggcgcuaaacuggagcagccuaacgccgaagggggagcgaaugccggccagccgaacgcugaagggggagccaaugcuggccagcccaacgccgagggcggggcgaacgccggacaaccuaaugcugagggcggggccaacgcuggacagcccaaugccgagggcggggccaacgcuggacagccuaaugcggaaggcggcgccaacgcugggcagcccaaugccgagggaggcgccaacgcugggcaaccgaaugccgaaggaggcgcgaacgcucggcagccuaaugccgagggcggggccaacgcucgccagcccaaugccgagggaggcgcuaacgccagacaaccuaaugcggaagggggagccaacgcuggccagcccaacgccgagggaggggcuaaugccggccagcccaacgcggaagggggcgccaaugcucggcagccucaagccgagggaggcggggcuaacgcccgccagccgcaggccgaaggaggcggggcuaaugcgagacagggaggcaacgaggggaauaagcaagccggcaaaggacagggccagaacaaucagggggcuaacgcccccaaugagaagguggucaacgacuaccuucaaaagauucggucuagcgugacgaccgaauggacaccuugcuccguuaccuguggaaauggcgugcgcaucagacggcgcgcccacgcugauaaaaagaaagccgaggaccugacaauggaugaccucgaagucgaggcgugcgugauggauaagugugcugggauuuuuaacguggucagcaauucucugggacuuguuauccugcucgugcuggcccuguucaacuga

SEQ ID NO: 5140 - RNA, 1242 nt, Artificial Sequence
  derived and/or modified CDS sequence (opt5) from Pk(SGEHIH1-im-Y09-95)__AFD97208.1__CSP
augaagaacuucauccugcucgccgugagcuccauucugcuugucgaccugcuccccacccacuuugagcauaauguugaucugucuagagcuaucaacgugaauggcgugagccuuaacaaugucgacacauccucucugggggccgcucaggugcggcaaagcgcgucccgcggaagaggccucggggaaaaaccuaaggagggagaugacaaagaaaagaaaaaggagaaggaaaaagaggaggaaccgaagaaacugaacgagaauaaccccaagaaaccuaaugaagagggcgauggggccaagcugaagcagcccaacgccgagggaggcgcuaaacucaagcagccuaaugccgaaggcggggcuaacgccggacagcccaaugcggagggcggggccaacgcuggacaaccuaaugccgaaggcggggcuaacgccggacagccgaacgcgggcggcgccaaugcugggcagcccaacgccgagggaggcgcuaaugccgggcagccuaacgccgaaggaggcgcuaauguugggcaacccaacgcggagggaggcgccaaugcucggcagccuaacgccgagggcggggccaaugcucgccagcccaacgccgaaggaggcgcgaaugcugggcagccgaacgccgagggaggcgccaaugcugggcaaccuaacgccgaaggcggagcuaaugccggccagcccaacgcggaagggggagccaacgcuagacagccuaaugccgagggcggggcuaacgccggacaacccaaugcggagggcggggccaacgcuggccagcccaaugccgagggaggcgcuaacgcccggcagccucaggccgaagggggaggcgcuaaugcgcgccaaccgcaggccgaagggggaggcgcuaacgccagacaagggggcaaugagggaaacaaacgggccggcaaggggcagggacagaauaaccagggcgcuaaugcccccaacgagaaaguggucaaugacuaccugcagaagauucgcucuagcgugacgaucgaauggaccccuugcuccguuacaugugggaacggagugcggauuagacgcagagcgcacgcugauaaaaagaaggccgaggaccuuaccauggaugaccuggaggucgaagccugcgugauggauaaaugugcuggcaucuucaacguggucagcaauucucucgggcugguuauccuucuggugcucgcccuguuuaacuga

SEQ ID NO: 5141 - RNA, 1221 nt, Artificial Sequence
  derived and/or modified CDS sequence (opt5) from Pk(KH100)__ADN94497.1__CSP
augaagaacuucauccugcucgccgugagcuccauucugcuugucgaccugcuccccacccacuuugagcauaauguugaucugucuagagcuaucaacgugaauggcgugagcuucaacaaugucgacacauccucucuuggggccgcucaggugcggcaaagcgcgucccgcggaagaggccugggggaaaaaccuaaggagggagaugacaaagaaaagaaaaaggagaaggaaaaagaggaggaaccgaagaaccucaaugagaacaaacccaagcagccuaaugccgaaggcgauggggccaaacccaagcagccuaacgcugagggagacggcgccaagcugaaacagcccaaugcugagggcgauggggccaagcugaaacaaccuaacgcggaaggagacggcgggaaugcccggcagccgaacgcugagggagauggcgggaaugcccgccagcccaacgcugaaggagacggcggcaacgccagacagccuaaugcggagggggauggaggcaacgcccggcaacccaaugcugaaggggacggaggcaacgcccgccagccuaaugcugagggggauggaggcaacgccagacagcccaaugccgagggcgacgggggaaacgcucggcagccgaaugcggaaggcgacgggggaaacgcccgccaaccuaaugcugagggcgaugggggcaacgccagacagcccaaugccgaaggagacggcgggaacgcucggcagccuaaugccgagggagauggcgggaacgcgcgccaacccaacgcugaaggagacggcgccaaugccagacagcccaacgcugagggggauggcgccaaugcucggcagccucaggccgagggaggcgggggaaacgcgcgccaaggcgggaaugaaggaaacaagcaggccggcaaagggcagggccagaauaaccaaggagcuaaugccccgaacgagaagguugugaaugacuaccuccagaaaauuagaucuagcgucacgaccgaauggacacccugcuccgugaccuguggcaacgggguucggaucagacgccgggcucacgccgauaagaagaaagcggaggaccugacaauggaugaccuugaaguggaggccugcgucauggauaagugugcuggaauuuuuaauguggugagcaacucucugggccucgucauccugcuuguucuggcccucuucaauuga

SEQ ID NO: 5142 - RNA, 1221 nt, Artificial Sequence
  derived and/or modified CDS sequence (opt5) from Pk(KH294)__ADN94542.1__CSP
augaagaacuucauccugcucgccgugagcuccauucugcuugucgaccugcuccccacccacuuugagcauaauguugaucugucuagagcuaucaacgugaauggcgugagcuucaacaaugucgacacauccucucuuggggccgcucaggugcggcaaagcgcgucccgcggaagaggccugggggaaaaaccuaaggagggagaugacaaagaaaagaaaaaggagaaggaaaaagaggaggaaccgaagaaccucaaugagaacaaacccaagcagccuaaugccgaaggcgauggggccaaacccaagcagccuaacgcugagggagacggcgccaagcugaaacagcccaaugcugagggcgauggggccaagcugaaacaaccuaacgcggaaggagacggcgggaaugcccggcagccgaacgcugagggagauggcgggaaugcccgccagcccaacgcugaaggagacggcggcaacgccagacagccuaaugcggagggggauggaggcaacgcccggcaacccaaugcugaaggggacggaggcaacgcccgccagccuaaugcugagggggauggaggcaacgccagacagcccaaugccgagggcgacgggggaaacgcucggcagccgaaugcggaaggcgacgggggaaacgcccgccaaccuaaugcugagggcgaugggggcaacgccagacagcccaaugccgaaggagacggcgggaacgcucggcagccuaaugccgagggagauggcgggaacgcgcgccaacccaacgcugaaggagacggcgggaaugccagacagcccaacgccgagggcgauggagcuaaugcccggcagccucaggcugagggcgggggaggcaacgcccgccaagggggaaaugaaggcaacaagcaggcggggaaaggccagggacagaauaaccaaggcgccaaugcuccgaacgagaagguugugaaugacuaccuccagaaaauuagaucuagcgucacgaccgaauggacacccugcuccgugaccugugggaacggaguucggaucagacgccgggcccacgcugauaagaagaaagccgaggaccugacaauggaugaccuugaaguggaggcgugcgucauggauaagugugccggcauuuuuaauguggugagcaacucucuggggcucgucauccugcuuguucuggcucucuucaauuga

SEQ ID NO: 5143 - RNA, 1218 nt, Artificial Sequence
  derived and/or modified CDS sequence (opt5) from Pk(UM0015C4)__AHF20661.1__CSP
augaagaacuucauccugcucgccgugagcuccauucugcuugucgaccugcuccccacccacuuugagcauaauguugaucugucuagagcuaucaacgugaauggcgugagcuucaacaaugucgacacauccucucuuggggccgcucaggugcggcaaagcgcgucccgcggaagaggccugggggaaaaaccuaaggagggagaugacaaagaaaagaaaaaggagaaggaaaaagaggaggaaccgaagaaacucgaugagaacaagcccaaacagccuaauguugaaggcgacggggccaagcugaagcagcccaacgaggagggagauggcgccaaacugaagcagccuaaugaagagggcgacggggcuaaacucaagcaacccaacgccgaaggaggcgcuaaacugaagcagccuaaugccgagggaggggcgaacgccggccagccgaaugcugaagggggagccaacgcuggccagcccaaugccgagggcggggcgaacgccggacaaccuaacgcugagggcggggccaaugcuggacagcccaacgccgaaggcggggccaaugcuggacagccuaacgcggagggcggcgccaaugcugggcagcccaacgccgaaggaggcgccaaugcucggcaaccgaacgccgaagggggagcgaaugcucgccagccuaacgccgagggcggggccaaugcuagacagcccaacgccgagggcggagcuaaugccggccaaccuaacgcggagggaggggccaaugcuggccagcccaacgccgaagggggagcuaacgcccggcagccccaggcggagggcgggggcgccaaugcucgccaaccucaggccgaaggaggcggggcuaacgccagacagggaggcaaugaggggaacaaacaggccggaaagggccaagggcagaauaaccagggcgcuaaugcgccgaacgaaaagguggucaaugauuaccuucagaaaauucggucuagcgugacgaccgaguggacacccugcuccguuaccuguggaaacggcgugcgcaucagacggcgcgcccacgcugacaagaaaaaggccgaggaucugacaauggacgaucucgaagucgaggccugcgugauggacaaaugugcugggauuuuuagcguggucucuaauucccugggacuuguuauccugcucgugcuggcccuguucaacuga

SEQ ID NO: 5144 - RNA, 1218 nt, Artificial Sequence
  derived and/or modified CDS sequence (opt5) from Pk(UM0015C7)__AHF20662.1__CSP
augaagaacuucauccugcucgccgugagcuccauucugcuugucgaccugcuccccacccacuuugagcauaauguugaucugucuagagcuaucaacgugaauggcgugagcuucaacaaugucgacacauccucucuuggggccgcucaggugcggcaaagcgcgucccgcggaagaggccugggggaaaaaccuaaggagggagaugacaaagaaaagaaaaaggagaaggaaaaagaggaggaaccgaagaaacucaacgagaauaagcccaaacagccuaacguugaaggcgauggggccaagcugaagcagcccaaugaggagggagacggcgccaaacugaagcagccuaacgaagagggcgauggggcuaaacucaagcaacccaaugccgaaggaggcgcuaaacugaagcagccuaacgccgagggaggggcgaaugccggccagccgaacgcugaagggggagccaaugcuggccagcccaacgccgagggcggggcgaacgccggacaaccuaaugcugagggcggggccaacgcuggacagcccaaugccgaaggcggggccaacgcuggacagccuaaugcggagggcggcgccaacgcugggcagcccaaugccgaaggaggcgccaacgcucggcaaccgaaugccgaagggggagcgaacgcucgccagccuaaugccgagggcggggccaacgcuagacagcccaaugccgagggcggagcuaacgccggccaaccuaaugcggagggaggggccaacgcuggccagcccaacgccgaagggggagcuaaugcccggcagccccaggcggagggcgggggcgccaacgcucgccaaccucaggccgaaggaggcggggcuaaugccagacagggaggcaacgaggggaauaaacaggccggaaagggccaagggcagaacaaucagggcgcuaacgcgccgaaugaaaagguggucaacgacuaccuucagaaaauucggucuagcgugacgaccgaguggacacccugcuccguuaccuguggaaauggcgugcgcaucagacggcgcgcccacgcugauaagaaaaaggccgaggaccugacaauggaugaccucgaagucgaggccugcgugauggauaaaugugcugggauuuuuaacguggucagcaauucucugggacuuguuauccugcucgugcuggcccuguucaacuga

SEQ ID NO: 5145 - RNA, 1218 nt, Artificial Sequence
  derived and/or modified CDS sequence (opt5) from Pk(UM009C4)__AHF20644.1__CSP
augaagaacuucauccugcucgccgugagcuccauucugcuugucgaccugcuccccacccacuuugagcauaauguugaucugucuagagcuaucaacgugaauggcgugagcuucaacaaugucgacacauccucucuuggggccgcucaggugcggcaaagcgcgucccgcggaagaggccugggggaaaaaccuaaggagggagaugacaaagaaaagaaaaaggagaaggaaaaagaggaggaaccgaagaaacucaacgagaauaagcccaaacagccuaacguugaaggcgauggggccaagcugaagcagcccaaugaggagggagacggcgccaaacugaagcggccuaacgaagagggcgauggggcuaaacucaagcagcccaaugccgaaggaggcgcuaaaccuaagcaaccgaacgccgagggaggggcgaaugccggccagcccaacgcugaagggggagccaaugcuggccagccuaacgccgagggcggggcgaacgccggacagcccaaugcugagggcggggccaacgcuggacaaccuaaugccgaaggcggggccaacgcuggacagcccaaugcggagggcggcgccaacgcugggcagccgaaugccgaaggaggcgccaacgcucgccagccuaaugccgaagggggagcgaacgcuagacaacccaaugccgagggcggggccaacgcucggcagccuaaugccgagggcggagcuaacgccggccagcccaaugcggagggaggggccaacgcuggccaacccaacgccgaagggggagcuaaugcccgccagccucaggcggagggcgggggcgccaacgcuagacggccgcaggccgaaggaggcggggcuaaugcccgccaaggaggcaacgaggggaauaaacaggccggaaagggccaggggcagaacaaucaaggcgcuaacgcgcccaaugaaaagguggucaacgacuaccugcagaaaauuagaucuagcgugacgaccgaguggacaccuugcuccguuaccuguggaaauggcgugcggauccgcagacgggcccacgcugauaagaaaaaggccgaggaccuuacaauggaugaccuggaagucgaggccugcgugauggauaaaugugcugggauuuuuaacguggucagcaauucucucggacugguuauccuucuggcccucgcgcuguucaacuga

SEQ ID NO: 5146 - RNA, 1212 nt, Artificial Sequence
  derived and/or modified CDS sequence (opt5) from Pk(TN027)__AFG25481.1__CSP
augaagaacuucauccugcucgccgugagcuccauucugcuugucgaccugcuccccacccacuuugagcauaauguugaucugucuagagcuaucaacgugaauggcgugagcuucaacaaugucgacacauccucucuuggggccgcucaggugcggcaaagcgcgucccgcggaagaggccugggggaaaaaccuaaggagggagaugacaaagaaaagaaaaaggagaaggaaaaagaggaggaaccgaagaaccucaaugagaacaaacccaagcagccuaaugccgaaggcgauggggccaaacugaagcagcccaacgcugagggagacggcgccaagcugaaacagccuaaugcugagggcgauggggccaagcucaaacaaccccaggcggaaggagacggcgccaacgcucggcagccucaggccgagggggauggagcuaaugcccgccaaccgcaggcggaaggcgacggggccaacgcuagacagccccaggccgagggagauggcgcuaaugcccggcaaccucaggccgaaggcgacggggcuaacgcgcgccagccccaagccgagggagauggcgcuaacgccagacagccucaggccgagggggacggagcuaaugcccggcagccccaagcggaaggcgacggggcuaacgcccgccagccgcaggccgagggagauggcgcuaaugccagacagccucaagcugaaggcgacggggccaacgcgcggcagccccaggccgagggaggcggggcuaaugcccgccagccucaagcugaaggagauggcgccaacgcgagacaggcccaggcucagggggacggcggaaaugcccggcaaggcgggaacggaggcggggcucccgccggaggcaaugaggggaacaagcaggccggcaaaggacagggccaaaauaaccagggggcuaaugcgcccaacgagaagguugugaaugauuaccugcagaaaauucgcucuagcgucacgaccgaauggacaccuugcuccgugaccuguggaaacggcguuagaauccggagacgcgcccacgcugacaagaagaaagccgaggaucuuacaauggacgaucuggaaguggaggccugcgucauggacaagugugcugggauuuuuaacguggugagcaauucucucggacuggucauccuucugguucucgcccuguucaacuga

SEQ ID NO: 5147 - RNA, 1188 nt, Artificial Sequence
  derived and/or modified CDS sequence (opt5) from Pk(UM0034C7)__AHF20657.1__CSP
augagaaacuucauccugcucgccgugagcuccauucugcuugucgaccugcuccccacccacuuugagcauaauguugaucugucucgggcuaucaacgugaauggcgugagcuucaacaaugucgacacauccucucuuggggccgcucaggugcgccaaagcgcguccagaggacggggccugggggaaaagcgcaaagagggagccgauaaggagaaaaagaaagaaaaggaagaggagccuaagaaaccgaacgaaaauaagcucaaacagcccaacccugaccagccccaggcccaaggcaauggggcuaacgccggacagccucaggcucagggcgauggcgccaaugcggggcaaccccaggcccagggagacggcgcuaacgccgggcagccucaagcucagggagauggcgccaaugcggggcagccgcaagcccagggagacggcgcuaacgccggccagccccaggcucaaggggauggagccaaugccggccagccucaggcucagggggacggagcgaacgccggccaaccccaggcucagggggauggagccaacgccggccagccucaagcucagggcgacggggccaaugcgggacagccccaggcucaaggcgauggggccaacgccggacagccgcaggcucaaggcgacggggccaaugcuggccagccucaggcccagggagacggcgcgaacgccgggcaaccccaggcucagggagauggcgccaaugcugggcagccucaagcccagggagacagagcgaacgccggccagccccaggcucaaggggauggcgccaauguuccccggcagggacgcaacggcgggggagcuccugccggcgggaaugagggaaacaagcaggccggcaaagggcaaggccagaauaaccagggagcuaaugcgccgaacgaaaagguggucaaugacuaccugcacaagauuagaucuagcgugacgaccgaguggacacccugcuccguuaccuguggcaacggggugcggauccgcagaaaagcccaugcuggaaacaagaaagccgaggaucugacaauggacgaucucgaagucgaggccugcgugauggacaagugugcuggcauuuuuaauguggucagcaacucucuggggcuuguuauccugcucgugcuggcccuuuucaauuga

SEQ ID NO: 5148 - RNA, 1185 nt, Artificial Sequence
  derived and/or modified CDS sequence (opt5) from Pk(KH225)__ADN94498.1__CSP
augaagaacuucauccugcucgccgugagcuccauucugcuugucgaccugcuccccacccacuuugagcauaauguugaucugucuagagcuaucaacgugaauggcgugagcuucaacaaugucgacacauccucucuuggggccgcgcaagugcggcaaagcgcuucccgcggaagaggccugggggaaaaaccuaaggagggagaugacaaagaaaagaaaaaggagaaggaaaaagaggaggaaccgaagaaccucaaugagaacaaacccaagcagccuaaugccgaaggcgauggggccaaacugaagcagcccaacgcugagggagacggcgccaagcugaaacagccuaaugcugagggcgaugggggaaacgcccggcaacccaaugcggaaggcgacgggggaaacgcccgccagccuaaugcugagggcgaugggggaaacgccagacagccgaacgcugaaggcgacggcgggaaugcccggcagcccaacgcggagggagauggcgggaaugcccgccaaccuaacgcugaaggagacggcgggaaugccagacagcccaacgcugagggagauggcggcaaugcccggcagccuaacgccgagggggacggaggcaaugcucgccagcccaacgcggaaggggacggaggcaaugccagacaaccgaacgcugagggggauggcggaaaugcccggcagccuaacgccgaaggcgacgggggaaaugcucgccagcccaacgccgagggcgaugggggaaacgcgagacaaccuaaugcugaaggcgacggggccaacgcccggcagccccaggcugagggcggaggcgggaaugcccgccagggaggcaacgaggggaauaagcaagcuggaaaaggccaggggcagaacaaucagggcgccaacgcgcccaaugaaaagguugugaacgauuaccuccagaaaauuagaucuagcgucacgaccgaguggacaccuugcuccgugaccuguggaaauggcguucggaucagacgccgggcccacgcugacaagaaaaaggccgaagaucugacaauggacgaucuugagguggaagcgugcgucauggacaagugugccgggauuuuuaacguggugagcaauucucugggacucgucauccugcuuguucuggcucucuucaacuga

SEQ ID NO: 5149 - RNA, 1179 nt, Artificial Sequence
  derived and/or modified CDS sequence (opt5) from Pk(UM001C7)__AHF20637.1__CSP
augaagaacuucauccugcucgccgugagcuccauucugcuugucgaccugcuccccacccacuuugagcauaauguugaucugucuagagcuaucaacgugaauggcgugagcuucaacaaugucgacacauccucucuuggggccgcucaggugcggcaaagcgcgucccgcggaagaggccugggggaaaaaccuaaggagggagccgauaaagaaaagaaaaaggagaagggcaaagaaaaggaggaggaaccgaaaaagcccaacgagaauaaacucaagcagccuaacgaagggcagccccaggcccaaggagacggcgcuaaugccggccagccucaggcucagggggauggagccaacgcgggccaaccccaggcccagggggacggagcuaaugccggccagccucaagcucagggggauggagccaacgcgggccagccgcaagcccagggcgacggggcuaaugccggacagccccaggcucaaggcgauggggccaacgccggacagccucaggcucagggcgacggggcgaaugccggacaaccccaggcucagggcgauggcgccaacggggacggagccaacgcuggccagccucaagcccagggggauggagcgaaugcuggccagccccaggcccaaggggacggcgccaacgcuggacagccgcaggcccaaggcgacggggcuaaugccggacagccucaggcgcagggcgauggggccaacgcuggacaaccccaggcccagggcgaccgggcuaaugccgggcagccucaagcgcagggcgauggagccaacguuccccgccagggcagaaaugggggaggcgcucccgccgggggaaacgagggcaauaagcaggcugggaaaggccaaggacagaacaaucagggcgccaacgccccuaaugagaagguggucaacgacuaccugcacaaaauucggucuagcgugacgaccgaauggacaccgugcuccguuaccugugggaauggagugcgcaucagacggaaggcucaugcgggcaacaaaaaggccgaggaucugacaauggacgaucucgaagucgaggcuugcgugauggacaaaugugccgggauuuuuaacguggucagcaauucucugggacuuguuauccugcucgugcuggcccuuuucaacuga

SEQ ID NO: 5150 - RNA, 1140 nt, Artificial Sequence
  derived and/or modified CDS sequence (opt5) from Pk(SGEHIWM4-Y09-15)__AFD97227.1__CSP
augaagaacuucauccugcucgccgugagcuccauucugcuugucgaccugcuccccaccuacuuugagcacaauguugaucugucuagagcugugaacgugaauggcgucagcuucaacuccguggacacaucuagccuuggggccgcgcagguucggcaauccgcuucucgcggaagaggccugggggaaaaaccuaaggagggagccgauaaagaaaagaaaaaggagaaggaaaaagaggaggaaccgaagaaacccaaugagaacaagcucaaacagccucagggcaaugggggagccggccaggcucaacccgaaggcaacgggggagccggccaggcucagccugaggggaauggaggcgccgggcaggcgcaacccgagggaaacggcggcgccgggcaggcucagccugaaggaaauggcggggccggacaggcucaaccggagggcaacgggggagccggccaggcgcagcccgaaggcaaugggggagccggccaagcucagccugaggggaacggaggcgccgggcaggcucagccccaaggcaauggaggcgccgggcaggcccagccucagggaaacggcggggcuggacaagcgcagccccagggcaacgggggcgccggacaggcucaaccgcagggcaaugggggagccggccaggcccagccugaagggaacggaggcgcugggcaagcccagccccagggcaauggaggcgcggggcaagcucagccugagggaaaccgggaggcccccgcccagccccagggcaaugggggagcuggccaagcccagccucagaagaacgaagggggcaaugcuggagcccgcaagggccaggggcaaaacagccagggagcgaaugccccgaacgagaaaguggucaaugacuaucugcagaagaucagauccagcgugacgaccgaauggacacccugcucuguuaccuguggcaacggggugcggauucgcagacgggcucaugccgauaaaaagaaagcuggagaccugacaauggaugaccucgaggucgaagccugcgugauggauaagugugcgggcaucuuuaaugccguguccaacagccugggccuugucauucugcucguucuggcucuuuucaauuga

SEQ ID NO: 5151 - RNA, 1140 nt, Artificial Sequence
  derived and/or modified CDS sequence (opt5) from Pk(UM002C3)__AHF20638.1__CSP
augaagaacuucauccugcucgccgugagcuccauucugcuugucgaccugcuccccaccuacuuugagcacaauguugaucugucuagagcuaucaacgugaauggcgugagcuucaacaaugucgacacauccucucuuggggccgcucaggugcggcaaagcgcgucccgcggaagaggccugggggaaaaaccuaaggagggagccgauaaagaaaagaaaaaggagaaggaaaaagagaaggaggaggaaccgaaaaagcccaacgaaaauaaacucaagcagccugagggcaacgggggagccggccccgcucagccugagggcaaugggggagccggccccgcucagccugaagggaacggaggcgccgggccggcgcaacccgagggaaauggcggcgccgggccugcucagcccgaaggaaacggcggggccggaccugcucagcccgagggcaaugggggagccggcccggcgcagccugaaggcaacgggggagccggccccgcucaaccugaggggaauggaggcgccgggcccgcucagcccgagggcaacggaggcgccgggccugcccagccgggaggccagguucaacauaaccggaaggaaaugggagggcaagugcagcacaaucgcaaagagaugggcgggcagguccagcauaaccacaaggaaaugggcggacaggugcagcauaaucacaaagagaugggcggggcuggacccgcgcaaccucagggcaacgggggagccggccccgcucagccucaggggaauggcggagccggccaagcccagccccagaagaacgaagggggaaaugcuggcgccagaaaagggcagggacaaaacaaucagggcgcgaacgcuccgaaugagaagguugugaacgacuaucugcagaaaauucggucuagcgucacgaccgaguggacaccuugcuccgugaccuguggggauggcgugcgcaucaagagacgggcccacgccgacaagaaaaaggcugaagaucugacaauggacgaucucgaggucgaagccugcguuauggacaaaugugcuggaauuuuuaauguggugagcaacucucugggccuugucauccugcucgugcuggcccuuuucaauuga

SEQ ID NO: 5152 - RNA, 1128 nt, Artificial Sequence
  derived and/or modified CDS sequence (opt5) from Pk(UM0021C6)__AHF20666.1__CSP
augagaaacuucauccugcucgccgugagcuccauucugcuugucgaccuguuucccacccacuucgagcauaauguugaucucucucgggcuaucaacgugaauggcgugagcuuuaacaaugucgacacauccucucugggggccgcucaggugcgccaaagcgcguccagaggacggggccuuggggaaaagccuaaagagggagccgauaaggagaaaaagaaagaaaagggcaaggaaaaagaggaggaaccgaagaaacccaacgagaauaagcugaaacagccuaacgaagggcagccccaggcccaaggagacggcgcuaaugccggccagccucaggcucagggggauggagccaacgcgggccaaccccaggcccagggggacggagcuaaugccggccagccucaagcucagggggauggagccaacgcgggccagccgcaagcccagggcgacggggcuaaugccggacagccccaggcucaaggcgauggggccaacgccggacagccucaggcucagggcgacggggcgaaugccggacaaccccaggcucagggcgauggcgccaacgccgggcagccucaagcucagggagacggcgccaacgcggggcagccccaggcucaaggagauggcgccaauacggggcagccgcaggcccaaggcgacggagcuaacgccggccagccucaggcucagggggaccgcgccaaugcgggacaaccccaggcccagggcgauggggcuaacguuccuagacagggacggaauggcgggggcgcccccgcuggaggcaacgaggggaauaagcaagccggaaagggccaggggcagaacaaucagggagcgaacgcccccaaugagaaaguggucaacgacuaccuccacaagauucgcucuagcgugaccacagaauggaccccuugcuccguuacauguggcaauggggugagaauccggcgcaaagcucaugccggcaacaagaaagcugaggaucugaccauggacgaucuggaagucgaggccugcgugauggacaagugugccggaauuuucaauguggucagcaacucucucggccugguuauccuucuggugcucgcucuguuuaacuga

SEQ ID NO: 5153 - RNA, 1128 nt, Artificial Sequence
  derived and/or modified CDS sequence (opt5) from Pk(UM0050C2)__AHF20664.1__CSP
augaagaacuucauccugcucgccgugagcuccauucugcuugucgaccugcuccccacccacuuugagcauaauguugaucugucuagagcuaucaacgugaauggcgugagcuucaacaaugucgacacauccucucuuggggccgcucaggugcggcaaagcgcgucccgcggaagaggccugggggaaaaaccuaaggagggagccgauaaagaaaagaaaaaggagaagggcaaagaaaaggaggaggaaccgaaaaagcccaacgagaauaaacucaagcagccuaacgaagggcagccccaggcccaaggagacggcgcuaaugccggccagccucaggcucagggggauggagccaacgcgggccaaccccaggcccagggggacggagcuaaugccggccagccucaagcucagggggauggagccaacgcgggccagccgcaagcccagggcgacggggcuaaugccggacagccccaggcucaaggcgauggggccaacgccggacagccucaggcucagggcgacggggcgaaugccggacaaccccaggcucagggcgauggcgccaacgccgggcagccucaagcucagggagacggcgccaacgcggggcagccccaggcucaaggagauggcgccaaugccgggcagccgcaggcucaaggcgacggagccaacgcuggccagccucaggcccagggggaccgggcgaaugccggacaaccccaggcucagggcgauggggccaacguuccucgccagggaagaaauggcgggggcgcucccgccggaggcaacgaggggaauaagcaagcgggaaaaggccaggggcagaacaaucagggagccaacgcucccaaugagaagguggucaacgacuaccugcacaaaauucggucuagcgugacgaccgaauggacaccuugcuccguuaccuguggcaauggggugcgcaucagacggaaggcccaugcuggcaacaaaaaggccgaggaucugacaauggacgaucucgaagucgaggccugcgugauggacaaaugugcuggaauuuuuaauguggucagcaacucucugggccuuguuauccugcucgugcuggcgcuuuucaacuga

SEQ ID NO: 5154 - RNA, 1128 nt, Artificial Sequence
  derived and/or modified CDS sequence (opt5) from Pk(UMMK569C20)__AHF20669.1__CSP
augaagaacuucauccugcucgccgugagcuccauucugcuugucgaccugcuccccacccacuuugagcauaauguugaucugucuagagcuaucaacgugaauggcgugagcuucaacaaugucgacacauccucucuuggggccgcucaggugcggcaaagcgcgucccgcggaagaggccugggggaaaaaccuaaggagggagccgauaaagaaaagaaaaaggagaagggcaaagaaaaggaggaggaaccgaaaaagcccaacgagaauaaacucaagcagccuaacgaagggcagccccaggcccaaggagacggcgcuaaugccggccagccucaggcucagggggauggagccaacgcgggccaaccccaggcccagggggacggagcuaaugccggccagccucaagcucagggggauggagccaacgcgggccagccgcaagcccggggcgacggggcuaaugccggacagccccaggcucagggcgauggggccaacgccggacaaccucaggcucagggcgacggggcgaaugccggacagccccaagcucagggcgauggcgccaacgccgggcagccucaggcucaaggagacggcgccaacgcggggcagccccaggcucagggagauggcgccaaugccgggcaaccgcaggcucagggcgacggagccaacgcuggccaaccucaggcccagggggaccgcgcgaaugccggacagccccaagcucagggcgauggggccaacguuccuagacagggacggaauggcgggggcgcucccgccggaggcaacgaggggaauaagcaggcgggaaaaggccaagggcagaacaaucagggagccaacgcucccaaugagaagguggucaacgacuaccugcacaaaauucgcucuagcgugacgaccgaauggacaccuugcuccguuaccuguggcaauggggugagaauccggcgcaaggcccaugcuggcaacaaaaaggccgaggaucugacaauggacgaucucgaagucgaggccugcgugauggacaaaugugcuggaauuuuuaauguggucagcaacucucugggccuuguuauccugcucgugcuggcgcuuuucaacuga

SEQ ID NO: 5155 - RNA, 1116 nt, Artificial Sequence
  derived and/or modified CDS sequence (opt5) from Pk(KH433)__ADN94489.1__CSP
augagaaacuucauccugcucgccgugagcuccauucugcuugucgaccugcuccccacccacuuugagcauaauguugaucugucucgggcuaucaacgugaauggcgugagcuucaacaaugucgacacauccucucuuggggccgcucaggugcgccaaagcgcguccagaggacggggccugggggaaaagcgcaaagagggagccgauaaggagaaaaagaaagaaaaggaagaggagccuaagaaaccgaacgaaaauaagcucaaacagcccaacccuggccagccccaggcccaaggggacggagcuaaugccggccagccucaggcucagggcgauggggccaacgcgggacaaccccaggcccagggcgacggggcuaaugccggacagccucaagcucagggcgauggggccaacgcgggacagccgcaagcccagggcgacggcgcuaaugccgggcagccccaggcucaaggagauggcgccaacgccgggcagccucaggcucagggagacggcgcgaaugccgggcaaccccaggcucagggagauggcgccaacgccggccagccucaagcucagggggacggagccaacgcgggccagccccaggcucaaggggauggagccaaugccggccagccgcaggcucaaggggacggcgccaacgcuggacagccucaggcccagggcgacagagcgaaugccgggcaaccccaggcucagggagauggcgccaacguuccucggcaggggcgcaauggaggcggggcucccgccggcggaaacgagggcaauaagcaagcggggaaaggacagggccagaacaaucagggggccaacgcucccaaugaaaagguggucaacgacuaccugcacaagauuagaucuagcgugacgaccgaguggacaccuugcuccguuaccuguggaaauggcgugcggauccgcagaaaagcccaugcugggaacaagaaagccgaggaucugacaauggacgaucucgaagucgaggccugcgugauggacaagugugcuggcauuuuuaauguggucagcaacucucugggacuuguuauccugcucgugcuggcgcuuuucaacuga

SEQ ID NO: 5156 - RNA, 1116 nt, Artificial Sequence
  derived and/or modified CDS sequence (opt5) from Pk(UM0034C10)__AHF20658.1__CSP
augagaaacuucauccugcucgccgugagcuccauucugcuugucgaccugcuccccacccacuuugagcauaauguugaucugucucgggcuaucaacgugaauggcgugagcuucaacaaugucgacacauccucucuuggggccgcucaggugcgccaaagcgcguccagaggacggggccugggggaaaagcgcaaagagggagccgauaaggagaaaaagaaagaaaaggaagaggagccuaagaaaccgaacgaaaauaagcucaaacagcccaacccugaccagccccaggcccaaggcgauggggcuaaugccggacagccucaggcucagggcgacggcgccaacgcggggcaaccccaggcccagggagauggcgcuaaugccgggcagccucaagcucagggagacggcgccaacgcggggcagccgcaagcccagggagauggcgcuaaugccggccagccccaggcucaaggggacggagccaacgccggccagccucaggcucagggggauggagcgaaugccggccaaccccaggcucagggggacggagccaacgccggccagccucaagcucagggcgauggggccaacgcgggacagccccaggcucaaggcgacggggccaaugccggacagccgcaggcucaaggcgacggggccaacgcuggccagccucaggcccagggagauagagcgaaugccggccaaccccaggcucagggggacggagccaacguuccucggcagggccgcaaugggggaggcgcucccgccgggggcaacgagggaaauaagcaagcgggcaaagggcagggacagaacaaucagggcgccaacgcucccaaugaaaagguggucaacgauuaccugcacaagauuagaucuagcgugacgaccgaguggacaccuugcuccguuaccugugggaauggagugcggauccgcagacggcaaaacgccggcaauaaaaaggcugaggaccugacaauggaugaccucgaagccgaggccugcgucauggauaaaugugcugggauuuuuaacguggugagcaacucucugggccuugucauccugcucguucuggcgcuuuucaauuga

SEQ ID NO: 5157 - RNA, 1116 nt, Artificial Sequence
  derived and/or modified CDS sequence (opt5) from Pk(UM0034C6)__AHF20656.1__CSP
augagaaacuucauccugcucgccgugagcuccauucugcuugucgaccugcuccccacccacuuugagcauaauguugaucugucucgggcuaucaacgugaauggcgugagcuucaacaaugucgacacauccucucuuggggccgcucaggugcgccaaagcgcguccagaggacggggccugggggaaaagcgcaaagagggagccgauaaggagaaaaagaaagaaaaggaagaggagccuaagaaaccgaacgaaaauaagcucaaacagcccaacccugaccagccccaggcccaaggcgauggggcuaaugccggacagccucaggcucagggcgacggcgccaacgcggggcaaccccaggcccagggagauggcgcuaaugccgggcagccucaagcucagggagacggcgccaacgcggggcagccgcaagcccagggagauggcgcuaaugccggccagccccaggcucaaggggacggagccaacgccggccagccucaggcucagggggauggagcgaaugccggccaaccccaggcucagggggacggagccaacgccggccagccucaagcucagggcgauggggccaacgcgggacagccccaggcucaaggcgacggggccaaugccggacagccgcaggcucaaggcgacggggccaacgcuggccagccucaggcccagggagauagagcgaaugccggccaaccccaggcucagggggacggagccaacguuccucggcagggccgcaaugggggaggcgcucccgccgggggcaacgagggaaauaagcaagcgggcaaagggcagggacagaacaaucagggcgccaacgcucccaaugaaaagguggucaacgauuaccugcacaagauuagaucuagcgugacgaccgaguggacaccuugcuccguuaccugugggaauggagugcggauccgcagaaaagcccaugcuggcaacaagaaagccgaggaccugacaauggaugaccucgaagucgaggccugcgugauggauaagugugcugggauuuuuaauguggucagcaacucucugggccuuguuauccugcucgugcuggcgcuuuucaacuga

SEQ ID NO: 5158 - RNA, 1107 nt, Artificial Sequence
  derived and/or modified CDS sequence (opt5) from Pk(SGEHIWM16-Y09-85)__AFD97232.1__CSP
augaagaacuucauccugcucgccgugagcuccauucugcuugucgaccugcuccccaccuacuuugagcacaauguugaucugucuagagcuaucaacgugaauggcgugagcuucaacuccgucgacacaucuagccuuggggccgcucaggugcggcaauccgcgucucgcggaagaggccugggggaaaaaccuaaggagggagccgauaaagaaaagaaaaaggagaaggaaaaagaggaggaaccgaagaaacccaaugagaacaagcucaaacagccucagggcaaugggggagccggccaggcucaacccgaaggcaacgggggagccggccaggcucagccugaggggaauggaggcgccgggcaggcgcaacccgagggaaacggcggcgccgggcaggcucagccugaaggaaauggcggggccggacaggcucaaccggagggcaacgggggagccggccaggcgcagcccgaaggcaaugggggagccggccaagcucagccugaggggaacggaggcgccgggcaggcucagcccgaaggcaauggaggcgccgggcaagcccagccugagggaaacggcggggcuggacaggcgcagccccaaggcaacgggggcgccggacaggcucagccgcagggcaaugggggagccggccaagcccagccucaggggaacggaggcgcugggcaggcccaacccgagggcaaucgggaagcgccugcucagccccagggaaacggcggggccggacaagcccagccccagaagaaugagggcgggaacgcuggagcccgcaagggccaggggcaaaauaaccagggcgcuaaugccccuaacgaaaaaguugugaaugacuaucugcagaagauuagaagcuccgucacgaccgaguggacaccgugcagcgugaccuguggaaacggcguucggauccgcagacgggcgcaugccgauaaaaagaaagcugaagaccugacaauggaugaccucgagguggaggccugcgucauggauaagugugcugggauuuuuaauguggugucuaacucccugggacuugucauccugcucguucuggcccuuuucaauuga

SEQ ID NO: 5159 - RNA, 1107 nt, Artificial Sequence
  derived and/or modified CDS sequence (opt5) from Pk(SGEHIWM4-Y09-13)__AFD97225.1__CSP
augaagaacuucauccugcucgccgugagcuccauucugcuugucgaccugcuccccaccuacuuugagcacaauguugaucugucuagagcuaucaacgugaauggcgugagcuucaacuccgucgacacaucuagccuuggggccgcucaggugcggcaauccgcgucucgcggaagaggccugggggaaaaaccuaaggagggagccgauaaagaaaagaaaaaggagaaggaaaaagaggaggaaccgaagaaacccaaugagaacaagcucaaacagccucagggcaaugggggagccggccaggcucaacccgaaggcaacgggggagccggccaggcucagccugaggggaauggaggcgccgggcaggcgcaacccgagggaaacggcggcgccgggcaggcucagccugaaggaaauggcggggccggacaggcucaaccggagggcaacgggggagccggccaggcgcagcccgaaggcaaugggggagccggccaagcucagccugaggggaacggaggcgccgggcaggcucagcccgaaggcaauggaggcgccgggcaagcccagccugagggaaacggcggggcuggacaggcgcagccccaaggcaacgggggcgccggacaggcucagccgcagggcaaugggggagccggccaagcccagccucaggggaacggaggcgcugggcaggcccaacccgagggcaaucgggaagcgccugcucagccccagggaaacggcggggccggacaagcccagccccagaagaaugagggcgggaacgcuggagcccgcaagggccaggggcaaaauaaccagggcgcuaaugccccuaacgaaaaaguugugaaugacuaucugcagaagauuagaagcuccgucacgaccgaguggacaccgugcagcgugaccuguggaaacggcguucggauccgcagacgggcgcaugccgauaaaaagaaagcugaagaccugacaguggaugaccucgaggucgaggccugcgugauggauaagugugcugggauuuuuaauguggucucuaacucccugggacuuguuauccugcucgugcuggcccuuuucaauuga

SEQ ID NO: 5160 - RNA, 1104 nt, Artificial Sequence
  derived and/or modified CDS sequence (opt5) from Pk(KH58)__ADN94493.1__CSP
augaagaacuucauccugcucgccgugagcuccauucugcuugucgaccugcuccccacccacuuugagcauaauguugaucugucuagagcuaucaacauuaauggcgugagcuucaacaauguggacacauccucucuuggggccgcgcagguccggcaaagcgcuucccgcggaagaggccugggggaaaaaccuaaggagggagccgauaaagaaaagaaaaaggagaaggaaaaagaggaggaaccgaagaaacccaacgagaauaagcucaaacagccuaacgccgaaggcgacggggcuaaugcccggcagcccaacgcugagggagauggcgccaaugcgcgccagccuaacgccgagggcgacggggcuaaugccagacaacccaacgcugaaggagauggcgccaaugcgcggcagccuaacgccgagggggacggagcuaacgcccgccagccgaaugcugaaggcgauggggccaacgccagacagcccaaugcugagggagacggcgcgaacgcccggcaaccuaaugcugaaggcgauggggccaacgcccgccagcccaaugcugagggagacggcgccaacgcgagacagccuaaugcugagggggauggagccaacgcccggcagcccaaugcugaaggcgggggagccaacgcucgccaaccgaaugccgagggcgacggcgcgaacgccagacagccucaggcucaaggggacggaggcaaugcccggcaagggggaaacggcgggggcgcucccgccggaggcaacgaagggaauaagcaggcgggaaagggccaggggcagaacaaucagggagccaacgcuccuaaugagaaagugguuaacgauuaccugcagaagauccgcucuagcgugacgaccgaauggacacccugcuccgucaccuguggcaauggggugcggauuagaagacgcgcccacgcugacaaaaagaaagccgaggaucugacaauggacgaucucgagguugaagccugcgugauggacaagugugcuggcaucuuuaacgucgugagcaauucucugggacuugugauccugcucguccuggcgcuuuucaacuga

SEQ ID NO: 5161 - RNA, 1104 nt, Artificial Sequence
  derived and/or modified CDS sequence (opt5) from Pk(UM0029C8)__AHF20651.1__CSP
augaagaacuucauccugcucgccgugagcuccauucugcuugucgaccugcuccccacccacuuugagcauaauguugaucugucuagagcuaucaacgugaauggcgugagcuucaacaaugucgacacauccucucuuggggccgcucaggugcggcaaagcgcgucccgcggaagaggccugggggaaaaaccuaaggagggagccgauaaagaaaagaaaaaggagaaggaaaaagagaaggaggaggaaccgaaaaagcccaacgaaaauaaacucaagcagccugagcagcccgccgcuggcgccgggggagagcagccugcugccggcgcgggcggggaacaacccgccgcuggagccggcggggagcagccugcugccggagcgggcggggaacagccggccgcuggagcccggggcgagcagcccgcugccggcgccgggggagaacaaccugcugcgggcgcccgcggggagcagcccgcugccggagccggcggggagcagccugcugccggagcgggcggcgaacagcccgcugccggggccggaggcgagcaaccggcugccgggggagaacagccugcugccggcgccgggggcgagcagcccgcggcuggagccagaggcgaacaaccugcugccggggcgggaggcgagcagcccgcccccgcuccucggcgcgagcagccggccgcuggggccggaggcgaacagcccgccccugcucccagacgggagcaaccugcgcccggggccggcgcuggagacggcgcccgcgggggaaacgccggcgcugggaagggacagggccagaauaaccagggggccaauguuccgaacgaaaaaguggucaaugauuaccugcacaagauuagaucuagcgugacgaccgaguggacaccuugcuccguuaccuguggcaacggagugcggauccgcagaaaaggccaugcggggaauaagaaagcugaagaccugacaauggaugaccucgaggucgaggccugcgugauggauaagugugccggaauuuuuaacguggucagcaacucucugggccuuguuauccugcucgugcuggcucuuuucaauuga

SEQ ID NO: 5162 - RNA, 1104 nt, Artificial Sequence
  derived and/or modified CDS sequence (opt5) from Pk(UM0032C8)__AHF20655.1__CSP
augaagaacuucauccugcucgccgugagcuccauucugcuugucgaccugcuccccacccacuuugagcauaauguugaucugucuagagcuaucaacgugaauggcgugagcuucaacaaugucgacacauccucucuuggggccgcucaggugcggcaaagcgcgucccgcggaagaggccugggggaaaaaccuaaggagggagccgauaaagaaaagaaaaaggagaaggaaaaagaggaggaaccgaagaaacccaacgagaauaagcucaaacagccuaacgccgaaggcgacggggcuaaugcccggcagcccaacgcugagggagauggcgccaaugcgcgccagccuaacgccgagggcgacggggcuaaugccagacaacccaacgcugaaggagauggcgccaaugcgcggcagccuaacgccgagggggacggagcuaacgcccgccagccgaaugcugaaggcgauggggccaacgccagacagcccaaugcugagggaaacggcgcgaaugcccggcaaccuaacgcugaaggcgggggagccaaugcccgccagcccaacgcugagggcgacggggccaaugcgagacagccuaacgcugagggagauggcgccaaugcccggcagcccaacgcugaagggggaggcgccaaugcucgccaaccgcaggccgagggcgacggggcgaacgccagacagccucaagcucagggagauggcgggaaugcccggcagggaggcaacgggggcggagcucccgccggcgggaacgaaggaaauaagcaggcgggcaaggggcaaggacagaacaaucagggcgccaacgcuccuaaugagaaaguugugaacgacuaccugcagaagauucgcucuagcgucacgaccgaauggacacccugcuccgugaccugugggaauggcguuagaauccggagacgcgcccacgcugacaaaaagaaagccgaggaucugacaauggacgaucucgagguggaagccugcgucauggacaagugugcuggaauuuuuaacguggugagcaauucucugggcuucgucauccuucugguucucgcgcuguuuaacuga

SEQ ID NO: 5163 - RNA, 1101 nt, Artificial Sequence
  derived and/or modified CDS sequence (opt5) from Pk(LT22)__ADN94538.1__CSP
augagaaacuucauccugcucgccgugagcuccauucugcuugucgaccugcuccccacccacuuugagcauaauguugaucugucucgggcuaucaacgugaauggcgugagcuucaacaaugucgacacauccucucuuggggccgcucaggugcgccaaagcgcguccagaggacggggccugggggaaaagcgcaaagagggagccgauaaggagaaaaagaaagagaaggaagaggagccuaagaaaccgaacgaaaauaagcucaaacagcccaacgccgagggcggggcuaaugccggacagccuaacgcugaaggcggcgccaaugcggggcagcccaacgccgagggaggcgcuaaugccgggcaaccuaacgcugagggaggcgccaaugcggggcagcccaacgccgaaggaggcgcuaacgccggccagccuaaugcugagggaggggccaacgccggccagccgaaugcugaagggggagcgaacgccggccaacccaaugcugagggaggggccaacgccggccagccuaaugcugaaggcggggccaacgcgggacagcccaaugcugagggcggggccaacgccggacagccuaaugcugagggcggggccaacgcuagacaacccaaugccgaaggcggagcgaacgccggccagccgaaugcugaagggggagccaacgcuggccagccuaacgccgaagggggagcgaaugcccggcaaccccaggcugagggcgggggcgccaacgcucgccagggaggcaaugaagggaacaagcaggccggaaaaggccaagggcagaauaaccagggagccaaugcuccuaacgagaagguugugaaugacuaccugcagaagauuagaucuagcgucacgaccgaguggacacccugcuccgugaccuguggcaacgggguucggauccgcagacgggcgcacgccgauaaaaagaaagcugaagaccugacaauggaugaccucgagguggaagccugcgucauggauaagugugccggcauuuuuaauguggugagcaacucucugggacuugucauccugcucguucuggcucuuuucaauuga

SEQ ID NO: 5164 - RNA, 1101 nt, Artificial Sequence
  derived and/or modified CDS sequence (opt5) from Pk(LT26)__ADN94539.1__CSP
augagaaacuucauccugcucgccgugagcuccauucugcuugucgaccugcuccccacccacuuugagcauaauguugaucugucucgggcuaucaacgugaauggcgugagcuucaacaaugucgacacauccucucuuggggccgcucaggugcgccaaagcgcguccagaggacggggccugggggaaaagcgcaaagagggagccgauaaggagaaaaagaaagagaaggaagaggagccuaagaaaccgaacgaaaauaagcucaaacagcccaacgccgagggcggggcuaaugccggacagccuaacgcugaaggcggcgccaaugcggggcagcccaacgccgagggaggcgcuaaugccgggcaaccuaacgcugagggaggcgccaaugcggggcagcccaacgccgaaggaggcgcuaacgccggccagccuaaugcugagggaggggccaacgccggccagccgaaugcugaagggggagcgaacgccggccaacccaaugcugagggaggggccaacgccagacagccuaaugcugaaggcggcgccaacgcggggcagcccaaugcugagggaggcgccaacgccgggcagccuaaugcugagggaggcgccaacgcugggcaacccaaugccgaaggcggagcgaacgccggccagccgaaugcugaagggggagccaacgcuggccagccuaacgccgaagggggagcgaaugcccggcaaccccaggcugagggcgggggcgccaacgcucgccagggaggcaaugaagggaacaagcaggccggaaaaggccaagggcagaauaaccagggagccaaugcuccuaacgagaagguugugaaugacuaccugcagaagauuagaucuagcgucacgaccgaguggacacccugcuccgugaccuguggcaacgggguucggauccgcagacgggcgcacgccgauaaaaagaaagcugaagaccugacaauggaugaccucgagguggaagccugcgucauggauaagugugccggcauuuuuaauguggugagcaacucucugggacuugucauccugcucguucuggcucuuuucaauuga

SEQ ID NO: 5165 - RNA, 1101 nt, Artificial Sequence
  derived and/or modified CDS sequence (opt5) from Pk(TB013)__AFG25472.1__CSP
augagaaacuucauccugcucgccgugagcuccauucugcuugucgaccugcuccccacccacuuugagcauaauguugaucugucucgggcuaucaacgugaauggcgugagcuucaacaaugucgacacauccucucuuggggccgcucaggugcgccaaagcgcgggaagaggccgggggcugggagaaaagcgcaaagagggcgccgauaaggagaaaaagaaagagaaggaagaggagccuaagaaaccgaacgaaaauaagcucaaacagcccaacgccgagggaggggcuaaugccggccagccuaacgcugaaggcggggccaaugcgggacagcccaacgccgagggcggggcuaaugccggacaaccuaacgcugagggcggggccaaugcgggacagcccaacgccgaaggcggcgcuaacgccgggcagccuaaugcugagggaggcgccaacgccgggcagccgaaugcugaaggaggcgcgaacgccgggcaacccaaugcugagggaggcgccaacgccggccagccuaaugcugaagggggagccaacgcgggccagcccaaugcugagggaggggccaacgccagacagccuaaugcugagggcggggccaacgcucggcaacccaaugccgaaggcggagcgaacgccggccagccgaaugcugaagggggagccaacgcuggccagccuaacgccgaagggggagcgaaugcccgccaaccccaggcugagggcgggggcgccaacgcuagacagggaggcaaugaagggaacaagcaggccggaaaaggccaagggcagaauaaccagggagccaaugcuccuaacgagaagguugugaaugacuaccugcagaagauucgguccucugucacgaccgaguggacacccugcagcgugaccuguggcaacgggguucgcaucagacggcgcgcgcacgccgauaaaaagaaagcugaagaccugacaauggaugaccucgagguggaagccugcgucauggauaagugugccggcauuuuuaaugugguguccaacagccugggacuugucauccugcucguucuggcucuuuucaauuga

SEQ ID NO: 5166 - RNA, 1101 nt, Artificial Sequence
  derived and/or modified CDS sequence (opt5) from Pk(TB049)__AFG25474.1__CSP
augagaaacuucauccugcucgccgugagcuccauucugcuugucgaccugcuccccacccacuuugagcauaauguugaucugucucgggcuaucaacgugaauggcgugagcuucaacaaugucgacacauccucucuuggggccgcucaggugcgccaaagcgcguccagaggacggggccugggggaaaagcgcaaagagggagccgauaaggagaaaaagaaagagaaggaagaggagccuaagaaaccgaacgaaaauaagcucaaacagcccaacgccgagggcggggcuaaugccggacagccuaacgcugaaggcggcgccaaugcggggcagcccaacgccgagggaggcgcuaaugccgggcaaccuaacgcugagggaggcgccaaugcggggcagcccaacgccgaaggaggcgcuaacgccggccagccuaaugcugaagggggagccaacgccggccagccgaaugcugaagggggagcgaacgccggccaacccaaugcugaagggggagccaacgccagacagccuaaugcugagggcggcgccaacgcggggcagcccaaugcugagggaggcgccaacgccgggcagccuaaugcugagggaggcgccaacgcucggcaacccaaugccgaagggggcgcgaacgcccgccagccgaaugcugagggaggcgccaacgcugggcagccuaacgccgaaggaggcgcgaaugccagacaaccccaggcugaagggggaggcgccaacgcucggcaagggggcaaugagggaaacaagcaggccggcaaagggcagggacagaauaaccagggcgccaaugcuccuaacgagaagguugugaaugacuaccugcagaagauucgcucuagcgucacgaccgaguggacacccugcuccgugaccugugggaacggaguuagaauccggcgcagagcgcacgccgauaaaaagaaagcugaagaccugacaauggaugaccucgagguggaagccugcgucauggauaagugugccggcauuuuuaauguggugagcaacucucuggggcuugucauccugcucguucuggcucuuuucaauuga

SEQ ID NO: 5167 - RNA, 1101 nt, Artificial Sequence
  derived and/or modified CDS sequence (opt5) from Pk(TN024)__AFG25479.1__CSP
augagaaacuucauccugcucgccgugagcuccauucugcuugucgaccugcuccccacccacuuugagcauaauguugaucugucucgggcuaucaacgugaauggcgugagcuucaacaaugucgacacauccucucuuggggccgcucaggugcgccaaagcgcguccagaggacggggccugggggaacgcagaaaggagggagccgauaaagaaaagaaaaaggagaaagaagaggagccuaagaagccgaacgaaaauaaacucaagcagcccaacgccgagggcggggcuaaugccggacagccuaacgcugaaggcggcgccaaugcggggcagcccaacgccgagggaggcgcuaaugccgggcaaccuaacgcugagggaggcgccaaugcggggcagcccaacgccgaaggaggcgcuaacgccggccagccuaaugcugagggaggggccaacgccggccagccgaaugcugaagggggagcgaacgccggccaacccaaugcugaagggggagccaacgcccggcagccuaaugcugagggcggcgccaacgcggggcagcccaaugcugagggaggcgccaacgccgggcagccuaaugcugagggaggcgccaacgcucgccaacccaaugccgaagggggcgcgaacgccagacagccgaaugcugagggaggcgccaacgcugggcagccuaacgccgaaggaggcgcgaaugcccggcaaccccaggcugaagggggaggcgccaacgcucgccaagggggcaaugagggaaacaaacaggccggcaaggggcagggacagaauaaccagggcgccaaugcuccuaacgagaaaguugugaaugacuaccugcagaagauuagaucuagcgucacgaccgaguggacacccugcuccgugaccugugggaacggaguucggauccgcagacgggcgcacgccgauaagaaaaaggcugaagaccugacaauggaugaccucgagguggaagccugcgucauggauaaaugugccggcauuuuuaauguggugagcaacucucuggggcuugucauccugcucguucuggcucuuuucaauuga

SEQ ID NO: 5168 - RNA, 1095 nt, Artificial Sequence
  derived and/or modified CDS sequence (opt5) from Pk(KH369)__ADN94494.1__CSP
augaagaacuucauccugcucgccgugagcuccauucugcuugucgaccuguuucccacccacuucgagcauaauguugaucucucuagagcuaucaacgugaauggcgugagcuuuaacaaugucgacacauccucucugggggccgcucaggugcggcaaagcgcgucccgcggaagaggccuuggggaaaaaccuaaggagggagccgauaaagaaaagaaaaaggagaaggaggaaccgaaaaagcccaacgagaauaaacugaagcagccucaggccgaaggcgacggggcuaacgcccggcagccccaagcugagggagauggcgccaaugcgcgccagccucaggccgaaggcgacggggcuaacgccagacagccccaagcugagggagauggcgccaaugcgcggcagccucaggccgagggggacggagcuaacgcccgccagccgcaagcugaaggcgauggggccaaugccagacagccccaggcugagggagacggcgcgaacgcccggcaaccucaggcugaaggcgauggggccaaugcccgccagccccaggcugagggagacggcgccaacgcgagacaaccucaggcugaaggggauggagccaacgcccggcagccccaggcugagggcgggggagccaaugcucgccaaccgcaggccgagggcgacggcgcgaacgccagacagccucaggcucaaggggacggaggcaaugcccggcaagggggaaacggcgggggcgcucccgccggaggcaaugaagggaacaaacaggcgggaaagggccaggggcagaauaaccagggagccaaugcuccuaacgagaagguugugaaugauuaccuccagaaaauucgcucuagcgucacgaccgaauggacacccugcuccgugaccuguggcaacgggguuagaauccggagacgcgcccacgcugacaagaaaaaggccgaggaucugacaauggacgaucuggaaguggaggccugcgucauggacaaaugugcuggcauuuucaauguggugagcaacucucucggacuggucauccuucugguucucgcgcuguuuaauuga

SEQ ID NO: 5169 - RNA, 1095 nt, Artificial Sequence
  derived and/or modified CDS sequence (opt5) from Pk(LT48)__ADN94507.1__CSP
augaagaacuucauccugcucgccgugagcuccauucugcuugucgaccugcuccccacccacuuugagcauaauguugaucugucuagagcuaucaacauuaauggcgugagcuucaacaauguggacacauccucucuuggggccgcgcagguccggcaaagcgcuucccgcggaagaggccugggggaaaaaccuaaggagggagccgauaaagaaaagaaaaaggagaaggaggaaccgaaaaagcccaacgagaauaaacucaagcagccucaggccgaaggcgacggggcuaacgcccggcagccccaagcugagggagauggcgccaaugcgcgccagccucaggccgaaggcgacggggcuaacgccagacagccccaagcugagggagauggcgccaaugcgcggcagccucaggccgagggggacggagcuaacgcccgccagccgcaagcugaaggcgauggggccaaugccagacagccccaggcugagggagacggcgcgaacgcccggcaaccucaggcugaaggcgauggggccaaugcccgccagccccaggcugagggagacggcgccaacgcgagacaaccucaggcugaaggggauggagccaacgcccggcagccccaggcugagggcgggggagccaaugcucgccaaccgcaggccgagggcgacggcgcgaacgccagacagccucaggcucaaggggacggaggcaaugcccggcaagggggaaacggcgggggcgcucccgccggaggcaaugaagggaacaaacaggcgggaaagggccaggggcagaauaaccagggagccaaugcuccuaacgagaaggugguuaaugauuaccugcagaaaauccgcucuagcgugacgaccgaauggacacccugcuccgucaccuguggcaacggggugcggauuagaagacgcgcccacgcugacaagaaaaaggccgaggaucugacaauggacgaucucgaaguugaggccugcgugauggacaaaugugcuggcaucuuuaaugucgugagcaacucucugggacuugugauccugcucguccuggcgcuuuucaauuga

SEQ ID NO: 5170 - RNA, 1092 nt, Artificial Sequence
  derived and/or modified CDS sequence (opt5) from Pk(LT22)__ADN94522.1__CSP
augagaaacuucauccugcucgccgugagcuccauucugcuugucgaccugcuccccacccacuuugagcauaauguugaucugucucgggcuaucaacgugaauggcgugagcuucaacaaugucgacacauccucucuuggggccgcucaggugcgccaaagcgcguccagaggacggggccugggggaaaagcgcaaagagggagccgauaaggagaaaaagaaagaaaaggaagaggagccuaagaaaccgaacgaaaauaagcucaaacagcccgaccaggccggcccugggggagagcaggcuggccccggcggggaacaagccggaccuggcggggagcaggcuggacccagaccuggcggggagcaggccggaccgggcggcgaacaggcggggccccggccuggaggcgagcaagccgggcccggaggcgaacaggcugggccucgccccggaggcgagcaggccggcccgggaggggaacaggcuggcccugggggagagcaagccggccccagaccugggggcgagcaggcgggacccggcggggaacaggccggaccccggccuggcggggagcaagcuggaccgggcggggaacaggccggcccccgcccuggaggcgagcaggcugggcccggaggcgaacagccugcccccagaccugggggagagcaaccggcccccgcuccucggcgcgagcagcccgcgccugcccccggcggggaacagccggcuccuggcgccggagccggcgauggggcuagaggaggcaaccccggggccggaaagggccaggggcaaaauaaccagggcgcgaauguucccaacgagaaaguggucaaugacuaccugcacaagauucggucuagcgugacgaccgaauggacaccuugcuccguuaccuguggaaacggcgugcgcaucagacggagacagaaugcugggaacaagaaagccgaggaucugacaauggacgaucucgaagucgaggccugcgugauggacaagugugcuggaauuuuuaacguggucagcaauucucugggccuuguuauccugcucgugcuggcccuuuucaacuga

SEQ ID NO: 5171 - RNA, 1092 nt, Artificial Sequence
  derived and/or modified CDS sequence (opt5) from Pk(UM0020C1)__AHF20649.1__CSP
augaagaacuucauccugcucgccgugagcuccauucugcuugucgaccugcuccccacccacuuugagcauaauguugaucugucuagagcuaucaacgugaauggcgugagcuucaacaaugucgacacauccucucuuggggccagccaggugcggcaauccgcgucucgcggaagaggccugggggaaaaaccuaaggagggagcugauaaagaaaagaaaaaggagaagggcaaagaaaaggaggaggaaccgaaaaagcccaacgagaauaaacucaagcagccuaacgaagggcagccccaggcccaaggagacggcgccaaugcuggccagccucaggcccagggggauggagcuaacgccggccaaccccaggcgcagggggacggagccaaugcuggccagccucaagcccagggggauggagcuaacgccggccagccgcaagcgcagggcgacggggccaaugcuggacagccccaggcccaaggcgauggggcuaacgccggacagccucaggcccagggcgacggggcuaaugcgggacaaccccaggcccagggcgauggcgcuaacgccgggcagccucaagcccagggagacggcgcuaacgccgggcagccccaggcgcaaggagauggcgcuaaugccgggcagccgcaggcccaaggcgaccgggcuaacgccggacagccucaggcucagggcgacggggccaauguuccccgccaaggaagaaacggcgggggagcgccugccggcgggaaugagggcaacaagcaggcuggaaaaggccaggggcagaauaaccaaggagccaaugcucccaacgagaagguggucaaugauuaccugcacaaaauucggagcuccgugacgaccgaauggacacccugcagcguuaccuguggcaacggggugcgcaucagacggcgccagaaugccggaaacaagaaagcggaggaccugacaauggaugaccucgaagucgaggccugcgugauggauaagugugcuggcauuuuuaauguggucucuaacucccuggggcuuguuauccugcucgugcuggcccuuuucaacuga

SEQ ID NO: 5172 - RNA, 1092 nt, Artificial Sequence
  derived and/or modified CDS sequence (opt5) from Pk(UM0020C3)__AHF20650.1__CSP
augaagaacuucauccugcucgccgugagcuccauucugcuugucgaccugcuccccacccacuuugagcauaauguugaucugucuagagcuaucaacgugaauggcgugggguucaacaaugucgacacaagcucccuuggagccucucaggugcggcaaagcgcgucccgcggcagagggcugggagaaaaaccuaaggagggcgcugauaaagaaaagaaaaaggagaaggggaaagaaaaggaggaggaaccgaaaaagcccaacgagaauaaacucaagcagccuaacgaaggacagccccaggcccaaggcgacggcgccaaugcugggcagccucaggcccagggagauggcgcuaacgccgggcaaccccaggcgcagggagacggcgccaaugcugggcagccucaagcccagggagauggcgcuaacgccggccagccgcaagcgcagggggacggagccaaugcuggccagccccaggcccaaggggauggagcuaacgccggccagccucaggcccagggggacggagcuaaugcgggccaaccccaggcccagggcgauggggcuaacgccggacagccucaagcccagggcgacggggcuaacgccggacagccccaggcgcaaggcgauggggcuaaugccggccagccgcaggcccaaggagaccgggcuaacgccggccagccucaggcucagggggacggagccaauguuccccgccaaggcagaaacgggggaggcgcgccugccgggggcaaugagggaaacaagcaggcuggcaaagggcagggacagaauaaccaaggcgccaaugcucccaacgagaagguggucaaugauuaccugcacaaaauucggucuagcgugacgaccgaauggacacccugcuccguuaccugugggaacggagugcgcaucagacggaaggcccaugcgggcaauaaaaaggccgaggaccugacaauggaugaccucgaagucgaggcuugcgugauggauaaaugugccgggauuuuuaacguggucagcaauucucugggccuuguuauccugcucgugcuggcucuuuucaacuga

SEQ ID NO: 5173 - RNA, 1092 nt, Artificial Sequence
  derived and/or modified CDS sequence (opt5) from Pk(UM0021C19)__AHF20668.1__CSP
augagaaacuucauccugcucgccgugagcuccauucugcuugucgaccuguuucccacccacuucgagcauaauguugaucucucucgggcuaucaacgugaauggcgugagcuuuaacaaugucgacacauccucucugggggccgcucaggugcgccaaagcgcguccagaggacggggccuuggggaaaagcgcaaagagggagccgauaaggagaaaaagaaagaaaaggaagaggagccuaagaaaccgaacgaaaauaagcugaaacagcccgaccaggccggcccugggggagagcaggcuggccccggcggggaacaagccggaccuggcggggagcaggcuggacccggcggggagcaggccggaccuagaccgggcggcgaacaggcggggcccggaggcgagcaagccgggccucggcccggaggcgaacaggcugggccucgccccggaggcgagcaggccggcccgagaccugggggagaacaggcuggccccgggggagagcaagccggcccugggggcgagcaggcgggacccggcggggaacaggccggaccccggccuggcggggagcaagcuggaccgggcggggaacaggccggcccccgcccuggaggcgagcaggcugggcccggaggcgaacagccugcccccagaccugggggagagcaaccggcccccgcuccucggcgcgagcagcccgcgccuggccccgggggcgaacagccggccccuggagcuggcgccggggauggagccagaggcgggaaccccggagcuggcaaggggcagggccaaaauaaccagggagccaauguucccaacgagaaaguggucaaugacuaccuccacaagauucggucuagcgugacgaccgaauggacaccuugcuccguuaccuguggcaacggggugcgcaucagacggagacagaaugcgggaaacaagaaagcugaggaucugacaauggacgaucuggaagucgaggccugcgugauggacaagugugccggcauuuucaacguggucagcaauucucucgggcugguuacccuucuggugcucgcucuguuuaacuga

SEQ ID NO: 5174 - RNA, 1092 nt, Artificial Sequence
  derived and/or modified CDS sequence (opt5) from Pk(UMGAC7)__AHF20617.1__CSP
augaagaacuucauccugcucgccgugagcuccauucugcuugucgaccugcuccccacccacuuugagcauaauguugaucugucuagagcuaucaacgugaauggcgugagcuucaacaaugucgacacauccucucuuggggccgcucaggugcggcaaagcgcgucccgcggaagaggccugggggaaaaaccuaaggagggagccgauaaagaaaagaaaaaggagaagggcaaagaaaaggaggaggaaccgaaaaagcccaacgagaauaaacucaagcagccuaacgaagggcagccccaggcccaaggagacggcgcuaaugccggccagccucaggcucagggggauggagccaacgcgggccaaccccaggcccagggggacggagcuaaugccggccagccucaagcucagggggauggagccaacgcgggccagccgcaagcccagggcgacggggcuaaugccggacagccccaggcucaaggcgauggggccaacgccggacagccucaggcucagggcgacggggcgaaugccggacaaccccaggcucagggcgauggcgccaacgccgggcagccucaagcucagggagacggcgccaacgcggggcagccccaggcucaaggagauggcgccaaugccgggcagccgcaggcucaaggcgaccgggccaacgcuggacagccucaggcccagggcgacggggcgaauguuccccgccaaggaagaaacggcgggggagccccugcuggcgggaaugagggcaacaagcaggccggaaaaggccaggggcagaauaaccaaggagcuaaugcccccaacgagaagguggucaaugauuaccugcacaaaauucggucuagcgugacgaccgaauggacacccugcuccguuaccuguggcaacggggugcgcaucagacggaaggcgcaugccggaaauaaaaaggcugaggaccugacaauggaugaccucgaagucgaggccugcgugauggauaaaugugcuggcauuuuuaacguggucagcaauucucuggggcuuguuauccugcucgugccugcccuguucaacuga

SEQ ID NO: 5175 - RNA, 1092 nt, Artificial Sequence
  derived and/or modified CDS sequence (opt5) from Pk(UMMK566C6)__AHF20670.1__CSP
augaagaacuucauccugcucgccgugagcuccauucugcuugucgaccugcuccccacccacuuugagcauaauguugaucugucuagagcuaucaacgugaauggcgugagcuucaacaaugucgacacauccucucuuggggccgcucaggugcggcaaagcgcgucccgcggaagaggccugggggaaaaaccuaaggagggagccgauaaagaaaagaaaaaggagaagggcaaagaaaaggagggggagccgaaaaagcccaacgaaaauaaacucaagcagccuaacgagggacagccccaggcccaaggcgacggcgcuaaugccgggcagccucaggcucagggagauggcgccaacgcggggcaaccccaggcccagggagacggcgcuaaugccgggcagccucaagcucagggagauggcgccaacgcgggccagccgcaagcccagggggacggagcuaaugccggccagccccaggcucaaggggauggagccaacgccggccagccucaggcucagggggacggagcgaaugccggccaaccccaggcucagggcgauggggccaacgccggacagccucaagcucagggcgacggggccaacgcgggacagccccaggcucaaggcgauggggccaaugccggccagccgcaggcucaaggagaccgggccaacgcuggccagccucaggcccagggggacggagcgaauguuccccgccaaggcagaaacgggggaggcgccccugcugggggcaaugaaggaaacaagcaggccggcaaagggcagggacagaauaaccaaggcgcuaaugcccccaacgagaagguggucaaugauuaccugcacaaaauucggucuagcgugacgaccgaguggacacccugcuccguuaccugugggaacggagugcgcaucagacggaaggcgcaugccggcaauaaaaaggcugaagaccugacaauggaugaccucgaggucgaagccugcgugauggauaaaugugcugggauuuuuaacguggucagcaauucucugggccuuguuauccugcucgugcuggcccuuuucaacuga

SEQ ID NO: 5176 - RNA, 1089 nt, Artificial Sequence
  derived and/or modified CDS sequence (opt5) from Pk(UMGAC1)__AHF20615.1__CSP
augaagaacuucauccugcucgccgugagcuccauucugcuugucgaccugcuccccacccacuuugagcauaauguugaucugucuagagcuaucaacgugaauggcgugagcuucaacaaugucgacacauccucucuuggggccgcucaggugcggcaaagcgcgucccgcggaagaggccugggggaaaaaccuaaggagggagccgauaaagaaaagaaaaaggagaagggcaaagaaaaggaggagccgaaaaagcccaacgaaaauaaacucaagcagccuaacgaggggcagccccaggcccaaggagacggcgcuaaugccggccagccucaggcucagggggauggagccaacgcgggccaaccccaggcccagggggacggagcuaaugccggccagccucaagcucagggggauggagccaacgcgggccagccgcaagcccagggcgacggggcuaaugccggacagccccgggcucagggcgauggggccaacgccggacaaccucaggcucagggcgacggggcgaaugccggacagccccaagcucagggcgauggcgccaacgccgggcagccucaggcucaaggagacggcgccaacgcggggcagccccaggcucagggagauggcgccaaugccgggcaaccgcaggcucagggcgaccgcgccaacgcuggacaaccucaggcccagggcgacggggcgaauguucccagacagggacggaacggcgggggagccccugcuggcgggaaugaaggcaacaagcaagccggaaaaggccaggggcagaauaaccagggagcuaaugcccccaacgagaagguggucaaugauuaccugcacaaaauucgcucuagcgugacgaccgaguggacacccugcuccguuaccuguggcaacggggugagaauccggcgcaaggcgcaugccggaaauaaaaaggcugaagaccugacaauggaugaccucgaggucgaagccugcgugauggauaaaugugcuggcauuuuuaacguggucagcaauucucuggggcuuguuauccugcucgugcuggcccuuuucaacuga

SEQ ID NO: 5177 - RNA, 1086 nt, Artificial Sequence
  derived and/or modified CDS sequence (opt5) from Pk(NB032)__AFG25470.1__CSP
augaagaacuucauccugcucgccgugagcuccauucugcuugucgaccuguuucccacccacuucgagcauaauguugaucucucuagagcuaucaacgugaauggcgugagcuuuaacaaugucgacacauccucucugggggccgcucaggugcggcaaagcgcgucccgcggaagaggccuuggggaaaaaccuaaggagggagccgauaaagaaaagaaaaaggagaaggaaaaagagaaggagaaagaagaggaaccgaagaaacccaacgagaauaagcugaagcagccugagggcaaccaggacgggcgggcccagcccgaaggaaaucaagauggccgcgcucagccugagggcaaccaggacgggagagcccagcccgaaggaaaucaagauggccgggcucagccugaggggaaccaggacggacgcgcccagccggaaggcaaucaagaugggagagcgcagcccgagggaaaccaggacggccgggcccaaccugagggcaaucaggaugggcgcgcucagcccgaaggaaaccaggacggcagagcccaaccugaggggaaccgggaagcucccgcccagccgcagggaaauggcggggcgggacaggcccaaccugagggcaaccgcgaagcucccgcccagccucagggcaaugggggagcuggccaggcccaacccgaggggaacagagaggcccccgcucagccucagggaaauggcggggcgggccaggcccaaccgcagaaaaacgaaggaggcaaugcuggggcccggaagggacagggccaaaacaaucagggggccaacgcucccaaugagaaaguugugaacgauuaccuccacaagauucgcucuagcgucacgaccgaauggacaccuugcuccgugaccuguggaaauggcguuagaauccggagaaaagcccaugcggacaagaaaaaggcugaggaccugacaauggaugaccuggaaguggaggccugcgucauggauaagugugccgggauuuucaacguggugagcaauucucucggccuggucauccuucugguucucgcucuguuuaacuga

SEQ ID NO: 5178 - RNA, 1083 nt, Artificial Sequence
  derived and/or modified CDS sequence (opt5) from Pk(UM002C4)__AHF20639.1__CSP
augaagaacuucauccugcucgccgugagcuccauucugcuugucgaccugcuccccaccuacuuugagcacaauguugaucugucuagagcuaucaacgugaauggcgugagcuucaacaaugucgacacauccucucuuggggccgcucaggugcggcaaagcgcgucccgcggaagaggccugggggaaaaaccuaaggagggagccgauaaagaaaagaaaaaggagaaggaaaaagagaaggaggaggaaccgaaaaagcccaacgaaaauaaacucaagcagccugagggcaacgggggagccggccccgcucagccugagggcaaugggggagccggccccgcucagccugaagggaacggaggcgccgggccggcgcaacccgagggaaauggcggcgccgggccugcucagcccgaaggaaacggcggggccggaccugcucagcccgagggcaaugggggagccggcccggcgcagccugaaggcaacgggggagccggccccgcucaaccugaggggaauggaggcgccgggcccgcucagcccgagggcaacggaggcgccgggccugcccagccggaaggaaacggcggggcuggacccgcgcagccucaaggcaaugggggcgccggacccgcucagccucagggcaacgggggagccggccccgcccaaccgcaggggaauggaggcgcugggccugcccagccccagggcaacggaggcgcggggcaagcucagccucagaagaaugagggaggcaacgccggggcccggaaaggacagggccaaaauaaccagggggcuaaugcccccaacgaaaagguugugaaugacuaucugcagaaaauucgcucuagcgucacgaccgaguggacaccuugcuccgugaccuguggcaacggaguuagaaucaagcggcgcgcucaugccgauaaaaagaaagcggaagaccugacaauggaugaccucgagguggaggccugcgucauggauaagugugcuggcauuuuuaauguggugagcaacucucuggggcuugucauccugcucguucuggcccuuuucaauuga

SEQ ID NO: 5179 - RNA, 1080 nt, Artificial Sequence
  derived and/or modified CDS sequence (opt5) from Pk(CDK162)__ADN94495.1__CSP
augagaaacuucauccugcucgccgugagcuccauucugcuugucgaccugcuccccacccacuuugagcauaauguugaucugucucgggcuaucaacgugaauggcgugagcuucaacaaugucgacacauccucucuuggggccgcucaggugcgccaaagcgcguccagaggacggggccugggggaaaagcgcaaagagggagccgauaaggagaaaaagaaagaaaaggaagaggagccuaagaaaccgaacgaaaauaagcucaaacagcccaacccugaccagccccaggcccaaggcgauggggcuaaugccggacagccucaggcucagggcgacggcgccaacgcggggcaaccccaggcccagggagauggcgcuaaugccgggcagccucaagcucagggagacggcgccaacgcggggcagccgcaagcccagggagauggcgcuaaugccggccagccccaggcucaaggggacggagccaacgccggccagccucaggcucagggggauggagcgaaugccggccaaccccaggcucagggggacggagccaacgccggccagccucaagcucagggcgauggggccaacgcgggacagccccaggcucaaggcgacggggccaaugccggacagccgcaggcucaaggcgacagagccaacgcugggcagccucaggcccagggcgauggagcgaauguuccccggcaaggccgcaacgggggaggcgccccugcugggggaaaugagggcaacaagcaggccgggaaaggccagggacagaauaaccaaggcgcuaaugcccccaacgaaaagguggucaaugacuaccugcacaagauuagaucuagcgugacgaccgaguggacacccugcuccguuaccugugggaacggagugcggauccgcagacggcagaaugcgggcaacaaaaaggccgaggaucugacaauggacgaucucgaagucgaggcuugcgugauggacaaaugugccgggauuuuuaauguggucagcaacucucugggacuuguuauccugcucgugcuggcucuuuucaacuga

SEQ ID NO: 5180 - RNA, 1080 nt, Artificial Sequence
  derived and/or modified CDS sequence (opt5) from Pk(KN010)__AFG25463.1__CSP
augagaaacuucauccugcucgccgugagcuccauucugcuugucgaccugcuccccacccacuuugagcauaauguugaucugucucgggcuaucaacgugaauggcgugagcuucaacaaugucgacacauccucucuuggggccgcucaggugcgccaaagcgcguccagaggacggggccugggggaaaagcgcaaagagggagccgauaaggagaaaaagaaagaaaaggaagaggagccuaagaaaccgaacgaaaauaagcucaaacagcccaacccugaccagccccaggcccaaggcgauggggcuaaugccggacagccucaggcucagggcgacggcgccaacgcggggcaaccccaggcccagggagauggcgcuaaugccgggcagccucaagcucagggagacggcgccaacgcggggcagccgcaagcccagggagauggcgcuaauacgggccagccccaggcccaaggggacggagcuaacgccggccagccucaggcccagggggauggagcuaaugcgggccaaccccaggcccagggggacggagcuaacgccggccagccucaagcccagggcgauggggcuaacgccggacagccccaggcgcaaggcgacggggcuaaugccggacagccgcaggcccaaggcgacagagcuaacgccgggcagccucaggcucagggcgauggagccaauguuccccggcaaggccgcaacgggggaggcgcgccugccgggggaaaugagggcaacaagcaggcugggaaaggccagggacagaauaaccaaggcgccaaugcucccaacgaaaagguggucaaugacuaccugcacaagauuagaucuagcgugaccgccgaguggacacccugcuccguuaccugugggaacggagugcggauccgcagaaaagcgcaugccggcaauaagaaagcugaggaucugacaauggacgaucucgaagucgaggccugcgugauggacaagugugcugggauuuuuaacguggucagcaauucucugggacuuguuauccugcucgugcuggcccuuuucaacuga

SEQ ID NO: 5181 - RNA, 1080 nt, Artificial Sequence
  derived and/or modified CDS sequence (opt5) from Pk(KN013)__AFG25464.1__CSP
augagaaacuucauccugcucgccgugagcuccauucugcuugucgaccugcuccccacccacuuugagcauaauguugaucugucucgggcuaucaacgugaauggcgugagcuucaacaaugucgacacauccucucuuggggccgcucaggugcgccaaagcgcguccagaggacggggccugggggaaaagcgcaaagagggagccgauaaggagaaaaagaaagaaaaggaagaggagccuaagaaaccgaacgaaaauaagcucaaacagcccaacccuggccagccccaggcccaaggggacggagcuaaugccggccagccucaggcucagggcgauggggccaacgcgggacaaccccaggcccagggcgacggggcuaaugccggacagccucaagcucagggcgauggggccaacgcgggacagccgcaagcccagggcgacggcgcuaaugccgggcagccccaggcucaaggagauggcgccaacgccgggcagccucaggcucagggagacggcgcgaaugccgggcaaccccaggcucagggagauggcgccaacgccggccagccucaagcucagggggacggagccaacgcgggccagccccaggcucaaggggauggagccaaugccggccagccgcaggcucaaggggacagagccaacgcuggccagccucaggcccagggagacggcgcgaauguuccccggcaagggcgcaacggaggcggggccccugcuggaggcaaugggggcaacaagcaggccggaaaaggccaggggcagaauaaccaaggagcuaaugcccccaacgagaagguggucaaugauuaccugcacaagauuagaucuagcgugacgaccgaauggacacccugcuccguuaccuguggcaacggggugcggauccgcagaaaagcgcaugccggaaauaagaaagcugaggaccugacaauggaugaccucgaggucgaagccugcgugauggauaagugugcuggcauuuuuaacguggucagcaauucucuggggcuuguuauccugcucgugcuggcccuuuucaacuga

SEQ ID NO: 5182 - RNA, 1080 nt, Artificial Sequence
  derived and/or modified CDS sequence (opt5) from Pk(LT57)__ADN94508.1__CSP
augaagaacuucauccugcucgccgugagcuccauucugcuugucgaccuguuucccacccacuucgagcauaauguugaucucucuagagcuaucaacgugaauggcgugagcuuuaacaaugucgacacauccucucugggggccgcucaggugcggcaaagcgcgucccgcggaagaggccuuggggaaaaaccuaaggagggagccgauaaagaaaagaaaaaggagaaggaaaaagagaaggaggaggaaccgaaaaagcccaacgaaaauaaacugaagcagccugagggcaaccaggacgggcgggcccagcccgagggaaaucaagauggccgcgcucagccugaaggcaaccaggacgggagagcccagcccgagggaaaucaagauggccgggcucagccugaagggaaccaggacggacgcgcccagccggagggcaaucaagaugggagagcgcagcccgaaggaaaccaggacggccgggcccaaccugagggcaaucaggaugggcgcgcucagcccgagggaaaccaggacggcagagcccaaccugaagggaaccgggaggcucccgcccagccgcagggaaauggcggggcgggacaggcccaaccugaaggcaaccgcgaggcucccgcccagccucagggcaaugggggagcuggccaggcccaacccgaagggaacagagaggcccccgcucagccucagggaaauggcggggcgggccaggcccaaccgcagaagaacgagggaggcaaugcuggggcccggaaaggacagggccaaaacaaucagggggccaacgcucccaaugaaaagguugugaacgauuaccuccacaaaauucgcucuagcgucacgaccgaguggacaccuugcuccgugaccuguggaaauggcguuagaauccggagaaaggcccaugcggacaaaaagaaagcugaagaccugacaauggaugaccuggagguggaagccugcgucauggauaagugugccgggauuuucaacguggugagcaauucucucggccuggucauccuucugguucucgcucuguuuaacuga

SEQ ID NO: 5183 - RNA, 1080 nt, Artificial Sequence
  derived and/or modified CDS sequence (opt5) from Pk(NB046)__AFG25471.1__CSP
augagaaacuucauccugcucgccgugagcuccauucugcuugucgaccugcuccccacccacuuugagcauaauguugaucugucucgggcuaucaacgugaauggcgugagcuucaacaaugucgacacauccucucuuggggccgcucaggugcgccaaagcgcguccagaggacggggccugggggaaaagcgcaaagagggagccgauaaggagaaaaagaaagaaaaggaagaggagccuaagaaaccgaacgaaaauaagcucaaacagcccaacccugaccagccccaggcccaaggcgauggggcuaaugccggacagccucaggcucagggcgacggcgccaacgcggggcaaccccaggcccagggagauggcgcuaaugccgggcagccucaagcucagggagacggcgccaacgcggggcagccgcaagcccagggagauggcgcuaaugccggccagccccaggcucaaggggacggagccaacgccggccagccucaggcucagggggauggagcgaaugccggccaaccccaggcucagggggacggagccaacgccggccagccucaagcucagggcgauggggccaacgcgggacagccccaggcucaaggcgacggggccaaugccggacagccgcaggcucaaggcgacagagccaacgcugggcagccucaggcccagggcgauggagcgaauguuccccggcaaggccgcaacgggggaggcgccccugcugggggaaaugagggcaacaagcaggccgggaaaggccagggacagaauaaccaaggcgcuaaugcccccaacgaaaagguggucaaugacuaccugcacaagauuagaucuagcgugacgaccgaguggacacccugcuccguuaccugugggaacggagugcggauccgcagaaaagcgcaugccggcaauaagaaagcugaggaucugacaauggacgaucucgaagucgaggccugcgugauggacaagugugcugggauuuuuaacguggucagcaauucucugggacuuguuauccugcucgugcuggcccuuuucaacuga

SEQ ID NO: 5184 - RNA, 1080 nt, Artificial Sequence
  derived and/or modified CDS sequence (opt5) from Pk(TN023)__AFG25478.1__CSP
augagaaacuucauccugcucgccgugagcuccauucugcuugucgaccugcuccccacccacuuugagcauaauguugaucugucucgggcuaucaacgugaauggcgugagcuucaacaaugucgacauuuccucucuuggggccgcucaggugcgccaaagcgcguccagaggacggggccugggggaaaagcgcaaagagggagccgauaaggagaaaaagaaagaaaaggaagaggagccuaagaaaccgaacgaaaauaagcucaaacagcccaacccugaccagccccaggcccaaggcgauggggcuaaugccggacagccucaggcucagggcgacggcgccaacgcggggcaaccccaggcccagggagauggcgcuaaugccgggcagccucaagcucagggagacggcgccaacgcggggcagccgcaagcccagggagauggcgcuaaugccggccagccccaggcucaaggggacggagccaacgccggccagccucaggcucagggggauggagcgaaugccggccaaccccaggcucagggggacggagccaacgccggccagccucaagcucagggcgauggggccaacgcgggacagccccaggcucaaggcgacggggccaaugccggacagccgcaggcucaaggcgacagagccaacgcugggcagccucaggcccagggcgauggagcgaauguuccccggcaaggccgcaacgggggaggcgccccugcugggggaaaugagggcaacaagcaggccgggaaaggccagggacagaauaaccaaggcgcuaaugcccccaacgaaaagguggucaaugacuaccugcacaagaucagaucuagcgugacaacggaguggacccccugcuccguuacaugugggaacggagugcggauucgcagaaaagcgcaugccggcaauaagaaagcugaggaucugaccauggacgaucucgaagucgaggccugcgugauggacaagugugcugggaucuuuaacguggucagcaauucucugggacuuguuauccugcucgugcuggcccuuuucaacuga

SEQ ID NO: 5185 - RNA, 1080 nt, Artificial Sequence
  derived and/or modified CDS sequence (opt5) from Pk(UM0016C2)__AHF20663.1__CSP
augaagaacuucauccugcucgccgugagcuccauucugcuugucgaccugcuccccacccacuuugagcauaauguugaucugucuagagcuaucaacgugaauggcgugagcuucaacaaugucgacacauccucucuuggggccgcucaggugcggcaaagcgcgucccgcggaagaggccugggggaaaaaccuaaggagggagccgauaaagaaaagaaaaaggagaaggaaaaagagaaggaggaggaaccgaaaaagcccaacgaaaauaaacucaagcagccugagggcaaccaggacgggcgggcccagcccgagggaaaucaagauggccgcgcucagccugaaggcaaccaggacgggagagcccagcccgagggaaaucaagauggccgggcucagccugaagggaaccaggacggacgcgcccagccggagggcaaucaagaugggagagcgcagcccgaaggaaaccaggacggccgggcccaaccugagggcaaucaggaugggcgcgcucagcccgagggaaaccaggacggcagagcccaaccugaagggaaccgggaggcucccgcccagccgcagggaaauggcggggcgggacaggcccaaccugaaggcaaccgcgaggcucccgcccagccucagggcaaugggggagcuggccaggcccaacccgaagggaacagagaggcccccgcucagccucagggaaauggcggggcgggccaggcccaaccgcagaagaacgagggaggcaaugcuggggcccggaaaggacagggccaaaacaaucagggggccaacgcucccaaugaaaagguugugaacgauuaccugcagaaaauucgcucuagcgucacgaccgaguggacaccuugcuccgugaccuguggaaauggcguuagaauccggagacgcgcccacgcggacaagaaaaaggcugaagaccugacaauggaugaccucgagguggaagccugcgucauggauaaaugugccgggauuuuuaacguggugagcaauucucugggccuugucauccugcucguucuggcucuuuucaacuga

SEQ ID NO: 5186 - RNA, 1077 nt, Artificial Sequence
  derived and/or modified CDS sequence (opt5) from Pk(LT48)__ADN94519.1__CSP
augagaaacuucauccugcucgccgugagcuccauucugcuugucgaccugcuccccacccacuuugagcauaauguugaucugucucgggcuaucaacgugaauggcgugagcuucaacaaugucgacacauccucucuuggggccgcucaggugcgccaaagcgcguccagaggacggggccugggggaaaagcgcaaagagggagccgauaaggagaaaaagaaagaaaaggaagaggagccuaagaaaccgaacgaaaauaagcucaaacagcccaacccugaccagccccaggcccaaggcgauggggcuaaugccggacagccucaggcucagggcgacggcgccaacgcggggcaaccccaggcccagggagauggcgcuaaugccgggcagccucaagcucagggagacggcgccaacgcggggcagccgcaagcccagggagauggcgcuaaugccggccagccccaggcucaaggggacggagccaacgccggccagccucaggcucagggggauggagcgaaugccggccaaccccaggcucagggggacggagccaacgccggccagccucaagcucagggcgauggggccaacgcgggacagccccaggcucaaggcgacggggccaaugccggacagccgcaggcucaaggcgacagagggaugcaggauaaccacaagcauaaagagaugggccagauguaccacgacaaggaagagacgggagagguucaucagcaagaagagaugcggggcauuaauaagcaggaaaaagcccgcgauaagaccaucagaguggagugcccuaaagaaaaggucgugaacgacuaucugcacaaaauucggucuagcguuacaaccgaguggacacccuguuccgugaccugcgggaauggaguccgcaucagacggaaggcucacgccggcaacaaaaaggcggaggaucugacaauggacgaucucgaaguggaggccugugugauggacaagugcgcugggaucuuuaaugucguuagcaacucucugggacuugugauucugcucgugcuggcccuuuucaauuga

SEQ ID NO: 5187 - RNA, 1077 nt, Artificial Sequence
  derived and/or modified CDS sequence (opt5) from Pk(SGEHIWM4-Y09-9)__AFD97223.1__CSP
augaagaacuucauccugcucgccgugagcuccauucugcuugucgaccugcuccccaccuacuuugagcacaauguugaucugucuagagcuaucaacgugaauggcgugagcuucaacuccgucgacacaucuagccuuggggccgcucaggugcggcaauccgcgucucgcggaagaggccugggggaaaaaccuaaggagggagccgauaaagaaaagaaaaaggagaaggaaaaagaggaggaaccgaagaaacccaaugagaacaagcucaaacagccucagggcaaugggggagccggccaggcucaacccgaaggcaacgggggagccggccaggcucagccugaggggaauggaggcgccgggcaggcgcaacccgagggaaacggcggcgccgggcaggcucagccugaaggaaauggcggggccggacaggcucaaccggagggcaacgggggagccggccaggcgcagcccgaaggcaaugggggagccggccaagcucagccugaggggaacggaggcgccgggcaggcucagcccgaaggcaauggaggcgccgggcaagcccagccugagggaaacggcggggcuggacaggcgcagcccgagggcaacgggggcgccggacaagcucagccggaaggcaaugggggagccggccaggcccagccugaggggaacggaggcgcugggcaagcccagccccagggcaauggaggcgcggggcaggcucaaccucagaagaacgaaggaggcaaugccggggcccggaagggacagggccaaaacaaucagggggcuaacgcccccaaugagaaaguugugaacgacuaucugcagaagauucgcagcuccgucacgaccgaauggacacccugcagcgugaccuguggcaauggaguuagaauccggcgcagagcucaugccgauaaaaagaaagcggaggaccugacaauggaugaccucgagguggaagccugcgucauggauaagugugcuggcauuuuuaacguggugucuaauucccuggggcuugucauccugcucguucuggcccuuuucaacuga

SEQ ID NO: 5188 - RNA, 1071 nt, Artificial Sequence
  derived and/or modified CDS sequence (opt5) from Pk(LT15)__ADN94525.1__CSP
augagaaacuucauccugcucgccgugagcuccauucugcuugucgaccugcuccccacccacuuugagcauaauguugaucugucucgggcuaucaacgugaauggcgugagcuucaacaaugucgacacauccucucuuggggccgcucaggugcgccaaagcgcguccagaggacggggccugggggaaaagcgcaaagagggagccgauaaggagaaaaagaaagaaaaggaagaggagccuaagaaaccgaacgaaaauaagcucaaacagcccgagcaggccgcuccuggcgccgggggagaacagcccgcuccuggcgccggcggggagcaacccgcgccuggagccggcggggagcagccggcucccggagccggcggggaaagaccugcucccggagccggcggcgagcagccugcgcccggggccggaggcgaacagccggcuccuggggccggaggcgagcggcccgcuccuggggccggaggcgaacaacccgcccccggcgcugggggagagcagccugcgccgggcgccgggggagagcagcccgcuccuggcgccgggggcgaacagcccgccccuggagcuggcggggagcgccccgccccgggagcgggcggggaaagaccugcucccggagccggcggggagcaaccugcccccggcgcuggaggcgaacagccugcccccgcuccgcggcgcgagcagccugcccccgggcccggagcgggcgacggggccagaggaggcaacgcuggggccggcaagggacaaggccagaauaaccagggggcuaauguuccuaacgagaaaguggucaaugauuaccugcacaagauucggucuagcgugacgaccgaauggacaccgugcuccguuaccuguggaaacggcgugcgcaucagacggcgccagaaugccgggaacaagaaagcggaggaccugacaauggaugaccucgaagucgaggccugcgugauggauaagugugcuggaauuuuuaacguggucagcaauucucugggccuuguuauccugcucgugcuggcccuuuucaacuga

SEQ ID NO: 5189 - RNA, 1071 nt, Artificial Sequence
  derived and/or modified CDS sequence (opt5) from Pk(LT57)__ADN94503.1__CSP
augaagaacuucauccugcucgccgugagcuccauucugcuugucgaccuguuucccacccacuucgagcauaauguugaucucucuagagcuaucaacgugaauggcgugagcuuuaacaaugucgacacauccucucugggggccgcucaggugcggcaaagcgcgucccgcggaagaggccuuggggaaaaaccuaaggagggagccgauaaagaaaagaaaaaggagaaggaaaaagaggagccgaagaaacccaacgaaaauaagcugaaacagccugagggcaaccaggacgggcgggcccagcccgaaggaaaucaagauggccgcgcucagccugagggcaaccaggacgggagagcccagcccgagggaaaucaagauggccgggcucagccugaagggaaccaggacggacgcgcccagccggagggcaaucaagaugggagagcgcagcccgaaggaaaccaggacggccgggcccaaccugagggcaaucaggaugggcgcgcucagcccgaaggaaaccaggacggcagagcccaaccugaggggaaccgggaggcucccgcccagccgcagggaaauggcggggcgggacaggcccaaccugaaggcaaccgcgaggcucccgcccagccucagggcaaugggggagcuggccaggcccaacccgaagggaacagagaggcccccgcucagccucagggaaauggcggggcgggccaggcccaaccgcagaagaacgaaggaggcaaugcuggggcccggaagggacagggccaaaacaaucagggggccaacgcucccaaugagaaaguugugaacgauuaccuccagaagauucgcucuagcgucacgaccgaguggacaccuugcuccgugaccuguggaaauggcguuagaauccggagacgcgcccacgcggacaaaaagaaagcugaagaccugacaauggaugaccuggagguggaagccugcgucauggauaagugugccgggauuuucaacgcugugagcaauucucucggccuggugauccuucugguccucgcccuguuuaacuga

SEQ ID NO: 5190 - RNA, 1068 nt, Artificial Sequence
  derived and/or modified CDS sequence (opt5) from Pk(UMHIC2)__AHF20634.1__CSP
augaagaacuucauccugcucgccgugagcuccauucugcuugucgaccugcuccccacccacuuugagcauaauguugaucugucuagagcuaucaacgugaauggcgugagcuucaacaaugucgacacauccucucuuggggccgcucaggugcggcaaagcgcgucccgcggaagaggccugggggaaaaaccuaaggagggagccgauaaagaaaagaaaaaggagaaggaaaaagaggaggaaccgaagaaacccaacgagaauaagcucaaacagccugaaggcaaccgggaggcccccgggcagccugagggaaaucgcgaagcucccggccagccugagggcaacagagaagccccggggcaacccgagggaaaucgggaagcuccuggccagcccgaggggaaccgcgaggccccuggacagcccgaaggcaauagagaggcgccggggcagccugaaggaaaccgggaggcccccggccaaccugaaggcaaucgcgaggcucccgggcagcccgagggaaacagagaagccccuggccagccggaggggaaccgggaagcucccggacagccugagggcaaucgcgaagcccccgcgcaaccugaggggaacagagaggcccccggacagccggaaggcaaucgggaggcuccugcccagcccgaaggcaaccgcgaggcuccugcccaaccccaggggaauggaggcgccgggcaggcucagccucaaaagaacgagggaggcaaugcgggggccagaaagggccagggacagaacaaucagggcgcuaacgcccccaaugaaaaaguugugaacgacuaccugcaaaagauucggucuagcgucacgaccgaguggacaccgugcuccgugaccugugggaauggaguuagaaucaaacgcaaggcccacgcugauaaaaagaaagccgaagaccugacaauggaugaccucgagguggaagcgugcgucauggauaagugugcuggcauuuuuaacguggugagcaauucucuggggcuugucauccugcucguucuggcccuuuucaacuga

SEQ ID NO: 5191 - RNA, 1068 nt, Artificial Sequence
  derived and/or modified CDS sequence (opt5) from Pk(UMHIC6)__AHF20635.1__CSP
augaagaacuucauccugcucgccgugagcuccauucugcuugucgaccugcuccccacccacuuugagcauaauguugaucugucuagagcuaucaacgugaauggcgugagcuucaacaaugucgacacauccucucuuggggccgcucaggugcggcaaagcgcgucccgcggaagaggccugggggaaaaaccuaaggagggagccgauaaagaaaagaaaaaggagaaggaaaaagaggaggaaccgaagaaacccaacgagaauaagcucaaacagccugaaggcaaccgggaggcccccgggcagccugagggaaaucgcgaagcucccggccagccugagggcaacagagaagccccggggcaacccgagggaaaucgggaagcuccuggccagcccgaggggaaccgcgaggccccuggacagcccgaaggcaauagagaggcgccggggcagccugaaggaaaccgggaggcccccggccaaccugaaggcaaucgcgaggcucccgggcagcccgagggaaacagagaagccccuggccagccggaggggaaccgggaagcucccggacagccugagggcaaucgcgaagcccccgggcaaccugagggaaacagagaggcgcccggccagccggaaggcaaucgggaggccccugcucagcccgaagggaaccgcgaggccccugcucaaccccagggaaauggcggggccggacaggcccagccucaaaagaacgagggcgggaaugcuggcgcgagaaagggacagggccagaacaaucagggggccaacgcucccaaugaaaaaguugugaacgacuaccugcaaaagauucggucuagcgucacgaccgaguggacaccgugcuccgugaccuguggaaauggcguuagaaucaaacgcaaggcccacgccgauaaaaagaaagcugaagaccugacaauggaugaccucgagguggaagccugcgucauggauaagugugcggggauuuuuaacguggugagcaauucucugggacuugucauccugcucguucuggcucuuuucaacuga

SEQ ID NO: 5192 - RNA, 1068 nt, Artificial Sequence
  derived and/or modified CDS sequence (opt5) from Pk(UMJUC1)__AHF20630.1__CSP
augaagaacuucauccugcucgccgugagcuccauucugcuugucgaccugcuccccacccacuuugagcauaauguugaucugucuagagcuaucaacgugaauggcgugagccuuaacaaugucgacacauccucucugggggccgcucaggugcggcaaagcgcgucccgcggaagaggccucggggaaaaaccuaaggagggagccgauaaagaaaagaaaaaggagaaggaaaaagaggaggaaccgaagaaacccaacgagaauaagcugaaacagccugaaggcaaccgggaggcccccgggcagccugagggaaaucgcgaagcucccggccagccugagggcaacagagaagccccggggcaacccgagggaaaucgggaagcuccuggccagcccgaggggaaccgcgaggccccuggacagcccgaaggcaauagagaggcgccggggcagccugaaggaaaccgggaggcccccggccaaccugaaggcaaucgcgaggcucccgggcagcccgagggaaacagagaagccccuggccagccggaggggaaccgggaagcucccggacagccugagggcgaccgcgaagcccccgcgcaaccugaggggaauagagaggcccccggacagccggaaggcaaccgggagguuccugcucagcccgaaggcaaucgcgaggccccugcucaaccccaggggaacggaggcgccgggcaggcccagccucaaaagaaugagggaggcaacgcuggggcgagaaagggccagggacagaauaaccagggcgccaaugcucccaacgaaaaaguggucaaugauuaccugcaaaagauucggucuagcgugacgaccgaguggacaccgugcuccguuaccugugggaacggagugagaaucaaacgcaaggcccacgccgacaaaaagaaagcugaagaucucacaauggacgaucuggaggucgaagccugcgugauggacaagugugcgggcauuuucaauguggucagcaacucucuugggcugguuauccuccuggugcuugcucuguuuaauuga

SEQ ID NO: 5193 - RNA, 1062 nt, Artificial Sequence
  derived and/or modified CDS sequence (opt5) from Pk(TN026)__AFG25480.1__CSP
augaagaacuucauccugcucgccgugagcuccauucugcuugucgaccugcuccccacccacuuugagcauaauguugaucugucuagagcuaucaacgugaauggcgugagcuucaacaaugucgacacauccucucuuggggccgcucaggugcggcaaagcgcgucccgcggaagaggccugggggaaaaaccuaaggagggagccgauaaagaaaagaaaaaggagaaggaaaaagagaaggagaaagaagaggaaccgaagaaacccaacgagaauaagcucaagcagccugagcagcccgccgcuggcgccgggggagaacagccugcugccggcgcgggcggggagcaacccgccgcuggagccggcggggaacagccugcugccggagcgggcggggagcagccggccgcuggagccggcggcgaacagcccgcugccggggccggaggcgagcaaccugcugcgggggcccggggagagcagcccgcugccggcgccgggggagaacagccugcugccggcgcgggcggggagcagcccgcugccggagcccgcggcgaacaaccggcugccggggcuggaggcgagcagccugccgcgggggccagaggcgaacagcccgcugccggagcuggcggggagcaaccugccgcgggagccggcggggagcagcccgcucccgccccucggcgcgaacagccggcucccggagccggcgccggggacggcgcuagaggaggcaacgcgggggccggaaaaggccaggggcaaaauaaccagggagcuaauguuccuaacgagaagguggucaaugauuaccugcacaaaauucggucuagcgugacgaccgaauggacacccugcuccguuaccuguggcaacggggugcgcaucagaggcaagggacaugccggcaauaaaaaggccgaggaccugacaauggaugaccucgaagucgaggcuugcgugauggauaaaugugccgggauuuuuaacguggucagcaacucucugggacuuguuauccugcucgugcuggcgcuuuucaauuga

SEQ ID NO: 5194 - RNA, 1056 nt, Artificial Sequence
  derived and/or modified CDS sequence (opt5) from Pk(F08B49-1)__AHH02601.1__CSP
augaagaacuucauccugcucgccgugagcuccauucugcuugucgaccugcuccccacccacuuugagcauaauguugaucugucuagagcuaucaacgugaauggcgugagcuucaacaaugucgacacauccucucuuggggccgcucaggugcggcaaagcgcuucccgcggaagaggccugggggaaaaaccuaaggagggagccgauaaagaaaagaaaaaggagaaggaaaaagagaaggaggaggaaccgaaaaagcccaacgaaaauaaacucaagcagccugagcagcccgccgcuggcgccgggggagagcagccugcugccggcgcgggcggggaacaacccgccgcuggagccggcggggagcagccugcugccggagcgcggggcgaacagccggccgcuggggccggaggcgagcagcccgcugccggcgccgggggagaacaaccugcugcgggcgccgggggagagcagcccgcugccggcgccgggggagagcagccugcugccggcgcgggcggggaacagcccgcugccggagcccgcggcgagcaaccggcugccggggcuggaggcgaacagccugccgcgggggccggcggagagcagcccgcugccggcgcuagaggggaacaaccugccgcgggagccggcggggagcagcccgcucccgccccucggcgcgagcagccggcucccggagccggcgccggggacggcgcuagaggaggcaacgcgggggccggaaagggccaggggcaaaauaaccagggagcuaauguuccuaacgaaaaaguggucaaugauuaccugcacaagauucggucuagcgugacgaccgaguggacacccugcuccguuaccuguggcaacggggugcgcaucagacggaaaggccaugccggaaauaagaaagccgaagaccugacaauggaugaccucgaggucgaagcgugcgugauggauaagugugccggcauuuuuaacguggucagcaacucucuggggcuuguuauccugcucgugcuggcgcuuuucaauuga

SEQ ID NO: 5195 - RNA, 1056 nt, Artificial Sequence
  derived and/or modified CDS sequence (opt5) from Pk(F08B69-1)__AHH02602.1__CSP
augaagaacuucauccugcucgccgugagcuccauucugcuugucgaccugcuccccacccacuuugagcauaauguugaucugucuagagcuaucaacgugaauggcgugagcuucaacaaugucgacacauccucucuuggggccgcucaggugcggcaaagcgcgucccgcggaagaggccugggggaaaaaccuaaggagggagccgauaaagaaaagaaaaaggagaaggaaaaagagaaggaggaggaaccgaaaaagcccaacgaaaauaaacucaagcagccugagcagcccgccgcuggcgccgggggagagcagccugcugccggcgcgggcggggaacaacccgccgcuggagccggcggggagcagccugcugccggagcgcggggcgaacagccggccgcuggggccggaggcgagcagcccgcugccggcgccgggggagaacaaccugcugcgggcgccgggggagagcagcccgcugccggcgccgggggagagcagccugcugccggcgcgggcggggaacagcccgcugccggagcccgcggcgagcaaccggcugccggggcuggaggcgaacagccugccgcgggggccggcggagagcagcccgcugccggcgcuagaggggaacaaccugccgcgggagccggcggggagcagcccgcucccgccccucggcgcgagcagccggcucccggagccggcgccggggacggcgcuagaggaggcaacgcgggggccggaaagggccaggggcaaaauaaccagggagcuaauguuccuaacgaaaaaguggucaaugauuaccugcacaagauucggucuagcgugacgaccgaguggacacccugcuccguuaccuguggcaacggggugcgcaucagacggaaaggccaugccggaaauaagaaagccgaagaccugacaauggaugaccucgaugucgaggcuugcgugauggacaagugugccggcauuuuuaacguggucagcaacucucuggggcuuguuauccugcucgugcuggcgcuuuucaauuga

SEQ ID NO: 5196 - RNA, 1056 nt, Artificial Sequence
  derived and/or modified CDS sequence (opt5) from Pk(LT51)__ADN94540.1__CSP
augaagaacuucauccugcucgccgugagcuccauucugcuugucgaccugcuccccacccacuuugagcauaauguugaucugucuagagcuaucaacgugaauggcgugagcuucaacaaugucgacacauccucucuuggggccgcucaggugcggcaaagcgcgucccgcggaagaggccugggggaaaaaccuaaggagggagccgauaaagaaaagaaaaaggagaaggaaaaagagaaggaggaggaaccgaaaaagcccaacgaaaauaaacucaagcagccugagcagcccgccgcuggcgccgggggagagcagccugcugccggcgcgggcggggaacaacccgccgcuggagccggcggggagcagccugcugccggagcgggcggggaacagccggccgcuggagccggcggcgagcagcccgcugccggggccggaggcgaacaaccugcugcgggggcccggggagagcagcccgcugccggcgccgggggagagcagccugcugccggcgcgggcggggaacagcccgcugccggagcccgcggcgagcaaccggcugccggggcuggaggcgaacagccugccgcgggggccggcggagagcagcccgcuccugcccccagacgggaacaacccgcugccggcgccgggggagagcagccugcgccggcuccccgcagagagcagccugcccccggcgcuggggccggagacggcgcccgcgggggcaacgcuggagcgggcaaggggcagggacaaaauaaccagggcgccaauguuccuaacgaaaaaguggucaaugauuaccugcacaagauucggucuagcgugacgaccgaguggacacccugcuccguuaccugugggaacggagugagaauccggcgcaaaggccaugcugggaauaagaaagccgaagaccugacaauggaugaccucgaggucgaagccugcgugauggauaagugugcuggcauuuuuaacguggucagcaacucucugggacuuguuauccugcucgugcuggcccuuuucaauuga

SEQ ID NO: 5197 - RNA, 1056 nt, Artificial Sequence
  derived and/or modified CDS sequence (opt5) from Pk(UM0029C9)__AHF20652.1__CSP
augaagaacuucauccugcucgccgugagcuccauucugcuugucgaccugcuccccacccacuuugagcauaauguugaucugucuagagcuaucaacgugaauggcgugagcuucaacaaugucgacacauccucucuuggggccgcccaggugcggcaaagcgcuucccgcggaagaggccugggggaaaaaccuaaggagggagccgauaaagaaaagaaaaaggagaaggaaaaagagaaggaggaggaaccgaaaaagcccaacgaaaauaaacucaagcagccugagcagcccgccgcuggcgccgggggagagcagccugcugccggcgcgggcggggaacaacccgccgcuggagccggcggggagcagccugcugccggagcgggcggggaacagccggccgcuggagcccggggcgagcagcccgcugccggcgccgggggagaacaaccugcugcgggcgcccgcggggagcagcccgcugccggagccggcggggagcagccugcugccggagcgggcggcgaacagcccgcugccggggccggaggcgagcaaccggcugccggggcuagaggagaacagccugccgcgggcgccgggggcgagcagcccgcuccugcgccccggcgcgaacaacccgcugccggagcgggcggggagcagccugccccggcucccagacgggagcagccugcccccggagcuggcgccggggacggagcccgcgaaggcaacgcuggggcgggcaagggacagggccaaaauaaccagggggccaauguuccuaacgagaaaguggucaaugauuaccugcacaagauuagaucuagcgugacgaccgaauggacacccugcuccguuaccuguggaaacggcgugcggauccgcagaaaagggcaugcuggaaauaagaaagccgaggaccugacaauggaugaccucgaagucgaggccugcgugauggauaagugugcuggcauuuuuaacguggucagcaacucucuggggcuuguuauccugcucgugcuggcccuuuucaauuga

SEQ ID NO: 5198 - RNA, 1056 nt, Artificial Sequence
  derived and/or modified CDS sequence (opt5) from Pk(UM0050C7)__AHF20665.1__CSP
augaagaacuucauccugcucgccgugagcuccauucugcuugucgaccugcuccccacccacuuugagcauaauguugaucugucuagagcuaucaacgugaauggcgugagcuucaacaaugucgacacauccucuccuggggccgcucaggugcggcaaagcgcgucccgcggaagaggccuuggggaaaaaccgaaggagggagccgauaaagaaaagaaaaaggagaaggaaaaagagaaggaggaggaacccaaaaagccuaacgaaaauaaacugaagcagcccgagcagccugccgcuggcgccgggggagagcagcccgcugccggcgcgggcggggaacaaccugccgcuggagccggcggggagcagccggcugccggagcgggcggggaacagcccgccgcuggagcccggggcgagcagccugcugccggcgccgggggagaacaacccgcugcgggcgcccgcggggagcagccugcugccggagccggcggggagcagcccgcugccggagcgggcggcgaacagccggcugccggggccggaggcgagcaaccugcugccggggcuggaggcgaacagcccgccgcgggggccggcggagagcagccugcucccgcccccagacgggaacaaccugcugccggcgccgggggagagcagccggcgcccgcuccucgcagagagcagcccgccccuggcgcuggggccggagacggcgcccgcgggggcaacgcuggagcgggcaaggggcagggacaaaauaaccagggcgccaauguucccaacgaaaaaguggucaaugauuaccuccggaagauuagaucuagcgugacgaccgaguggacaccgugcuccguuaccugugggaacggagugcggauccgcagaaaaggccacgcugggaauaagaaagccgaagaccugacaauggaugaccuggaggucgaagccugcgugauggauaagugugcuggcauuuuuaacguggucagcaacucucucggacugguuauccuucuggugcucgcccuguucaauuga

SEQ ID NO: 5199 - RNA, 1056 nt, Artificial Sequence
  derived and/or modified CDS sequence (opt5) from Pk(UMHEC1)__AHF20620.1__CSP
augaagaacuucauccugcucgccgugagcuccauucugcuugucgaccugcuccccacccacuuugagcauaauguugaucugucuagagcuaucaacgugaauggcgugagcuucaacaaugucgacacauccucucuuggggccgcucaggugcggcaaagcgcgucccgcggaagaggccugggggaaaaaccuaaggagggagccgauaaagaaaagaaaaaggagaaggaaaaagagaaggaggaggaaccgaaaaagcccaacgaaaauaaacucaagcagccugagcagcccgccgcuggcgccgggggagagcagccugcugccggcgcgggcggggaacaacccgccgcuggagccggcggggagcagccugcugccggagcgggcggggaacagccggccgcuggagccggcggcgagcagcccgcugccggggcccggggagaacaaccugcugcgggcgccgggggagagcagcccgcugccggcgccgggggagagcagccugcugccggcgcgggcggggaacagcccgcugccggagcccgcggcgagcaaccggcugccggggcuggaggcgaacagccugccgcgggggccggcggagagcagcccgcuccugcccccagacgggaacaacccgcugccggcgccgggggagagcagccugcgccggcuccccgcagagagcagccugcccccggcgcuggggccggagacggcgcccgcgggggcaacgcuggagcgggcaaggggcagggacaaaauaaccagggcgccaauguuccuaacgaaaaaguggucaaugauuaccugcacaagauucggucuagcgugacgaccgaguggacacccugcuccguuaccugugggaacggagugagaauccggcgcaaaggccaugcugggaauaagaaagccgaagaccugacaauggaugaccucgaggucgaagccugcgugauggauaagugugcuggcauuuuuaacguggucagcaacucucugggacuuguuauccugcucgugcuggcccuuuucaauuga

SEQ ID NO: 5200 - RNA, 1056 nt, Artificial Sequence
  derived and/or modified CDS sequence (opt5) from Pk(UMMAC4)__AHF20621.1__CSP
augaagaacuucauccugcucgccgugagcuccauucugcuugucgaccugcuccccacccacuuugagcauaauguugaucugucuagagcuaucaacgugaauggcgugagcuucaacaaugucgacacauccucucuuggggccgcucaggugcggcaaagcgcgucccgcggaagaggccugggggaaaaaccuaaggagggagccgauaaagaaaagaaaaagggcaaggagaaagaaaaggaggaggaaccgaaaaagcccaacgagaauaaacucaagcagccugaacagcccgccgcuggggccggaggcgagcagccugcugccggcgccgggggagagcaacccgcggcuggcgccgggggagaacagccugcugccggcgccgggggagagcagccggcggcuggcgccggcggggaacagcccgcugccggagcccggggcgagcaaccugcugcgggggccggaggcgaacagcccgcugccggggccggaggcgagcagccugcugccggcgcugggggagagcagcccgcggccggcgcccgcggggaacaaccggcugccggagcuggcggggagcagccugccgcgggcgccggaggcgaacagcccgcuccugcccccagacgggagcaacccgcugccggggcgggaggcgaacagccugccccggcuccccgcagagagcagccugcccccggggcuggagccggcgacggggcccggggcggaaacgcuggcgcggggaagggacagggccaaaauaaccagggggccaauguuccuaacgagaaaguggucaaugauuaccugcacaagauucgcucuagcgugacgaccgaauggacacccugcuccguuaccuguggaaacggcgugagaauccggcgcaaagggcaugcuggcaauaagaaagccgaggaccugacaauggaugaccucgaagucgaggccugcgugauggauaagugugcuggaauuuuuaacguggucagcaacucucugggccuuguuauccugcucgugcuggcccuuuucaauuga

SEQ ID NO: 5201 - RNA, 1056 nt, Artificial Sequence
  derived and/or modified CDS sequence (opt5) from Pk(UMMEC8)__AHF20623.1__CSP
augaagaacuucauccugcucgccgugagcuccauucugcuugucgaccugcuccccacccacuuugagcauaauguugaucugucuagagcuaucaacgugaauggcgugagcuucaacaaugucgacacauccucucuuggggccgcucaggugcggcaaagcgcgucccgcggaagaggccugggggaaaaaccuaaggagggagccgauaaagaaaagaaaaaggagaaggaaaaagagaaggaggaggaaccgaaaaagcccaacgaaaauaaacucaagcagccugagcagcccgccgcuggcgccgggggagagcagccugcugccggcgcgggcggggaacaacccgccgcuggagccggcggggagcagccugcugccggagcgggcggggaacagccggccgcuggagccggcggcgagcagcccgcugccggggcccggggagaacaaccugcugcgggcgccgggggagagcagcccgcugccggcgccgggggagagcagccugcugccggcgcgggcggggaacagcccgcugccggagcccgcggcgagcaaccggcugccggggcuggaggcgaacagccugccgcgggggccggcggagagcagcccgcuccugcccccagacgggaacaacccgcugccggcgccgggggagagcagccugcgccggcuccccgcagagagcagccugcccccggcgcuggggccggagacggcgccagagggggcaacgcuggagcgggcaaggggcagggacaaaauaaccagggcgccaauguuccuaacgaaaaaguggucaaugauuaccugcacaagacgcgcucuagcgugaccacagaguggacccccugcuccguuacaugugggaacggagugcggauucggcgcaaaggccaugcugggaauaagaaagccgaagaccugaccauggaugaccucgaggucgaagccugcgugauggauaagugugcuggcaucuuuaacguggucagcaacucucugggacuuguuauucugcucgugcuggcccuuuucaauuga

SEQ ID NO: 5202 - RNA, 1050 nt, Artificial Sequence
  derived and/or modified CDS sequence (opt5) from Pk(MPG45)__ACD86467.1__CSP
augaagaacuucauccugcucgccgugagcuccauucugcuugucgaccugcuccccacccacuuugagcauaauguugaucugucuagagcuaucaaccuuaauggcgugagcuucaacaauguggacacauccucucugggggccgcgcagguccggcaaagcgcuucccgcggaagaggccucggggaaaaaccuaaggagggagccgauaaagaaaagaaaaaggagaaggacaaagaagaggagccgaagaaacccaacgaaaauaagcugaaacagccuaacgccggccagccccaggcucaaggggauggagccaaugcuggccagccucaggcccagggcgacggggcgaacgccggacaaccccaggcucagggcgauggggccaaugcuggacagccucaagcccagggcgacggggcgaacgccggacagccgcaagcucagggcgauggcgccaaugcugggcagccccaggcccaaggagacggcgccaacgcugggcagccucaggcgcagggagauggcgccaaugcugggcaaccccaggcccagggagacggcgccaacgcuggccagccucaagcccagggggauggagcgaacgcuggccagccccaggcccaaggggaccgggccaaugcuggacagccgcaggcccaaggcgacggggcuaacgugccucgccagggcagaaauggaggcggggcccccgcgggaggcaacgaggggaauaagcaggccggaaagggccaggggcaaaacaaucagggcgcuaacgccccuaaugaaaaaguugugaacgauuaccugcagaagauucggucuagcgucacgaccgaguggacacccugcuccgugaccuguggaaauggcguucgcaucagacggcgcgcucacgccgacaaaaagaaagcggaggaucucacaauggacgaucuggaaguggaggccugcgucauggacaagugugcugggauuuuuaacguggugagcaauucucuuggacuggucauccuccugguucuugcccuguucaacuga

SEQ ID NO: 5203 - RNA, 1044 nt, Artificial Sequence
  derived and/or modified CDS sequence (opt5) from Pk(KH462)__ADN94491.1__CSP
augagaaacuucauccugcucgccgugagcuccauucugcuugucgaccugcuccccacccacuuugagcauaauguugaucugucucgggcuaucaacgugaauggcgugagcuucaacaaugucgacacauccucucuuggggccgcucaggugcgccaaagcgcguccagaggacggggccugggggaaaagcgcaaagagggagccgauaaggagaaaaagaaagaaaaggaagaggagccuaagaaaccgaacgaaaauaagcucaaacagcccgagcaggccgcuccuggcgccgggggagaacagcccgcuccuggcgccggcggggagagacccgcgccuggagccggcggggagcaaccggcucccggagccggcggggaacagccugcucccggagccggcggcgagcagccugcgcccggggccggaggcgaacagccggcuccuggggccggaggcgagcggcccgcuccuggggccggaggcgaacaacccgcccccggcgcugggggagagcgcccugcgccgggcgccgggggagagcagcccgcuccuggcgccgggggcgaaagacccgccccuggagcuggcggggagcagcccgccccgggagcgggcggggaacagccugcucccggagccggcggggagcaaccugcccccgcuccucggcgcgaacagcccgccccggcuccuggcgccggagacggcgcgagagggggaaacgccggcgcugggaagggacagggccaaaauaaccagggggccaauguucccaacgagaaaguggucaaugauuaccugcacaagauucggucuagcgugacgaccgaguggacacccugcuccguuaccuguggcaacggagugcgcaucagacggaaggcucaugccgacaaaaagaaagcggaagaucugacaauggacgaucucgaggucgaagccugcgugauggacaagugugcuggcauuuuuaauguggucagcaacucucuggggcuuguuauccugcucgugcuggcccuuuucaacuga

SEQ ID NO: 5204 - RNA, 1044 nt, Artificial Sequence
  derived and/or modified CDS sequence (opt5) from Pk(LT3)__ADN94521.1__CSP
augagaaacuucauccugcucgccgugagcuccauucugcuugucgaccugcuccccacccacuuugagcauaauguugaucugucucgggcuaucaacgugaauggcgugagcuucaacaaugucgacacauccucucuuggggccgcucaggugcgccaaagcgcguccagaggacggggccugggggaaaagcgcaaagagggagccgauaaggagaaaaagaaagaaaaggaagaggagccuaagaaaccgaacgaaaauaagcucaaacagcccgagcaggccgcuccuggcgccgggggagaacagcccgcuccuggcgccggcggggagcaacccgcgccuggagccggcggggagagaccggcucccggagccggcggggaacagccugcucccggagccggcggcgagcagccugcgcccggggccggaggcgaacggccggcuccuggggccggaggcgagcagcccgcuccuggggccggaggcgaacaacccgcccccggcgcugggggagagcagccugcgccgggcgccgggggagagcagcccgcuccuggcgccgggggcgaacugcccgccccuggagcuggcggggagcgccccgccccgggagcgggcggggaacagccugcucccggagccggcggggagcaaccugcccccgcuccuagacgggaacagcccgccccgggcccuggagcuggcgacggggcccgcggaggcaacgcgggggccggaaagggccaggggcaaaauaaccagggcgcuaauguucccaacgagaaaguggucaaugauuaccugcacaagauuagaucuagcgugacgaccgaguggacacccugcuccguuaccuguggaaacggcgugcggauccgcagacggcagaaugccgggaacaagaaagcugaagaccucacaauggaugaccuggaggucgaagccugcgugauggauaagugugcgggaauuuuuaacguggucagcaauucucuuggccugguuauccuccuggugcuugcccuguucaacuga

SEQ ID NO: 5205 - RNA, 1044 nt, Artificial Sequence
  derived and/or modified CDS sequence (opt5) from Pk(LT33)__ADN94529.1__CSP
augagaaacuucauccugcucgccgugagcuccauucugcuugucgaccugcuccccacccacuuugagcauaauguugaucugucucgggcuaucaacgugaauggcgugagcuucaacaaugucgacacauccucucuuggggccgcucaggugcgccaaagcgcguccagaggacggggccugggggaaaagcgcaaagagggagccgauaaggagaaaaagaaagaaaaggaagaggagccuaagaaaccgaacgaaaauaagcucaaacagcccgagcaggccgcuccuggcgccgggggagaacagcccgcuccuggcgccggcggggagagacccgcgccuggagccggcggggagcaaccggcucccggagccggcggggaacagccugcucccggagccggcggcgagcagccugcgcccggggccggaggcgaacagccggcuccuggggccggaggcgagcggcccgcuccuggggccggaggcgaacaacccgcccccggcgcugggggagagcagccugcgccgggcgccgggggagagcagcccgcuccuggcgccgggggcgaacgccccgccccuggagcuggcggggagcagcccgccccgggagcgggcggggaaagaccugcucccggagccggcggggagcaaccugcccccgcuccucggcgcgaacagcccgccccgggcccuggagcuggcgacggggccagaggaggcaacgcgggggccggaaagggccaggggcaaaauaaccagggcgcuaauguucccaacgagaaaguggucaaugauuaccugcacaagauucggucuagcgugacgaccgaguggacacccugcuccguuaccuguggaaacggcgugcgcaucagacggcgccagaaugccgggaacaagaaagcugaagaccugacaauggaugaccucgaggucgaagccugcgugauggauaagugugcgggaauuuuuaacguggucagcaauucucugggccuuguuauccugcucgugcuggcccuuuucaacuga

SEQ ID NO: 5206 - RNA, 1044 nt, Artificial Sequence
  derived and/or modified CDS sequence (opt5) from Pk(LT33)__ADN94527.1__CSP
augaagaacuucauccugcucgccgugagcuccauucugcuugucgaccugcuccccacccacuuugagcauaauguugaucugucuagagcuaucaacgugaauggcgugagcuucaacaaugucgacacauccucucuuggggccgcucaggugcggcaaagcgcgucccgcggaagaggccugggggaaaaacggaaggagggagccgauaaagaaaagaaaaaggagaaggaagaggagccuaaaaagccgaacgaaaauaaacucaagcagcccgagcaggccgcuccuggcgccgggggagaacagcccgcuccuggcgccggcggggagcgccccgcgccuggagccggcggggagcaaccggcucccggagccggcggggaacagccugcucccggagccggcggcgagcagccugcgcccggggccggaggcgaacagccggcuccuggggccggaggcgagagacccgcuccuggggccggaggcgaacaacccgcccccggcgcugggggagagcagccugcgccgggcgccgggggagagcagcccgcuccuggcgccgggggcgaacggcccgccccuggagcuggcggggagcagcccgccccgggagcgggcggggaacgcccugcucccggagccggcggggagcaaccugcccccgcuccuagacgggaacagcccgccccgggcccuggagcuggcgacggggcccgcggaggcaacgcgggggccggaaaaggccaggggcaaaauaaccagggcgcuaauguucccaacgagaagguggucaaugauuaccugcacaagauuagaucuagcgugacgaccgaguggacacccugcuccguuaccuguggaaacggcgugcggauccgcagacggcagaaugccgggaacaaaaaggcugaagaccugacaauggaugaccucgaggucgaagccugcgugauggauaaaugugcgggaauuuuuaacguggucagcaauucucugggccuuguuauccugcucgugcuggcccuuuucaacuga

SEQ ID NO: 5207 - RNA, 1044 nt, Artificial Sequence
  derived and/or modified CDS sequence (opt5) from Pk(TN029)__AFG25482.1__CSP
augagaaacuucauccugcucgccgugagcuccauucugcuugucgaccugcuccccacccacuuugagcauaauguugaucugucucgggcuaucaacgugaauggcgugagcuucaacaaugucgacacauccucucuuggggccgcucaggugcgccaaagcgcguccagaggacggggccugggggaaaagcgcaaagagggagccgauaaggagaaaaagaaagaaaaggaagaggagccuaagaaaccgaacgaaaauaagcucaaacagcccgagcaggccgcuccuggcgccgggggagaacagcccgcuccuggcgccggcggggagcaacccgcgccuggagccggcggggagagaccggcucccggagccggcggggaacagccugcucccggagccggcggcgagcagccugcgcccggggccggaggcgaacggccggcuccuggggccggaggcgagcagcccgcuccuggggccggaggcgaacaacccgcccccggcgcugggggagagcagccugcgccgggcgccgggggagagcagcccgcuccuggcgccgggggcgaacgccccgccccuggagcuggcggggagagacccgccccgggagcgggcggggaacagccugcucccggagccggcggggagcaaccugcccccgcuccucggcgcgaacagcccgccccgggcccuggagcuggcgacggggccagaggaggcaacgcgggggccggaaagggccaggggcaaaauaaccagggcgcuaauguucccaacgagaaaguggucaaugauuaccugcacaagauucggucuagcgugacgaccgaguggacacccugcuccguuaccuguggaaacggcgugcgcaucagacggcgccagaaugccgggaacaagaaagcugaagaccugacaauggaugaccucgaggucgaagccugcgugauggauaagugugcgggaauuuuuaacguggucagcaauucucugggccuuguuauccugcucgugcuggcccuuuucaacuga

SEQ ID NO: 5208 - RNA, 1041 nt, Artificial Sequence
  derived and/or modified CDS sequence (opt5) from Pk(LT53)__ADN94501.1__CSP
augaagaacuucauccugcucgccgugagcuccauucugcuugucgaccugcuccccacccacuuugagcauaauguugaucugucuagagcuaucaacgugaauggcgugagcuucaacaaugucgacacauccucucuuggggccgcucaagugcggcaaagcgcuucccgcggaagaggccugggggaaaaaccuaaggagggagaugacaaagaaaagaaaaaggagaaggaaaaagaggaggaaccgaagaaccucaaugagaacaaacccaagcagccuaaugccgaaggcgauggggccaaacccaagcagccuaacgcugagggagacggcgccaagcugaaacagcccaaugcugagggcgauggggccaagcugaaacaaccuaacgcggaaggagacggcgggaaugcccggcagccgaacgcugagggagauggcgggaaugcccgccagcccaacgcugaaggagacggcggcaacgccagacagccuaaugcggagggggauggaggcaacgcccggcaacccaaugcugaaggggacggaggcaacgcccgccagccuaaugcugagggggauggaggcaacgccagacagcccaaugccgagggcgacgggggaaacgcucggcagccgaaugcggaaggcgacggggccaacgcucgccaaccucaggccgagggaggcgggggcaaugccagacagggaggcaacgaagggaauaagcaagcuggaaaaggccaggggcagaacaaucagggagccaacgcgcccaacgagaagguugugaaugauuaccuccagaaaauucggucuagcgucacgaccgaauggacaccuugcuccgugaccuguggcaacgggguucgcaucagacggcgcgcucacgccgacaagaagaaagccgaggaucugacaauggacgaucuugagguggaagcgugcgucauggacaagugugccggcauuuuuaauguggugagcaacucucugggacucgucauccugcuuguucuggcucucuucaauuga

SEQ ID NO: 5209 - RNA, 1041 nt, Artificial Sequence
  derived and/or modified CDS sequence (opt5) from Pk(UMOTC3)__AHF20624.1__CSP
augaagaacuucauccugcucgccgugagcuccauucugcuugucgaccugcuccccacccacuuugagcauaauguugaucugucuagagcuaucaacgugaauggcgugagcuucaacaaugucgacacauccucucuuggggccgcucaggugcggcaaagcgcgucccgcggaagaggccugggggaaaaaccuaaggagggagccgauaaagaaaagaaaaaggagaaggaaaaagaggaggaaccgaagaaacccaacgagaauaagcucaaacagccugaaggcaaccgggaggcccccgggcagccugagggaaaucgcgaagcucccggccagccugagggcaacagagaagccccggggcaacccgagggaaaucgggaagcuccuggccagcccgaggggaaccgcgaggccccuggacagcccgaaggcaauagagaggcgccggggcagccugaaggaaaccgggaggcccccggccaaccugaaggcaaucgcgaggcucccgggcagcccgagggaaacagagaagccccugcucagccggagggcaaccgggaagcccccgggcagccugagggaaaucgcgaagcgcccgcccaaccucagggcaacgggggagcuggccaggcccaacccgaggagaauagagaagcuccggcccagccucagggcaacgggggagccggccaggcucaaccccagaagaaugaagggggaaacgcgggcgcccggaaggggcagggccagaauaaccaaggagcuaauguuccuaacgagaaaguggucaaugacuaccugcacaagauucgcucuagcgugacgaccgaguggacacccugcuccguuaccuguggcaacggggugagaauccggagaaaaggacaugccggcaauaagaaagccgaggaucugacaauggacgaucucgaagucgaggcuugcgugauggacaagugugccgggauuuuuaacguggucagcaauucucugggacuuguuauccugcucgugccugcgcuguucaacuga

SEQ ID NO: 5210 - RNA, 1038 nt, Artificial Sequence
  derived and/or modified CDS sequence (opt5) from Pk(UMSY2C2)__AHF20625.1__CSP
augaagaacuucauccugcucgccgugagcuccauucugcuugucgaccugcuccccacccacuuugagcauaauguugaucugucuagagcuaucaacgugaauggcgugagcuucaacaaugucgacacauccucucuuggggccgcucaggugcggcaaagcgcgucccgcggaagaggccugggggaaaaaccuaaggagggagccgauaaagaaaagaaaaaggagaaggaaaaagaggaggaaccgaagaaacccaacgagaauaagcucaaacagccugaaggcaaccgggaggcccccgggcagccugagggaaaucgcgaagcucccggccagccugagggcaacagagaagccccggggcaacccgagggaaaucgggaagcuccuggccagcccgaggggaaccgcgaggccccuggacagcccgaaggcaauagagaggcgccggggcagccugaaggaaaccgggaggcccccggccaaccugaaggcaaucgcgaggcucccgggcagcccgagggaaacagagaagccccuggccagccggaggggaaccgggaagcucccgcccagccugagggaaaucgcgaagcgcccggccaaccugaggggaacagagaggcccccgcucagccggaaggaaaucgggaggccccugcucagccccaaggcaacggcggggccggacaggcccagccucagaagaaugaaggcgggaacgcuggagcgcgcaagggccaagggcagaauaaccagggcgccaaugcucccaacgagaaaguugugaaugacuaccugcagaagauuagaucuagcgucacgaccgaguggacaccuugcuccgugaccuguggaaacggcguucggaucaaaagaaaggcccacgccgauaaaaagaaagcugaagaccugacaauggaugaccucgagguggaagccugcgucauggauaagugugcggggauuuuuaauguggugagcaacucucugggacuugucauccugcucguucuggcucuuuucaauuga

SEQ ID NO: 5211 - RNA, 1029 nt, Artificial Sequence
  derived and/or modified CDS sequence (opt5) from Pk(KN045)__AFG25467.1__CSP
augaagaacuucauccugcucgccgugagcuccauucugcuugucgaccugcuccccacccacuuugagcauaauguugaucugucuagagcuaucaacgugaauggcgugagcuucaacaaugucgacacauccucucuuggggccgcucaggugcggcaaagcgcgucccgcggaagaggccugggggaaaaaccuaaggagggagccgauaaagaaaagaaaaaggagaaggaaaaagagaaggaggaggaaccgaaaaagcccaacgaaaauaaacucaagcagccugagcagcccgccgcuggcgccgggggagagcagccugcugccggcgcgggcggggaacaacccgccgcuggagccggcggggagcagccugcugccggagcgggcggggaacagccggccgcuggagccggcggcgagcagcccgcugccggggcccggggagaacaaccugcugcgggcgccgggggagagcagcccgcugccggcgccgggggagagcagccugcugccggcgcgcgcggcgaacagcccgcugccggggccggaggcgagcaaccggcugccggggcuggaggcgaacagccugcccccgcgccuagacgggagcagcccgccgcuggggccggcggagaacaacccgcuccugccccgcgcagagagcagcccgcgccuggcgccggggcuggagacggcgcccgcgggggaaacgcuggcgccgggaagggccagggacagaauaaccaaggcgccaauguucccaacgagaaaguggucaaugauuaccugcacaagauucggucuagcgugacgaccgaauggacaccuugcuccguuaccugugggaacggagugagaauccggcgcaaaggccaugcugggaauaagaaagcggaggaccugacaauggaugaccucgaagucgaggccugcgugauggauaagugugcuggaauuuuuaacguggucagcaacucucugggccuuguuauccugcucgugcuggcccuuuucaauuga

SEQ ID NO: 5212 - RNA, 1029 nt, Artificial Sequence
  derived and/or modified CDS sequence (opt5) from Pk(LT48)__ADN94515.1__CSP
augaagaacuucauccugcucgccgugagcuccauucugcuugucgaccugcuccccacccacuuugagcauaauguugaucugucuagagcuaucaacgugaauggcgugagcuucaacaaugucgacacauccucucuuggggccgcucaggugcggcaaagcgcgucccgcggaagaggccugggggaaaaaccuaaggagggagccgauaaagaaaagaaaaaggagaaggaaaaagagaaggaggaggaaccgaaaaagcccaacgaaaauaaacucaagcagccugagcagcccgccgcuggcgccgggggagagcagccugcugccggcgcgggcggggaacaacccgccgcuggagccggcggggagcagccugcugccggagcgggcggggaacagccggccgcuggagccggcggcgagcagcccgcugccggggccggaggcgaacaaccugcugcgggggccggaggcgagcagcccgcugccggggccggaggcgagcagccugcugccggcgcgcgcggggaacagcccgcugccggagccggcggggagcaaccggcugccggagcuggcggggaacagccugcccccgcgccucggagagagcagcccgccgcuggcgccggaggcgaacaacccgcuccugccccgcggcgcgagcagcccgcgccuggggccggagcuggcgacggggccagaggaggcaacgcuggggccggcaagggacagggccagaauaaccaaggggccaauguucccaacgagaaaguggucaaugauuaccugcacaagauucggucuagcgugacgaccgaauggacaccuugcuccguuaccuguggaaacggcgugcgcaucagacggaaagggcaugcuggaaauaagaaagcggaggaccugacaauggaugaccucgaagucgaggccugcgugauggauaagugugcuggcauuuuuaacguggucagcaacucucuggggcuuguuauccugcucgugcuggcccuuuucaauuga

SEQ ID NO: 5213 - RNA, 1029 nt, Artificial Sequence
  derived and/or modified CDS sequence (opt5) from Pk(TB073)__AFG25476.1__CSP
augagaaacuucuuuuuccuggccgugagcuccauccuccuggucgaccuucugcccacccacuuugagcauaauguugaucucucucgggcuauuaacgugaauggcgugagcuucaacaaugucgacacauccucucugggggccgcccaggugcgccaaagcgcuuccagaggacggggccuuggggaaaagcgcaaagagggagccgauaaggagaaaaagaaagaaaaggaagaggagccuaagaaaccgaacgaaaauaagcugaaacagcccgagcaggccagagcuggcggggaacagccugccgcuggaggcgagcaacccgccgcgggcggggagcagccugccgcuggaggcgaacagcccgccgcugggggagagcagccugccgcgggcggggaacaaccggccgcuggaggcgagcagcccgccgcuggcggggaacagccugccgccggaggcgagcagcccgcugccgggggagagcggccugcggcuggcggggaacaacccgccgccggaggcgagcgcccggcugccggcggggaacagccugcggcuggaggcgagcagcccgccccugcccccagacgggaacaacccgcugccgggggagagcagccugcuccggcgccccgcagagagcagccugcggccggcggggaacagcccgcuccuggcgccggagcuggcgacggggcccggggaggcaacgcgggggccggaaagggccaagggcagaauaaccagggcgcuaauguucccaacgagaaaguggucaaugauuaccuccacaagacgcgcucuagcgugaccacagaauggaccccgugcuccguuacauguggaaacggcgugagaauccggcgcaaggcccaugcugacaaaaagaaagccgagaaucugaccauggaugaccuggaagucgaggccugcgugauggauaagugugcugggauuuuuaacguggucagcaacucucucggacugguuauccuucuggugcucgcgcuguucaauuga

SEQ ID NO: 5214 - RNA, 1026 nt, Artificial Sequence
  derived and/or modified CDS sequence (opt5) from Pk(SGEHIWM26-Y09-60)__AFD97238.1__CSP
augaagaacuucauccugcucgccgugagcuccauucugcuugucgaccugcuccccacccacuuugagcauaauguugaucugucuagagcuaucaacgugaauggcgugagcuucaacaaugucgacacauccucucuuggggccgcgcgggugcgccagagcgcuuccagaggacggggccugggggaaaaaccuaaggagggagccgauaaagaaaagaaaaaggagaaggaaaaagagaaggaggaaccgaaaaagcccaacgagaauaaacucaagcaaccugaacagcccgccgcuggcgccgggggagagcagccugcugccggcgcgggcggggagcagcccgccgcuggagccggcggggaacaaccugcugccggagcgggcggggagcagccggccgcuggagccggcggcgaacagcccgcugccggggccggaggcgagcagccugcugcgggggccggaggcgaacaacccgcugccggggccggaggcgagcagccugcugccggcgcugggggagagcagcccgcggccggcgccgggggagaacagccggcugccggcgcugggggcgagcaaccugcccccgcgccucgcagagaacagcccgccgcuggagccggcggggagcagcccgcuccugccccgcggcgcgaacaacccgcgccuggagccggcgcuggggacggagccagaggcgggaacgcuggcgccggaaagggccaggggcagaauaaccagggagccaauguucccaacgagaaaguggucaaugauuaccugcacaagauucggucuagcgugacgaccgaguggacaccuugcuccguuaccuguggcaacggggugcgcaucagacggcgccaaaaugcuggaaacaaaaaggcggaagaccugacaauggaugaccucgaggucgaagccugcgugauggauaaaugugcuggcauuuuuaacguggucagcaauucucuggggcuuguuauccugcucgugcuggcccuuuucaacuga

SEQ ID NO: 5215 - RNA, 1026 nt, Artificial Sequence
  derived and/or modified CDS sequence (opt5) from Pk(SGEHIWM35-Y09-74)__AFD97243.1__CSP
augaagaacuucauccugcucgccgugagcuccauucugcuugucgaccugcuccccacccacuuugagcauaauguugaucugucuagagcuaucaacgugaauggcgugagcuucaacaaugucgacacauccucucuuggggccgcucaggugcggcaaagcgcgucccgcggaagaggccugggggaaaaaccuaaggagggagccgauaaagaaaagaaaaaggagaaggaaaaagagaaggaggaaccgaaaaagcccaacgagaauaaacucaagcagccugaacagcccgccgcuggcgccgggggagagcagccugcugccggcgcgggcggggagcaacccgccgcuggagccggcggggaacagccugcugccggagcgggcggggagcagccggccgcuggagccggcggcgaacagcccgcugccggggccggaggcgagcaaccugcugcgggggccggaggcgaacagcccgcugccggggccggaggcgagcagccugcugccggcgcugggggagagcagcccgcggccggcgccgggggagaacaaccggcugccggcgcugggggcgagcagccugcccccgcgccucggcgcgaacagcccgccgcuggagccggcggggagcaacccgcuccugccccgagacgggaacagcccgcgccuggagccggcgcuggggacggagcccgcggcgggaacgcuggcgccggaaagggccaggggcagaauaaccaaggagccaauguucccaacgagaaaguggucaaugauuaccugcacaagauuagaucuagcgugacgaccgaguggacaccuugcuccguuaccuguggcaacggggugcggauccgcagacggcagaaugcuggaaacaaaaaggcggaagaccugacaauggaugaccucgaggucgaagccugcgugauggauaaaugugcuggcauuuuuaacguggucagcaauucucuggggcuuguuauccugcucgugcuggcccuuuucaacuga

SEQ ID NO: 5216 - RNA, 1023 nt, Artificial Sequence
  derived and/or modified CDS sequence (opt5) from Pk(UM0014C4)__AHF20645.1__CSP
augaagaacuucauccugcucgccgugagcuccauucugcuugucgaccugcuccccacccacuuugagcauaauguugaucugucuagagcuaucaacgugaauggcgugagcuucaacaaugucgacacauccucucuuggggccgcucaggugcggcaaagcgcgucccgcggaagaggccugggggaaaaaccuaaggagggagccgauaaagaaaagaaaaaggagaaggaaaaagaggaggaaccgaagaaacccaacgagaauaagcucaaacagccugaacaggcccggcccggcgcugggggagagcagccugcccccggcgcuggcggggagcaaccugccccgggagcgggcggggaacagcccgccccuggagcuggcggggagcagcccgccccuggagcuggcggcgaacagcccgccccgggggcgggaggcgagcaaccugcccccggggcuggaggcgaacagccugcccccggggcuggaggcgagcagcccgccccuggcgccgggggaggccagccggcucccggggcgggaggcgagcaaccugcccccggggcuggcggagaacagccugcccccgccccgcgcagagagcagccugcucccggcccugggggagaacaacccgccccugcgccccggcgcgagcagccggcuccuggcgccggggccggagacggcgcuagagggggcaacgccggagcuggcaaggggcagggacagaauaaccaaggcgccaauguucccaacgaaaagguggucaaugauuaccugcacaaaauucggucuagcgugacgaccgaguggacacccugcuccguuaccugugggaacggagugcgcaucagacggaagggccaugcggggaauaaaaaggccgaggaccugacaauggaugaccucgaagucgaggcuugcgugauggauaaaugugccggcauuuuuaacguggucagcaacucucugggacuuguuauccugcucgugcuggcucuuuucaauuga

SEQ ID NO: 5217 - RNA, 1020 nt, Artificial Sequence
  derived and/or modified CDS sequence (opt5) from Pk(LT57)__ADN94510.1__CSP
augaagaacuucauccugcucgccgugagcuccauucugcuugucgaccugcuccccacccacuuugagcauaauguugaucugucuagagcuaucaacgugaauggcgugagcuucaacaaugucgacacauccucucuuggggccgcucaggugcggcaaagcgcgucccgcggaagaggccugggggaaaaacggaaggagggagccgauaaagaaaagaaaaaggagaaggaggaaccuaaaaagccgaacgagaauaaacucaagcagcccgaacaggcccgcgcuggcggggagcagccugccgcuggaggcgaacaacccgccgcgggcggggagcagccugccgcuggaggcgagcagcccgccgcugggggagaacagccugccgcgggcggggagcaaccggccgcuggaggcgaacagcccgccgcuggcggggagcagccugccgccggaggcgaaagacccgcugccgggggagagcagccugcggcuggcggggagcaacccgccgccggaggcgaacagccggcugccggcggggagcggccugcggcuggaggcgaacgccccgccgccgggggagagcagccugcugccggcggggaacaacccgcucccgccccuagacgggagcagccggcggccggcggagagcagcccgcuccuggcgccggggcuggagacggcgcccgcgggggaaacgcgggcgccgggaaaggccagggacaaaauaaccagggcgcuaauguucccaacgaaaagguggucaaugauuaccugcacaagauuagaucuagcgugacgaccgaguggacaccuugcuccguuaccugugggaacggagugcggauccgcagaaaagcccaugcugacaagaaaaaggccgaaaaucugacaauggaugaccucgaggucgaagccugcgugauggauaaaugugcuggcauuuuuaacguggucagcaacucucuggggcuuguuauccugcucgugcuggcgcuuuucaauuga

SEQ ID NO: 5218 - RNA, 1020 nt, Artificial Sequence
  derived and/or modified CDS sequence (opt5) from Pk(SGEHIWM17-Y09-4)__AFD97233.1__CSP
augaagaacuucauccugcucgccgugagcuccauucugcuugucgaccugcuccccacccacuuugagcauaauguugaucugucuagagcuaucaacgugaauggcgugagcuucaacaaugccgacacauccucucuuggggcggcucagguccggcaaagcgccucccgcggaagaggccugggggaaaaaccuaaggagggagccgauaaagaaaagaaaaaggagaaggaagaggagccgaaaaagcccaacgaaaauaaacucaagcagccugacgcugugcccggcggggaggaaccugcccccggacgggagcagccugcuccgggccgcgaggaacccgccccuggcagagagcagcccgcgccugggcgggaagaacccgccccgggacgcgaacaaccugcucccggcagagaggagccugcccccgggcgggaacagcccgcuccuggacgcgagcagccggcccccggcagagaggagccugcgcccgggcgggaacagccugcccccggacgcgaggagccggcuccuggcagagaacaacccgccccuggccgggagcagcccgcuccugggcgcgaacagcccgccccgggaggcgagcagccugcccccgggagagaacaacccgcuccuggaggcgagcagccggcgcccgccccuggggcuggagccggcgauggcgccagagggggaaacgcuggcgccgggaaaggacagggccaaaauaaccagggggcgaauguucccaacgagaagguggucaaugacuaccugcacaagauucggucuagcgugacgaccgaauggacaccuugcuccguuaccuguggcaacggagugcgcauccggagaaaaggccaugcugggaauaagaaagccgaggaucugacaauggacgaucucgaagucgaggccugcgugauggacaagugugcuggaauuuuuaacguggucagcaacucucugggccuuguuauccugcucgugcuggcccuuuucaauuga

SEQ ID NO: 5219 - RNA, 1020 nt, Artificial Sequence
  derived and/or modified CDS sequence (opt5) from Pk(SGEHIWM26-Y09-123)__AFD97240.1__CSP
augaagaacuucauccugcucgccgugagcuccauucugcuugucgaccugcuccccacccacuuugagcauaauguugaucugucuagagcuaucaacgugaauggcgugagcuucaacaaugucgacacauccucucuuggggccgcucaggugcggcaaagcgcgucccgcggaagaggccugggggaaaaaccuaaggagggagccgauaaagaaaagaaaaaggagaaggaagaggagccgaaaaagcccaacgaaaauaaacucaagcagccugacgccguucccggcggggaggaaccugcucccggacgggagcagccugccccgggccgcgaggaacccgcuccuggcagagagcagcccgccccugggcgggaagaacccgcgccgggacgcgaacaaccugcccccggcagagaggagccugcucccgggcgggaacagcccgccccuggacgcgagcagccggcucccggcagagaggagccugcccccgggcgggaacagccugcgcccggacgcgaggagccggccccuggcagagaacaacccgcuccuggccgggagcagcccgccccugggcgcgaacagcccgcuccgggaggcgagcagccugcccccgggagagaacaacccgccccuggaggcgagcagccggcucccgcgccuggggccggagcuggcgauggcgccagagggggaaacgccggcgcugggaaaggacagggccaaaauaaccagggggccaaugugcccaacgagaaggucgugaaugacuaccugcacaagauucggucuagcguuacgaccgaauggacaccuugcuccgugaccuguggcaacggaguccgcauccggagaaaaggccaugcggggaauaagaaagcugaggaucugacaauggacgaucucgaaguggaggccugcgugauggacaagugugccggaauuuuuaacgucguuagcaacucucugggccuugugauccugcucgugcuggcucuuuucaauuga

SEQ ID NO: 5220 - RNA, 1020 nt, Artificial Sequence
  derived and/or modified CDS sequence (opt5) from Pk(TN003)__AFG25477.1__CSP
augaagaacuucauccugcucgccgugagcuccauucugcuugucgaccuguuucccacccacuucgagcauaauguugaucucucuagagcuaucaacgugaauggcgugagcuuuaacaaugucgacacauccucucugggggccgcucaggugcggcaaagcgcgucccgcggaagaggccuuggggaaaaaccuaaggagggagccgauaaagaaaagaaaaaggagaaggaagagaaaccgaagaaacccaacgagaauaagcugaaacagccugccgcuggcggggaacagcccgccgcuggaggcgagcagccugccgcgggcggggaacaacccgccgcuggaggcgagcagccugccgcugggggagagcagccggccgcgggcggggaacagcccgccgcuggaggcgagcggccugccgcuggcggggaacaacccgccgccggaggcgagcagccugcugccgggggagaacgccccgcggcuggcggggagcagccggccgccggaggcgagagaccugcugccggcggggaacagcccgcggcuggaggcgagcaaccugccgccgggggagaacagcccgcucccgccccucggcgcgagcagccgguugcuggcggggaacaacccgccccugcgcccagacgggagcagccugcccccggcgcuggagccggcgacggggcucgcggaggcaacgccggggcgggaaagggccaggggcagaauaaccaaggcgccaaugugccgaacgagaaggucgugaaugauuaccuccacaaaauuagaucuagcguuacgaccgaauggacaccuugcuccgugaccuguggaaacggcguccggauccgcagacggcagaaugcugggaacaagaaagccgaggaccugacaauggaugaccuggaaguggaggcuugcgugauggauaagugugccggaauuuucaacgucguuagcaauucucucggccuggugauccuucuggugcucgcccuguuuaacuga

SEQ ID NO: 5221 - RNA, 1017 nt, Artificial Sequence
  derived and/or modified CDS sequence (opt5) from Pk(LT53)__ADN94524.1__CSP
augagaaacuucauccugcucgccgugagcuccauucugcuugucgaccugcuccccacccacuuugaacauaauguugaucugucucgggcuaucaacgugaauggcgugagcuucaacaaugucgacacauccucucuuggggccgcccaggugcgccaaagcgcuuccagaggacggggccugggggaaaagcgcaaagagggagccgauaaggagaaaaagaaagaaaaggaagaggagccuaagaaaccgaacgaaaauaagcucaaacagcccgagcaggaaagaccuggcggggagcagcccgccccuggacccggcggcgagcaaccugcuccggggcccggaggcgaacagccugcgccccggccugggggagagcagcccgcuccgggcccugggggagaacagcccgccccuggccccggcggggagcaacccgcgccuggaccgggcggggaacagcccgccccucgccccggaggcgagcagccugcucccgggccgggaggcgagcagccugcccccagaccuggcggggaacaacccgcuccuggacccggcggggagcagccggccccucggcccggaggcgaacagcccgcgccugggccgggcggagagcaacccgccccugcuccccgcagagaacagccugcccccgcuccuggcgccggggccggagacggcgcucgcgggggaaacgcgggcgccgggaagggccagggacagaauaaccaaggcgcuaauguucccaacgagaaaguggucaaugauuaccugcacaagauucggucuagcgugacgaccgaguggacaccgugcuccguuaccugugggaacggagugagaauccggcgcagacagaaugccggcaacaagaaagccgaagaccugacaauggaugaccucgaggucgaggcuugcgugauggauaagugugccgggauuuuuaacguggucagcaauucucugggacuuguuauccugcucgugcuggcgcuuuucaacuga

SEQ ID NO: 5222 - RNA, 1014 nt, Artificial Sequence
  derived and/or modified CDS sequence (opt5) from Pk(KH229)__ADN94485.1__CSP
augagaaacuucauccugcucgccgugagcuccauucugcuugucgaccugcuccccacccacuuugagcauaauguugaucugucucgggcuaucaacgugaauggcgugagcuucaacaaugucgacacauccucucuuggggccgcccaggugcgccaaagcgcuuccagaggacggggccugggggaaaagccuaaagagggagccgauaaggagaaaaagaaagaaaaggaagagaagccgaaaaagcccaacgagaauaaacucaagcagccuggcggggaacagcccgccgcuggaggcgagcagccugccgcuggcggggaacaacccgccgcgggaggcgagcagccugccgcugggggagagcgcccggccgcuggcggggaacagcccgccgcgggaggcgagcagccugccgcuggcggggaacaacccgccgcuggaggcgagcagccugccgccgggggagaaagacccgcugcgggcggggagcagccggccgcuggaggcgagcagccugccgccggcggggaacaacccgcugccggaggcgagcggccugcggcugggggagaacagcccgcccccgccccucgcagagagcagccggcugccggcggggaacaacccgcuccugcgccccggcgcgagcagccugcgcccggcgccggagcuggcgacggggccagaggaggcaacgcuggggccggaaaaggccaggggcagaauaaccaaggcgcgaauguuccgaacgagaagguggucaaugauuaccugcacaagauucggucuagcgugacgaccgaauggacaccuugcuccguuaccuguggaaacggcgugcgcaucagacggcgccagaaugccgggaacaaaaaggcugaggaccugacaauggaugaccucgaagucgaggccugcgugauggauaaaugugcuggaauuuuuaacguggucagcaauucucugggccuuguuauccugcucgugcuggcccuuuucaacuga

SEQ ID NO: 5223 - RNA, 1014 nt, Artificial Sequence
  derived and/or modified CDS sequence (opt5) from Pk(KH468)__ADN94487.1__CSP
augaagaacuucauccugcucgccgugagcuccauucugcuugucgaccuguuucccacccacuucgagcauaauguugaucucucuagagcuaucaacgugaauggcgugagcuuuaacaaugucgacacauccucucugggggccgcucaggugcggcaaagcgcgucccgcggaagaggccuuggggaaaaaccuaaggagggagccgauaaagaaaagaaaaaggagaaggaagagaaaccgaagaaacccaacgagaauaagcugaaacagccuggcggggaacagcccgccgcuggaggcgagcagccugccgcuggcggggaacaacccgccgcgggaggcgagcagccugccgcugggggagagcggccggccgcuggcggggaacagcccgccgcgggaggcgagcagccugccgcuggcggggaacaacccgccgcuggaggcgagcagccugccgccgggggagaacgccccgcugcgggcggggagcagccggccgcuggaggcgagcagccugccgccggcggggaaagacccgcugccggaggcgagcaaccugcggcugggggagaacagcccgcccccgccccucggcgcgagcagccggcugccggcggggaacaacccgcuccugcccccagacgggagcagccugcgcccggcgccggagcuggcgacggggcccgcggaggcaacccgggggcuggaaagggccaggggcagaauaaccaaggcgccaauguuccuaacgagaagguggucaaugauuaccuccacaaaauuagaucuagcgugacgaccgaauggacacccugcuccguuaccuguggaaacggcgugcggauccgcagacggcagaaugcggggaacaagaaagccgaggaccugacaauggaugaccuggaagucgaggcuugcgugauggauaagugugccggaauuuucaacguggucagcaauucucucggccugguuauccuucuggugcucgcucuguuuaacuga

SEQ ID NO: 5224 - RNA, 1014 nt, Artificial Sequence
  derived and/or modified CDS sequence (opt5) from Pk(LT33)__ADN94523.1__CSP
augagaaacuucauccugcucgccgugagcuccauucugcuugucgaccugcuccccacccacuuugagcauaauguugaucugucucgggcuaucaacgugaauggcgugagcuucaacaaugucgacacauccucucuuggggccgcucaggugcgccaaagcgcuuccagaggacggggccugggggaaaagcgcaaagagggagccgauaaggagaaaaagaaagaaaaggaagaggagccuaagaaaccgaacgaaaauaagcucaaacagcccggcggggagcagccugccgcuggaggcgaacagcccgccgcuggcggggagcaaccugccgcgggaggcgagcagcccgccgcugggggagaaagaccugccgcuggcggggagcagccggccgcgggaggcgaacagcccgccgcuggcggggagcaaccugccgcuggaggcgaacagcccgccgccgggggagagcggccugcugcgggcggggagcagcccgccgcuggaggcgaacagccggccgccggcggggagcgcccugcugccggaggcgaacaacccgcggcugggggagagcagccugcccccgcccccagacgggaacagccugcugccggcggggagcaaccggcucccgccccucgcagagagcagcccgcgccuggcgccggagcuggcgacggggcccggggaggcaaccccggggcuggaaagggccaggggcagaauaaccaaggcgccaauguuccgaacgaaaaaguggucaaugauuaccugcacaagauucgcucuagcgugacgaccgaguggacaccuugcuccguuaccuguggaaacggcgugagaauccggcgcagacagaaugcggggaacaagaaagccgaagaccugacaauggaugaccucgaggucgaagcgugcgugauggauaagugugccggaauuuuuaacguggucagcaauucucugggccuuguuauccugcucgugcuggcucuuuucaacuga

SEQ ID NO: 5225 - RNA, 1014 nt, Artificial Sequence
  derived and/or modified CDS sequence (opt5) from Pk(LT64)__ADN94520.1__CSP
augaagaacuucauccugcucgccgugagcuccauucugcuugucgaccuguuucccacccacuucgagcauaauguugaucucucuagagcuaucaacgugaauggcgugagcuuuaacaaugucgacacauccucucugggggccgcucaggugcggcaaagcgcgucccgcggaagaggccuuggggaaaaaccuaaggagggagccgauaaagaaaagaaaaaggagaaggaagagaaaccgaagaaacccaacgagaauaagcugaaacagccuggcggggaacagcccgccgcuggaggcgagcagccugccgcuggcggggaacaacccgccgcgggaggcgagcagccugccgcugggggagagcagccggccgcuggcggggaacagcccgccgcgggaggcgagcggccugccgcuggcggggaacaacccgccgcuggaggcgagcagccugccgccgggggagaacgccccgcugcgggcggggagcagccggccgcuggaggcgagagaccugccgccggcggggaacagcccgcugccggaggcgagcaaccugcggcugggggagaacagcccgcccccgccccucggcgcgagcagccggcugccggcggggaacaacccgcuccugcccccagacgggagcagccugcgcccggcgccggagcuggcgacggggcccgcggaggcaacgcuggggccggaaagggccaggggcagaauaaccaaggcgcgaauguuccgaacgagaagguggucaaugauuaccuccacaaaauuagaucuagcgugacgaccgaauggacaccuugcuccguuaccuguggaaacggcgugcggauccgcagacggcagaaugccgggaacaagaaagcugaggaccugacaauggaugaccuggaagucgaggccugcgugauggauaagugugcuggaauuuucaacguggucagcaauucucucggccugguuauccuucuggugcucgcccuguuuaacuga

SEQ ID NO: 5226 - RNA, 1014 nt, Artificial Sequence
  derived and/or modified CDS sequence (opt5) from Pk(TB016)__AFG25473.1__CSP
augaagaacuucauccugcucgccgugagcuccauucugcuugucgaccuguuucccacccacuucgagcauaauguugaucucucuagagcuaucaacgugaauggcgugagcuuuaacaaugucgacacauccucucugggggccgcucaggugcggcaaagcgcgucccgcggaagaggccuuggggaaaaaccuaaggagggagccgauaaagaaaagaaaaaggagaaggaagagaaaccgaagaaacccaacgagaauaagcugaaacagccuggcggggaacagcccgccgcuggaggcgagcagccugccgcuggcggggaacaacccgccgcgggaggcgagcagccugccgcugggggagagcggccggccgcuggcggggaacagcccgccgcgggaggcgagcagccugccgcuggcggggaacaacccgccgcuggaggcgagcagccugccgccgggggagaacgccccgcugcgggcggggagcagccggccgcuggaggcgagcagccugccgccggcggggaaagacccgcugccggaggcgagcaaccugcggcugggggagaacagcccgcccccgccccucggcgcgagcagccggcugccggcggggaacaacccgcuccugcccccagacgggagcagccugcgcccggcgccggagcuggcgacggggcccgcggaggcaacgcuggggccggaaagggccaggggcagaauaaccaaggcgcgaauguuccgaacgagaagguggucaaugauuaccuccacaaaauuagaucuagcgugacgaccgaauggacaccuugcuccguuaccuguggaaacggcgugcggauccgcagacggcagaaugccgggaacaagaaagcugaggaccugacaauggaugaccuggaagucgaggccugcgugauggauaagugugcuggaauuuucaacguggucagcaauucucucggccugguuauccuucuggugcucgcccuguuuaacuga

SEQ ID NO: 5227 - RNA, 1014 nt, Artificial Sequence
  derived and/or modified CDS sequence (opt5) from Pk(UM0021C10)__AHF20667.1__CSP
augaagaacuucauccugcucgccgugagcuccauucugcuugucgaccuguuucccacccacuucgagcauaauguugaucucucuagagcuaucaacgugaauggcgugagcuuuaacaaugucgacacauccucucugggggccgcccaggugcggcaaagcgcuucccgcggaagaggccuuggggaaaaaccuaaggagggagccgauaaagaaaagaaaaaggagaaggaagagaaaccgaagaaacccaacgagaauaagcugaaacagccuggcggggaacagucugccgcuggaggcgagcagcccgccgcuggcggggaacaaccugccgcgggaggcgagcagcccgccgcugggggagagcagccugccgcuggcggggaacagccggccgcgggaggcgagcggcccgccgcuggcggggaacaaccugccgcuggaggcgagcagcccgccgccgggggagaacgcccugcugcgggcggggagcagcccgccgcuggaggcgagagaccggccgccggcggggaacagccugcugccggaggcgagcaacccgcggcugggggagaacagccugcccccgcgccccggcgcgagcagccugcugccggcggggaacaaccggcucccgccccuagacgggagcagcccgcgccuggcgccggagcuggcgacggggcccgcggaggcaacgcuggggccggaaagggccaggggcagaauaaccaaggcgcgaauguucccaacgagaagguggucaaugauuaccuccacaaaauuagaagcuccgugacgaccgaauggacaccgugcagcguuaccuguggaaacggcgugcggauccgcagacggcagaaugccgggaacaagaaagcugaggaccugacaauggaugaccuggaagucgaggccugcgugauggauaagugugcuggaauuuucaacguggucucuaauucccucggccugguuauccuucuggugcucgcccuguuuaacuga

SEQ ID NO: 5228 - RNA, 1011 nt, Artificial Sequence
  derived and/or modified CDS sequence (opt5) from Pk(UMRAC2)__AHF20618.1__CSP
augaagaacuucauccugcucgccgugagcuccauucugcuugucgaccugcuccccacccacuuugagcauaauguugaucugucuagagcuaucaacgugaauggcgugagcuucaacaaugucgacacauccucucuuggggccgcucaggugcggcaaagcgcgucccgcggaagaggccugggggaaaaaccuaaggagggagccgauaaagaaaagaaaaaggagaaggaaaaagaggaggaaccgaagaaacccaacgagaauaagcucaaacagccugaaggcaaccgggaggcccccgggcagccugagggaaaucgcgaagcucccggccagccugagggcaacagagaagccccggggcaacccgagggaaaucgggaagcuccuggccagcccgaggggaaccgcgaggccccuggacagcccgaaggcaauagagaggcgccggggcagccugaaggaaaccgggaggcccccggccaaccugaaggcaaucgcgaggcucccgcccagcccgaggggaacagagaagcuccuggacagccggagggcaaccgggaagcccccgcgcagccucaagggaauggaggcgccgggcaggcucagcccgagggaaaccgcgaagccccugcucaaccccagggcaauggcggggccggacaggcccagccgcaaaagaacgagggcgggaaugcuggagcgagaaagggccaggggcagaacaaucagggcgccaacguuccuaaugagaaaguggucaacgacuaccugcacaagauucggucuagcgugacgaccgaauggacacccugcuccguuaccuguggaaauggcgugcgcaucagacggaaagggcaugcuggaaacaagaaagccgaggaucugacaauggacgaucucgaagucgaggccugcgugauggacaagugugcuggcauuuuuaauguggucagcaacucucuggggcuuguuauccugcucgugcuggcccuuuucaauuga

SEQ ID NO: 5229 - RNA, 1008 nt, Artificial Sequence
  derived and/or modified CDS sequence (opt5) from Pk(UMANC1)__AHF20619.1__CSP
augaagaacuucauccugcucgccgugagcuccauucugcuugucgaccugcuccccacccacuuugagcauaauguugaucugucuagagcuaucaacgugaauggcgugagcuucaacaaugucgacacauccucucuuggggccgcucaggugcggcaaagcgcgucccgcggaagaggccugggggaaaaaccuaaggagggagccgauaaagaaaagaaaaaggagaaggaaaaagaggaggaaccgaagaaacccaacgagaauaagcucaaacagccugaaggcaaccgggaggcccccgggcagccugagggaaaucgcgaagcucccggccagccugagggcaacagagaagccccggggcaacccgagggaaaucgggaagcuccuggccagcccgaggggaaccgcgaggccccuggacagcccgaaggcaauagagaggcgccggggcagccugaaggaaaccgggaggcccccggccaaccugaaggcaaucgcgaggcucccgggcagcccgagggaaacagagaagccccuggccagccggaggggaaccgggaagcucccggacagccugagggcaaucgcgaagcccccgcgcaaccugaggggaacagagaggcccccgcucagccgcagggaaauggcggcgccgggcaagcucagccucagaagaacgaaggaggcaaugccggggcccggaagggacagggccaaaacaaucagggggcuaacgcgcccaaugagaaaguugugaacgacuaccugcagaagauucgcucuagcgucacgaccgaauggacaccuugcuccgugaccuguggcaauggaguuagaaucaaacggaaggcccacgcugauaaaaagaaagccgaggaccugacaauggaugaccucgagguggaagccugcgucauggauaagugugcuggcauuuuuaacguggugagcaauucucuggggcuugucauccugcucguucuggcccuuuucaacuga

SEQ ID NO: 5230 - RNA, 1002 nt, Artificial Sequence
  derived and/or modified CDS sequence (opt5) from Pk(LT48)__ADN94505.1__CSP
augagaaacuucauccugcucgccgugagcuccauucugcuugucgaccugcuccccacccacuuugagcauaauguugaucugucucgggcuaucaacgugaauggcgugagcuucaacaaugucgacacauccucucuuggggccgcucaggugcgccaaagcgcguccagaggacggggccugggggaaaagcgcaaagagggagccgauaaggagaaaaagaaagagaaggaagaggagccuaagaaaccgaacgaaaauaagcucaaacagcccaacgccgagggcggggcuaaugccggacagccuaacgcugaaggcggcgccaaugcggggcagcccaacgccgagggaggcgcuaaugccgggcaaccuaacgcugagggaggcgccaaugcggggcagcccaacgccgaaggaggcgcuaacgccggccagccuaaugcugaagggggagccaacgccggccagccgaaugcugaagggggagcgaacgccggccaacccaaugcugaagggggagccaacgccggccagccuaaugcugagggcggggccaacgcgggacagcccaaugcugagggcggggccaacgccggacagccuaaugcugagggcggggccaacgcuagacaaccccaggccgaaggcggaggcgcgaaugcccggcaagggggaaacgagggcaauaagcaggcugggaaaggacagggccagaacaaccagggggccaaugcuccgaacgaaaagguugugaaugacuaccugcaaaagauucgcucuagcgucacgaccgaguggacaccuugcuccgugaccuguggcaacggaguuagaauccggcgcagagcccacgcggauaaaaagaaagccgaagaccugacaauggaugaccucgagguggaggcuugcgucauggauaagugugccggcauuuuuaauguggugagcaacucucuggggcuugucauccugcucguucuggcucuuuucaauuga

SEQ ID NO: 5231 - RNA, 993 nt, Artificial Sequence
  derived and/or modified CDS sequence (opt5) from Pk(KH176)__ADN94486.1__CSP
augaagaacuucauccugcucgccgugagcuccauucugcuugucgaccuguuucccacccacuucgagcauaauguugaucucucuagagcuaucaacgugaauggcgugagcuuuaacaaugucgacacauccucucugggggccgcucaggugcggcaaagcgcgucccgcggaagaggccuuggggaaaaaccuaaggagggagccgauaaagaaaagaaaaaggagaaggaagagaaaccgaagaaacccaacgagaauaagcugaaacagccuggcggggaacagcccgccgcuggaggcgagcagccugccgcuggcggggaacaacccgccgcgggaggcgagcagccugccgcugggggagagcagccggccgcuggcggggaacggcccgccgcgggaggcgagcagccugccgcuggcggggaacaacccgccgcuggaggcgagcgcccugccgccgggggagaacagcccgcugcgggcggggagagaccggccgcuggaggcgagcagccugccgccggcggggaacagcccgcugccggaggcgagcaaccugcgcccgcuccccggcgcgaacagccugccgccgggggagagcagccggcucccgccccuagacgggaacaacccgcuccuggcgccggggcgggcgacggagcccgcggcgggaacgcuggagccggcaaggggcagggacagaauaaccagggcgcuaauguucccaacgagaagguggucaaugauuaccuccacaaaauuagaucuagcgugacgaccgaguggacaccgugcuccguuaccugugggaacggcgugcggauccgcagacggcaaaaugccggaaacaagaaagcggaagaccugacaauggaugaccuggaggucgaagccugcgugauggauaagugugcuggcauuuucaacguggucagcaauucucucgggcugguuauccuucuggugcucgcccuguuuaacuga

SEQ ID NO: 5232 - RNA, 993 nt, Artificial Sequence
  derived and/or modified CDS sequence (opt5) from Pk(LT36)__ADN94511.1__CSP
augagaaacuucauccugcucgccgugagcuccauucugcuugucgaccugcuccccacccacuuugagcauaauguugaucugucucgggcuaucaacgugaauggcgugagcuucaacaaugucgacacauccucucuuggggccgcucaggugcgccaaagcgcguccagaggacggggccugggggaaaagcgcaaagagggagccgauaaggagaaaaagaaagaaaaggaagagaagccuaaaaagccgaacgagaauaaacucaagcagcccggcggggaacagccugccgcuggaggcgagcagcccgccgcuggcggggaacaaccugccgcgggaggcgagcagcccgccgcugggggagagcagccugccgcuggcggggaacagccggccgcgggaggcgagcaacccgccgcuggcggggaacagccugccgcuggaggcgagcagcccgccgccgggggagaacagccugcugcgggcggggagcaacccgccgcuggaggcgagcagccggccccugcccccagacgggaacagccugcugccggcggggagcaacccgcggcuggaggcgaacagcccgccccugccccgcgcagagagcagcccgcuccugggggagaacagcccgccccuggcgcuggggccggcgacggagcgcggggcgggaaccccggagccggcaaagggcaaggacagaauaaccagggcgcuaauguuccgaacgagaagguggucaaugauuaccugcacaagauucgcucuagcgugacgaccgaguggacaccuugcuccguuaccugugggaacggcgugagaauccggcgcaaagcccaugcugacaagaaaaaggccgaaaaucugacaauggaugaccucgaggucgaagcgugcgugauggauaaaugugccggaauuuuuaacguggucagcaacucucugggccuuguuauccugcucgugcuggcucuuuucaauuga

SEQ ID NO: 5233 - RNA, 993 nt, Artificial Sequence
  derived and/or modified CDS sequence (opt5) from Pk(TB066)__AFG25475.1__CSP
augaagacccuguuccuccuggccgugagcuccauccuucuggucgaccucuuucccacacacuucgagcauaacguugaucugucuagagcuauuaaugugaacggcgugagcuuuaauaacgucgacacguccucucuuggggccgcccaggugcggcaaagcgcuucccgcggaagaggccugggggaaaaacggaaggagggagccgauaaagaaaagaaaaaggagaaggaagagaaaccuaagaaaccgaaugagaacaagcucaaacagcccggcggggaacagccugccgcuggaggcgagcagcccgccgcuggcggggaacaaccugccgcgggaggcgagcagcccgccgcugggggagagcagccugccgcuggcggggaacagccggccgcgggaggcgagcaacccgccgcuggcggggaacagccugccgcuggaggcgagcagcccgccgccgggggagaacagccugcugcgggcggggagcaacccgccgcuggaggcgagcagccggccccugcgccccgcagagaacagccugcugccggcggggagcaacccgcggcuggaggcgaacagcccgccccugccccgcggcgcgagcagcccgcugccgggggagaacagccugcucccggcgccggggcgggcgacggagccagaggcgggaauccuggagcuggcaaggggcaaggacagaacaaucagggcgccaacguucccaaugagaagguggucaacgauuaccugcacaaaauccggucuagcgugaccacagaguggaccccgugcuccguuacaugugggaauggcgugcgcauuagacggaaggcucaugccgacaaaaagaaagcggaaaaccugaccauggaugaccucgaggucgaagccugcgugauggauaagugugcuggaaucuucaauguggucagcaacucucugggccuuguuauucugcucgugcuggcccuuuuuaacuga

SEQ ID NO: 5234 - RNA, 993 nt, Artificial Sequence
  derived and/or modified CDS sequence (opt5) from Pk(UM006C6)__AHF20642.1__CSP
augaagaacuucauccugcucgccgugagcuccauucugcuugucgaccugcuccccacccacuuugagcauaauguugaucugucuagagcuaucaacgugaauggcgugagcuucaacaaugucgacacauccucucuuggggccgcccaggugcggcaaagcgcuucccgcggaagaggccugggggaaaaaccuaaggagggagccgauaaagaaaagaaaaaggagaaggaagaggagccgaaaaagcccaacggcaauaaacucaagcagccugcccccgggggagaacagccugcucccggcggcgagcagccugcccccgggggagaacaaccggcuccuggcggggagcagcccgccccuggaggcgagcagcccgcgccugggggagaacagccggcccccggcggcgagcaaccugcucccgggggagaacagcccgccccuggcggggagcagccggcucccggaggcgaacagccugcccccgggggagagcaaccugcgcccggcggcgagcagccggccccugggggagaacagcccgcuccugcgccccggcgcgagcaaccugcucccggcggggaacagccggccccuggaggcgagcagcccgcccccagacgggaacagccugcuccgggggcgggcgccggagacggcgcucgcgggggaaacgccggcgccgggaaaggacaaggccagaauaaccagggggcuucuguucccaaugagaagguggucaacgauuaccugcacaagauuagaagcuccgugacgaccgaguggacaccuugcagcguuaccuguggcaauggagugcggauccgcagaaaagcccaugcggacaagaaaaaggcugaagaucugacaauggacgaucucgaggucgaagccugcgugauggacaaaugugccggcauuuuuaacguggucucuaauucccuggggcuuguuauccugcucgugcuggcucuuuucaacuga

SEQ ID NO: 5235 - RNA, 984 nt, Artificial Sequence
  derived and/or modified CDS sequence (opt5) from Pk(UM004C4)__AHF20641.1__CSP
augaagaacuucauccugcucgccgugagcuccauucugcuugucgaccugcuccccacccacuuugagcauaauguugaucugucuagagcuaucaacgugaauggcgugagcuucaacaaugucgacacauccucucuuggggccgcucaggugcggcaaagcgcgucccgcggaagaggccugggggaaaaaccuaaggagggagccgauaaagaaaagaaaaaggagaagggcaaagaaaaggaggaggaaccgaaaaagcccaacgagaauaaacucaagcagccuaacgaagggcagccccaggcccaaggagacggcgcuaaugccggccagccucaggcucagggggauggagccaacgcgggccaaccccaggcccagggggacggagcuaaugccggccagccucaagcucagggggauggagccaacgcgggccagccgcaagcccagggcgacggggcuaaugccggacagccccaggcucaaggcgauggggccaacgccggacagccucaggcucagggcgacggggcgaaugccggacaaccccaggcucagggcgaucgggccaacgccggccagccucaagcucagggggacggagccaacguuccccgccagggcagaaaugggggaggcgcgccggcugggggcaacgagggaaauaagcaggccggcaaagggcaaggacagaacaaucagggcgccaacgcuccuaaugagaagguggucaacgauuaccugcacaaaauucggucuagcgugacgaccgaauggacacccugcuccguuaccugugggaauggagugcgcaucagacggaaggcccaugcuggcaacaaaaaggccgaggaccugacagucgacgaucucgaaguggaggcgugcgugauggacaaaugugccgggauuuuuaaugucguuagcaacucucugggccuugugauccugcucgugcuggcucuuuucaauuga

SEQ ID NO: 5236 - RNA, 978 nt, Artificial Sequence
  derived and/or modified CDS sequence (opt5) from Pk(UMHAC5)__AHF20632.1__CSP
augaagaacuucauccugcucgccgugagcuccauucugcuugucgaccugcuccccacccacuuugagcauaauguugaucugucuagagcuaucaacgugaauggcgugagcuucaacaaugucgacacauccucucuuggggccgcucaggugcggcaaagcgcgucccgcggaagaggccugggggaaaaaccuaaggagggagccgauaaagaaaagaaaaaggagaaggaaaaagaggaggaaccgaagaaacccaacgagaauaagcucaaacagccugaaggcaaccgggaggcccccgggcagccugagggaaaucgcgaagcucccggccagccugagggcaacagagaagccccggggcaacccgagggaaaucgggaagcuccuggccagcccgaggggaaccgcgaggccccuggacagcccgaaggcaauagagaggcgccggggcagccugaaggaaaccgggaggcccccggccaaccugaaggcaaucgcgaggcucccgcccagcccgaggggaacagagaagcuccuggacagccggagggcaaccgggaagcccccgcgcagccugaggggaaucgcgaaacgcccgcccaaccucagggaaacggcggggcuggacaggcccaaccccagaagaaugagggcggcaacgcuggggccagaaagggacagggccagaauaaccaaggggccaaugcuccgaacgagaaaguugugaaugacuaccugcagaagauucggucuagcgucaccacagaauggaccccuugcuccgugacauguggaaacggcguucgcaucaaaagaaaggcgcacgccgauaaaaagaaagcugaggaccugaccauggaugaccucgaaguggaggccugcgucauggauaagugugccgggauuuuuaauguggugagcaacucucugggccuugucauccugcucguucuggcucuuuucaauuga

SEQ ID NO: 5237 - RNA, 978 nt, Artificial Sequence
  derived and/or modified CDS sequence (opt5) from Pk(UMSYC3)__AHF20626.1__CSP
augaagaacuucauccugcucgccgugagcuccauucugcuugucgaccugcuccccacccacuuugagcauaauguugaucugucuagagcuaucaacgugaauggcgugagcuucaacaaugucgacacauccucucuuggggccgcucaggugcggcaaagcgcgucccgcggaagaggccugggggaaaaaccuaaggagggagccgauaaagaaaagaaaaaggagaaggaaaaagaggaggaaccgaagaaacccaacgagaauaagcucaaacagccugaaggcaaccgggaggcccccgggcagccugagggaaaucgcgaagcucccggccagccugagggcaacagagaagccccggggcaacccgagggaaaucgggaagcuccuggccagcccgaggggaaccgcgaggccccuggacagcccgaaggcaauagagaggcgccggggcagccugaaggaaaccgggaggcccccggccaaccugaaggcaaucgcgaggcucccgcccagcccgaggggaacagagaagcuccuggacagccggagggcaaccgggaagcccccgcgcagccugaggggaaucgcgaagcccccgcucaaccucagggaaacggcggggccggacaggcucaaccccagaagaaugagggcggcaacgccggggccagaaagggacagggccagaauaaccaaggggcuaaugcgccgaacgagaaaguugugaaugacuaccugcagaagauucggucuagcgucacgaccgaauggacaccuugcuccgugaccuguggaaacggcguucgcaucaaaagaaaggcccacgcugauaaaaagaaagccgaggaccugacaauggaugaccucgaaguggaggccugcgucauggauaagugugcugggauuuuuaauguggugagcaacucucugggccuugucauccugcucguucuggcccuuuucaauuga

SEQ ID NO: 5238 - RNA, 966 nt, Artificial Sequence
  derived and/or modified CDS sequence (opt5) from Pk(LT33)__ADN94509.1__CSP
augaagaacuucauccugcucgccgugagcuccauucugcuugucgaccugcuccccacccacuuugagcauaauguugaucugucuagagcuaucaacgugaauggcgugagcuucaacaaugucgacacauccucucuuggggccgcucaggugcggcaaagcgcgucccgcggaagaggccugggggaaaaacggaaggagggagccgauaaagaaaagaaaaaggagaaggaagaggagccuaaaaagccgaacgaaaauaaacucaagcagcccgagcaggcccgcgcuggcggggaacagccugccgcuggaggcgagcaacccgccgcgggcggggagcagccugccgcuggaggcgaacagcccgccgcugggggagagcagccugccgcgggcggggaacaaccggccgcuggaggcgagcagcccgccgcuggcggggaacagccugccgccggaggcgagcagcccgcugccgggggagagcaaccugcggcuggcggggaacagcccgccccggccccuagacgggagcagcccgcugccggaggcgaacaaccugcgcccgcuccccgcagagagcagccugccgccggcggggaacagccggcucccggagccggcgcuggggacggagcccggggcgggaacgcgggcgccggaaaaggccaggggcaaaauaaccagggagcuaauguuccuaacgagaagguggucaaugauuaccugcacaagauucgcucuagcgugacgaccgaguggacacccugcuccguuaccuguggcaacggggugagaauccggcgcaaagcccaugcugacaagaaaaaggccgaaaaucugacaauggaugaccucgaggucgaagcgugcgugauggauaaaugugccggaauuuuuaacguggucagcaacucucugggccuuguuauccugcucgugcuggcucuuuucaauuga

SEQ ID NO: 5239 - RNA, 960 nt, Artificial Sequence
  derived and/or modified CDS sequence (opt5) from Pk(UM0032C4)__AHF20653.1__CSP
augaagaacuucauccugcucgccgugagcuccauucugcuugucgaccugcuccccacccacuuugagcauaauguugaucugucuagagcuaucaacgugaauggcgugagcuucaacaaugucgacacauccucucuuggggccgcucaggugcggcaaagcgcgucccgcggaagaggccugggggaaaaaccuaaggagggagccgauaaagaaaagaaaaaggagaaggaaaaagaggaggaaccgaagaaacccaacgagaauaagcucaaacagccuaacgccgaaggcgacggggcuaaugcccggcagcccaacgcugagggagauggcgccaaugcgcgccagccuaacgccgagggcgacggggcuaaugccagacaacccaacgcugaaggagauggcgccaaugcgcggcagccuaacgccgagggggacggagcuaacgcccgccagccgaaugcugaaggcgauggggccaacgccagacagcccaaugcugagggaggcggcgcgaacgcccggcaaccucaggcugaaggggacggagccaaugcccgccagccccaggcucaaggcgaugggggaaacgccagacagggcgggaauggaggcggcgcgccugcugggggaaacgagggcaauaagcaggccgggaagggacaaggccagaacaaucagggggccaacgcucccaaugagaaaguugugaacgacuaccugcagaagauucggucuagcgucacgaccgaauggacaccgugcuccgugaucuguggcaauggaguucgcauuagacggcgcgcccacgcugauaaaaagaaagccgaggaccugaccauggacgaucucgaaguggaggcgugcgucauggacaagugugccggcaucuuuaacguggugagcaacucucugggguucgucauccuucugguucucgcucuguuuaauuga

SEQ ID NO: 5240 - RNA, 951 nt, Artificial Sequence
  derived and/or modified CDS sequence (opt5) from Pk(SGEHIH1-im-Y09-80)__AFD97207.1__CSP
augaagaacuucauccugcucgccgugagcuccauucugcuugucgaccugcuccccacccacuuugagcauaauguugaucugucuagagcuaucaacgugaauggcgugagcuucaacaaugucgacacauccucucuuggggccgcucaggugcggcaaagcgcgucccgcggaagaggccugggggaaaaaccuaaggagggagaugacaaagaaaagaaaaaggagaaggaaaaagaggaggaaccgaagaaacucaacgagaauaaccccaagaaaccuaaugaagagggcgauggggccaagcugaagcagcccaacgaggaaggagacggcgccaaacugaagcagccuaaugcugagggcggggccaacgcuggacagcccaaugccgaaggcggggcgaacgccggacaaccuaaugcugagggcggggccaacgcucggcagccgaacgccgaaggaggcgcgaaugccggccagcccaacgcugaagggggagccaaugcuggccagccuaacgccgaagggggagccaaugcucgccaaccccaggcggagggcgggggagccaacgcuagacagccucaggccgagggcggcggggccaaugcucggcaaggaggcaacgaggggaauaaacaggccggaaagggccaggggcaaaacaaucagggcgcgaacgcucccaaugagaaaguugugaacgauuaccuccagaagauucgcucuagcgucacgaucgaauggaccccgugcuccgugacauguggaaauggcguucggauuagacgcagagcccacgccgacaaaaagaaggcugaggaucugaccauggacgaucuugagguggaagccugcgucauggacaaaugugcugggaucuuuaacguggugagcaacucucugggacucgucauccugcuuguucuggcccucuucaauuga

SEQ ID NO: 5241 - RNA, 939 nt, Artificial Sequence
  derived and/or modified CDS sequence (opt5) from Pk(LT33)__ADN94514.1__CSP
augagaaacuucauccugcucgccgugagcuccauucugcuugucgaccugcuccccacccacuuugagcauaauguugaucugucucgggcuaucaacgugaauggcgugagcuucaacaaugucgacacauccucucuuggggccgcucaggugcgccaaagcgcguccagaggacggggccugggggaaaagcgcaaagagggagccgauaaggagaaaaagaaagaaaaggaagaggagccuaagaaaccgaacgaaaauaagcucaaacagcccgagcaggccgcuccuggcgccgggggagaacagcccgcuccuggcgccggcggggagagacccgcgccuggagccggcggggagcaaccggcucccggagccggcggggaacagccugcucccggagccggcggcgagcagccugcgcccggggccggaggcgaacagccggcugccgggggagagcaaccugcugccggcggggaacagcccgccccugcuccccggcgcgagcagcccgcggccggaggcgagcagccugcuccggcccccagacgggaacaaccugccgcuggcggggagcagcccgccccuggagcgggcgcuggggacggagcccgcggcgggaacgccggcgcuggaaagggccaggggcaaaauaaccagggagccaauguucccaacgaaaaaguggucaaugauuaccugcacaagauuagaucuagcgugacgaccgaguggacaccgugcuccguuaccuguggcaacggggugcggauccgcagaaaggcucaugccgacaaaaagaaagcggaaaaucugacaauggaugaccucgaggucgaggccugcgugauggauaagugugcuggaauuuuuaacguggucagcaacucucugggccuuguuauccugcucgugcuggcccuuuucaauuga

SEQ ID NO: 5242 - RNA, 894 nt, Artificial Sequence
  derived and/or modified CDS sequence (opt5) from Pk(SGEHIWM26-Y09-98)__AFD97239.1__CSP
augaagaacuucauccugcucgccgugagcuccauucugcuugucgaccugcuccccacccacuuugagcauaauguugaucugucuagagcuaucaacgugaauggcgugagcuucaacaaugucgacacauccucucuuggggccgcucaggugcggcaaagcgcuucccgcggaagaggccugggggaaaaaccuaaggagggagccgauaaagaaaagaaaaaggagaaggaagaggagccgaaaaagcccaacgaaaauaaacucaagcagccugacacgguucccggcggggaggaaccugcccccggacgggagcagccugcuccgggccgcgaggaacccgccccuggcagagagcagcccgcuccugggcgggaagaacccgccccgggacgcgaacaaccugcgcccggcagagaggagccugcccccgggcgggaacagcccgcuccuggacgcgagcagccggcccccggcagagaggagccugcucccgggcgggaacagccugcccccggacgcgaggagccggcgccugcccccggcgcuggcgccggggauggagcuagaggcgggaacgccggagccggcaaagggcaaggacagaauaaccagggcgcuaaugugccuaacgaaaaggucgugaaugacuaccugcacaagauucggucuagcguuaccacagaguggacccccugcuccgugacauguggcaacgggguccgcaucagacggaaaggacaugcgggcaauaagaaagccgaagaucugaccauggacgaucucgagguggaagcgugcgugauggacaagugugccgggauuuuuaacgucguuagcaacucucugggacuugugauccugcucgugcuggcccuuuucaauuga

SEQ ID NO: 5243 - RNA, 801 nt, Artificial Sequence
  derived and/or modified CDS sequence (opt5) from Pk(KH296)__ADN94490.1__CSP
augagaaacuucauccugcucgccgugagcuccauucugcuugucgaccugcuccccacccacuuugagcauaauguugaucugucucgggcuaucaacgugaauggcgugagcuucaacaaugucgacacauccucucuuggggccgcucaggugcgccaaagcgcguccagaggacggggccugggggaaaagcgcaaagagggagccgauaaggagaaaaagaaagaaaaggaagaggagccuaagaaaccgaacgaaaauaagcucaaacagcccgagcaggccgcuccuggcgccgggggagaacagcccgcuccuggcgccggcggggagcaacccgcgccuggagccggcggggagcagccggcucccggagccggcggggaacagccugcucccggagccggcggcgagcagccugcgcccgccccgagacgggaacaaccugcucccgccccuggggcuggagacggcgcccgcgggggaaacgccggcgcugggaagggacagggccagaauaaccagggcgcgaauguucccaacgagaaaguggucaaugauuaccugcacaagauuagaucuagcgugacgaccgaauggacacccugcuccguuaccugugggaacggagugcggauccgcagaaaggcccaugcugacaaaaagaaagccgaggaucugacaauggacgaucucgaggucgaagccugcgugauggacaagugugcuggcauuuuuaauguggucagcaacucucuggggcuuguuauccugcucgugcuggcccuuuucaacuga

SEQ ID NO: 5244 - RNA, 801 nt, Artificial Sequence
  derived and/or modified CDS sequence (opt5) from Pk(LT33)__ADN94528.1__CSP
augagaaacuucauccugcucgccgugagcuccauucugcuugucgaccugcuccccacccacuuugagcauaauguugaucugucucgggcuaucaacgugaauggcgugagcuucaacaaugucgacacauccucucuuggggccgcucaggugcgccaaagcgcuuccagaggacggggccugggggaaaagcgcaaagagggagccgauaaggagaaaaagaaagaaaaggaagaggagccuaagaaaccgaacgaaaauaagcucaaacagcccgagcaggccgcuccuggcgccgggggagaacagcccgcuccuggcgccggcggggagagacccgcgccuggagccggcggggagcaaccggcucccggagccggcggggaacggccugcucccggagccggcggcgagcagccugcgcccgccccgcgcagagaacagccugcucccgggccuggagccggcgacggggcucggggaggcaacgccggggccggaaagggccagggccaaaauaaccagggggcuaauguucccaacgagaaaguggucaaugauuaccugcacaagauucgcucuagcgugacgaccgaauggacacccugcuccguuaccuguggaaacggcgugagaauccggcgcagacagaaugcggggaacaagaaagccgaggaccugacaauggaugaccucgaggucgaagcgugcgugauggauaagugugccggaauuuuuaacguggucagcaauucucugggccuuguuauccugcucgugcuggcccuuuucaacuga

SEQ ID NO: 5245 - RNA, 744 nt, Artificial Sequence
  derived and/or modified CDS sequence (opt5) from Pk(SGEHIWM4-Y09-8)__AFD97222.1__CSP
augaagaacuucauccugcucgccgugagcuccauucugcuugucgaccugcuccccaccuacuuugagcacaauguugaucugucuagagcuaucaacgugaauggcgugagcuucaacuccgucgacacaucuagccuuggggccgcucaggugcggcaauccgcuucucgcggaagaggccugggggaaaaaccuaaggagggagccgauaaagaaaagaaaaaggagaaggaaaaagaggaggaaccgaagaaacccaaugagaacaagcucaaacagccucagggcaaugggggagccggccaggcucaaccccagggcaacgggggagccggccaggcucagccugaagggaaucgggaggcccccgcgcaaccucagggaaacggcggggccggacaggcucagccgcaaaagaaugagggcggcaacgccggggcucgcaagggacagggccagaauaaccaaggggccaaugcgcccaacgaaaaaguugugaacgacuaucugcagaagauuagaagcuccgucacgaccgaguggacaccuugcagcgugaccuguggaaauggcguucggauccgcagacgggcccaugcugauaaaaagaaagccgaagaccugacaauggaugaccucgagguggaagcgugcgucauggauaagugugccgggauuuuuaacguggugucuaauucccugggacuugucaucagccugguucucgcccuguucaacuga

SEQ ID NO: 5246 - RNA, 720 nt, Artificial Sequence
  derived and/or modified CDS sequence (opt5) from Pk(PT01)__ADN94512.1__CSP
augagaaacuucauccugcucgccgugagcuccauucugcuugucgaccugcuccccacccacuuugagcauaauguugaucugucucgggcuaucaacgugaauggcgugagcuucaacaaugucgacacauccucucuuggggccgcucaggugcgccaaagcgcguccagaggacggggccugggggaaaagcgcaaagagggagccgauaaggagaaaaagaaagaaaaggaagaggagccuaagaaaccgaacgaaaauaagcucaaacagcccgagcaggccgcuccuggcgccgggggagaacagcccgcuccuggcgccggcggggagcaacccgcgccugccccgagacgggagcagcccgcuccugcccccggagcuggcgacggggcccgcggaggcaacgcgggggccggaaagggccagggccagaauaaccaaggggcuaauguuccuaacgaaaaaguggucaaugauuaccugcacaagauuagaucuagcgugacgaccgaguggacacccugcuccguuaccuguggaaacggcgugcggauccgcagaaaggcccaugcugacaaaaagaaagccgaagaucugacaauggacgaucucgaggucgaagccugcgugauggacaagugugcugggauuuuuaauguggucagcaacucucugggacuuguuauccugcucgugcuggcgcuuuucaacuga

SEQ ID NO: 5247 - RNA, 717 nt, Artificial Sequence
  derived and/or modified CDS sequence (opt5) from Pk(LT53)__ADN94502.1__CSP
augaagaacuucauccugcucgccgugagcuccauucugcuugucgaccugcuccccacccacuuugagcauaauguugaucugucuagagcuaucaacgugaauggcgugagcuucaacaaugucgacacauccucucuuggggccgcucaggugcggcaaagcgcgucccgcggaagaggccugggggaaaaaccuaaggagggagaugacaaagaaaagaaaaaggagaaggaaaaagaggaggaaccgaagaaccucaaugagaacaaacccaagcagccuaaugccgaaggcgauggggccaaacccaagcagccuaacgcugagggagacggcgccaaugcucggcagccccaagccgagggcgggggaggcaacgcgcgccaagggggaaaugaaggcaacaagcaggccgggaaaggacagggccagaauaaccagggcgcuaacgccccuaaugagaagguugugaacgauuaccugcagaaaauuagaucuagcgucacgaccgaauggacaccgugcuccgugaccugugggaauggaguucggauccgcagacgggcucacgccgacaagaaaaaggcggaggaucugacaauggacgaucucgaaguggaggccugcgucauggacaaaugugcuggcauuuuuaacguggugagcaauucucuggggcuugucauccugcucguucuggcccuuuucaacuga

SEQ ID NO: 5248 - RNA, 702 nt, Artificial Sequence
  derived and/or modified CDS sequence (opt5) from Pk(SGEHIWM5-Y09-79)__AFD97229.1__CSP
augaagaacuucauccugcucgccgugagcuccauucugcuugucgaccugcuccccacccacuuugagcauaauguugaucugucuagagcuaucaacgugaauggcgugagcuucaacaaugucgacacauccucucuuggggccgcucaggugcggcaaagcgcgucccgcggaagaggccugggggaacggccuaaagagggagccgauaaggagaaaaagaaagaaaaggaaaaggagaaagaggaaccgaagaaacccaacgagaauaagcucaaacagccugaacagcccgccgcuggcgccgggggagagcagccugcucccgccccucgcagagagcaaccggcgcccggcgccggcgcuggggacggagcccggggcgggaacgcuggagccggcaaggggcagggacagaauaaccagggcgcgaauguuccuaacgaaaagguggucaaugauuaccugcacaaaauucgcucuagcgugacgaccgaguggacacccugcuccguuaccuguggcaacggggugagaauccggcgcagacaaaaugccggaaacaagaaagcugaagaccugacaauggaugaccucgaggucgaagccugcgugauggauaagugugcuggcauuuuuaacguggucagcaauucucuggggcuuguuauccugcucgugcuggcccuuuucaacuga

SEQ ID NO: 5249 - RNA, 660 nt, Artificial Sequence
  derived and/or modified CDS sequence (opt5) from Pk(PT01)__ADN94513.1__CSP
augagaaacuucauccugcucgccgugagcuccauucugcuugucgaccugcuccccacccacuuugagcauaauguugaucugucucgggcuaucaacgugaauggcgugagcuucaacaaugucgacacauccucucuuggggccgcucaggugcgccaaagcgcguccagaggacggggccugggggaaaagcgcaaagagggagccgauaaggagaaaaagaaagaaaaggaagaggagccuaagaaaccgaacgaaaauaagcucaaacagcccgagcaggccgcuccuagacgggaacagcccgccccugcucccggcgccggggacggagcgcgcggcggcaacgccggggcuggaaagggccaagggcagaauaaccagggagccaauguuccuaacgagaaaguggucaaugauuaccugcacaagauuagaucuagcgugacgaccgaguggacaccgugcuccguuaccuguggcaacggggugcggauccgcagaaaggcucaugccgacaaaaagaaagcggaagaucugacaauggacgaucucgaggucgaagccugcgugauggacaagugugcuggaauuuuuaauguggucagcaacucucugggccuuguuauccugcucgugcuggcccuuuucaacuga

SEQ ID NO: 5250 - RNA, 1290 nt, Artificial Sequence
  derived and/or modified CDS sequence (opt5) from Pm(408/Cameroon)__CAA05623.1__CSP
augaagaaacugagcgugcucgccaucuccucuuuccugauugucgacuuucuuuuccccggcuaccaccauaacagcaauuccaccaagucuagaaaccugagcgagcucugcuauaauaacguugauacaaaacuguuuaaugaacuugaggugcgguacuccacgaaccaggaccacuucuauaauuacaacaagaccauccgccugcucaaugaaaacaauaacgagaaagaugggaaugugacaaacgaaagaaagaagaaaccuaccaaggcugucgagaauaaacugaagcaaccgcccggagacgaugacggcgccgggaacgaugcgggaaacgacgcuggcaaugccgccgggaacgcugccggaaaugcugccggcaacgcggccggcaaugcugccgggaacgaugcuggaaaugccgcgggcaacgccgcugggaaugccgcuggaaacgccgccggcaaugcugcggggaacgacgccggaaaugcugccggcaacgaugccggcaaugcugccgggaacgcggcuggaaacgccgccggcaaugcugccgggaacgcugccggaaaugacgcgggcaacgccgcugggaaugccgcuggaaacgccgcgggcaaugccgcuggcaacgccgcugggaaugccgccggaaacgcugcgggcaaugccgcugggaacgccgccggaaaugcugccggcaacgaugcggggaaugcugccggcaacgccgcuggaaacgccgcgggcaaugcugccgggaacgccgcuggaaaugccgcuggcaacgccgcggggaaugccgcuggaaacgccgcuggcaaugccgccgggaacgcugcgggcaaugccgcuggaaacgccgccggcaaugcugccgggaacgcggcuggaaaugccgccggcaacgcugccgggaaugcggcuggaaacgagaaagccaagaacaaggacaauaaaguggacgccaacacaaauaagaaagauaaccaggaagagaauaacgacucuagcaauggcccuuccgaggaacauauuaagaacuaucuggagagcauccgcaauucuauuaccgaagaguggucccccugcagcguuacaugcgggucuggcauccggaccagacggaaaguggaugcuaagaacaaaaagccugccgaacucguccuguccgaccuugagacggaaaucuguagccuggauaaguguucuuccauuuuuaaugugguuagcaacucccucggaaucgugcugguccuugugcugauucucuuccacuga

SEQ ID NO: 5251 - RNA, 1290 nt, Artificial Sequence
  derived and/or modified CDS sequence (opt5) from Pm(Uganda 1-CDC)__AAA29557.1__CSP
augaagaaacugagcgugcucgccaucuccucuuuccugauugucgacuuucuuuuccccggcuaccaccauaacagcaauuccaccaagucuagaaaccugagcgagcucugcuauaauaacguugauacaaaacuguuuaaugaacuugaggugcgguacuccacgaaccaggaccacuucuauaauuacaacaagaccauccgccugcucaaugaaaacaauaacgagaaagaugggaaugugacaaacgaaagaaagaagaaaccuaccaaggcugucgagaauaaacugaagcaaccgcccggagacgaugacggcgccgggaacgaugcgggaaacgacgcuggcaaugaugccgggaacgccgcuggaaaugccgcuggcaacgccgcgggcaaugccgcugggaacgccgcuggaaaugccgcgggcaacgccgcugggaaugccgcuggaaacgccgccggcaaugcugcggggaacgacgccggaaaugcugccggcaacgccgcuggcaaugccgcggggaacgcugccggaaacgccgcuggcaaugaugccgggaacgcugccggaaaugcggccggcaacgcugccgggaaugcugccggaaacgcggccggcaaugcugccggcaacgcugccgggaaugccgcuggaaacgcggccggcaaugcugccgggaacgacgccggaaaugcugccggcaacgcggcugggaaugccgccggcaacgcugccggaaacgcggcuggcaaugccgccgggaacgcugccggaaaugcugccggcaacgcggccgggaaugcugccggaaacgcugccggcaaugccgcugggaacgcggccggcaaugcugccggaaacgccgcuggcaaugccgcggggaacgcugccggaaaugccgcuggcaacgccgcggggaaugcugccggaaacgagaaagccaagaacaaggauaauaaaguggacgcuaacacaaauaagaaagacaaccaggaagagaauaacgauucuagcaauggcccuuccgaggaacauauuaagaacuaucuggagagcauccgcaauucuauuaccgaagaguggucccccugcagcguuacaugcgggucuggcauccgggccagacggaaagugggagcuaagaacaaaaagccugccgaacucguccuguccgaccuugagaccgaaaucuguagccuggauaaguguucuuccauuuuuaaugugguuagcaacucccucggcaucgugcugguccuugugcugauucucuuccacuga

SEQ ID NO: 5252 - RNA, 1170 nt, Artificial Sequence
  derived and/or modified CDS sequence (opt5) from Pm(UG01)__SCN12386.1__CSP
augaagaaacugagcgugcucgccaucuccucuuuccugauugucgacuuucuuuuccccggcuaccaccauaacagcaauuccaccaagucuagaaaccugagcgagcucugcuauaauaacguugauacaaaacuguuuaaugaacuugaggugcgguacuccacgaaccaggaccacuucuauaauuacaacaagaccauccgccugcucaaugaaaacaauaacgagaaagaugggaaugugacaaacgaaagaaagaagaaaccuaccaaggcugucgagaauaaacugaagcaaccgcccggagacgaugacggcgccgggaacgaugcgggaaacgacgcuggcaaugccgccgggaacgcugccggaaaugcugccggcaacgcggccggcaaugaugcugggaacgccgcuggaaaugccgcgggcaacgccgcugggaaugccgcuggaaacgccgccggcaaugcugcggggaacgccgcuggaaaugccgccggcaacgcugccggcaaugcggcugggaacgccgccggaaacgcugccggcaaugcugccgggaacgcggccggaaaugcugccggcaacgcugccgcggggaaugccgcuggaaacgccgcuggcaaugccgccggcgcugcggggaacgccgcuggaaaugccgccggcaacgcugccgggaaugcggcuggaaacgccgccggcaaugcugccgggaacgcggcuggcaaugccgccggaaacgcugccggcaacgcugccgggaaugcggccggaaacgcugccggcaaugcugccgggaacgccgcuggaaaugagaaagcgaagaacaaggacaauaaaguggaugccaacacaaauaagaaagacaaccaggaagagaauaacgauucuagcaauggcccuuccgaggaacauauuaagaacuaucuggagagcauccgcaauucuauuaccgaagaguggucccccugcagcguuacaugcgggucuggcauccgggcuagacggaaaguggacgccaagaacaaaaagccugccgaacucguccuguccgaccuugagaccgaaaucuguagccuggauaaguguucuuccauuuuuaacgugguuagcaauucccucggaaucgugcugguccuugugcugauucucuuccacuga

SEQ ID NO: 5253 - RNA, 1170 nt, Artificial Sequence; identical to SEQ ID NO: 5252
  derived and/or modified CDS sequence (opt5) from Pm()__SCN12386.1__CSP

SEQ ID NO: 5254 - RNA, 885 nt, Artificial Sequence
  derived and/or modified CDS sequence (opt5) from Pm(PmlGA01)__SBT79431.1__CSP
augaagaaacugagcgugcucgccaucuccucuuuccugauugucgacuuucuuuuccccggcuaccaccauaacagcaauuccaccaagucuagaaaccugagcgagcucugcuauaauaacguugauacaaaacuguuuaaugaacuugaggugcgguacuccacgaaccaggaccacuucuauaauuacaacaagaccauccgccugcucaaugaaaacaauaacgcuaaagaugggaaugugacaaacgagagaaagaagaaaccuaccaaggccgucgaaaauaaacugaagcaaccgcccggagacgaggaggaugacgcggaaaacggcgaggggaacgaacggggaaauggcgaggggaacgagcgcggaaauggcgaaggcaacgagagagggaauggagaaggcaacgagcgggggaauggagcuggcaacgaacgcgggaaugaugccggaaacgccgcuggcaaugccgcuggcaacgacgccgggaaugcggccggaaacgcugccggcaaugcugccgggaacgcggccggaaacgaugcuggcaaugccgcugggaacgccgccggaaaugcugcgggcaacggcgagaauaacgacucuagcaaugggccuuccgaggaacauauuaaaaacuaucuggagagcaucagaaauucuauuacagaagaguggucccccuguagcgugaccugcggaaacggcauccgggcccgcagaaagguugaugcuaagaauaaaaagccugccgaacucgugcugucugaccuugagacagagaucuguucccuggauaaaugcagcucuauuuuuaacgucguguccaauagccucgggaucguucuggugcuuguccugauucucuuccacuga

SEQ ID NO: 5255 - RNA, 1104 nt, Artificial Sequence
  derived and/or modified CDS sequence (opt5) from Poc(contig1754)__SBT00176.1__CSP
augagaaaccuggccaucuucgcugugagcgccuuucucuucgcggacucccgguaccccgucuaugcucacaauggcaacucuaccgaggggcgcaagcugaaugaacuuugcuacaacaauguugaucuguauaacacacucuuuaaugagcuggacgugggaagcuccacgaaccaggccuucuuucuuaauucuaaaaagacccugagacuccugaacgaaaauccuaaagagaacaagaaaaagcggaaggaugacaaaaagccgguggaaaauaaacugaagcaaggcgagcgcgagaacgaucccccugcccccagaggggaaggaaauccucccgcuccucagggcgaggggaacccgcccgccccucagggagaaggcaaucccccugcuccccagggcgaggggaacccgccugcgccccaaggagagggcaacccucccgccccucgcggggaaggaaaucccccggcuccccagggcgaggggaacccucccgccccucagggagaaggcaaucccccggccccucagggcgaggggaaucccccugcuccccggggagaaggcaacccucccgccccgcaaggggagggaaacccucccgcgccccagggcgaggggaauccuccggcuccccagggagaaggcaacccucccgccgcccagggcgaggggaauccucccgcugcccaaggaaacggcaauccucccgccgcucaggggaacggaaauccgccugcggcccagggcaacgggaaucccccugcucccgccggcaaaggaaagaacgaaaaccaaaaggagaaagaagagaagaaugccgcuaacaauccgccuagcgaggacgauauuaaaaaguacaucgacaaaauuagaaacgauaucacagaaaauuggucccccuguucugugaccugcggcuucgggguccggguucgcagaaaggccggagcgagcgcuaaaaaggcccaggagcucacacuguccgaccuugaaaccgagauuuguaagaucgaaaacugcagcucuaucuuuaauguggucuccaacagccugggccucgugauuuuccuguuucuuguuuucuuucauuga

SEQ ID NO: 5256 - RNA, 888 nt, Artificial Sequence
  derived and/or modified CDS sequence (opt5) from Poc(GH01)__SBT84923.1__CSP
augagaaaccuggccaucuucgcugugagcgccuuucucuucgcggacucccgguaccccgucuaugcucacaauggcaacucuaccgaggggcgcaagcugaaugaacuuugcuacaacaauguugaucuguauaacacacucuuuaaugagcuggacgugggaagcuccacgaaccaggccuucuuucuuaauucuaaaaagacccugagacuccugaacgaaaauccuaaagagaacaagaaaaagcggaaggaugacaaaaagccgguggaaaauaaacugaagcaaggcgagcgcgagaacgaucccccugcuccccagggggaaggaaauccucccgccccucagggcgaggggaacccgcccgccccucagggagaaggcaaucccccugcuccccaaggcgaggggaacccgccugcgccccagggagagggcaacccucccgccgcccagggggaaggaaaucccccugcugcccagggcaacgggaauccgcccgcugcccaaggaaacggcaauccucccgcggcccagggcaacgggaauccucccgcuccggccggaaaaggcaagaacgagaaucagaaggaaaaagaggaaaagaacgcugccaauaacccucccagcgaggacgauauuaaaaaguacaucgacaaaauuagaaaugauaucacagagaacugguccccuuguucugugaccugcggguucggaguccggguucgcagaaaggccggcgcuagcgcgaaaaaggcccaggaacucacacuguccgaccuugagaccgaaauuuguaagaucgagaacugcagcucuaucuuuaauguggucuccaacagccuggggcucgugauuuuccuguuucuuguuuucuuucauuga

SEQ ID NO: 5257 - RNA, 828 nt, Artificial Sequence
  derived and/or modified CDS sequence (opt5) from Poc(contig251)__SBS83173.1__CSP
augagaaaccuggccaucuucgcugugagcgccuuucucuucgcggacucccgguaccccgucuaugcucacaauggcaacucuaccgaggggcgcaagcugaaugaacuuugcuacaacaauguugaucuguauaacacacucuuuaaugagcuggacgugggaagcuccacgaaccaggccuucuuucuuaauucuaaaaagacccugagacuccugaacgaaaauccuaaagagaacaagaaaaagcggaaggaugacaaaaagccgguggaaaauaaacugaagcaaggcgagcgcgagaacgaucccccugcccccagaggggaaggaaauccucccgcuccucagggcgaggggaacccgcccgccccucagggagaaggcaaucccccugcuccccagggcgaggggaacccgccugcgccccaaggagagggcaacccucccgccgcccagggggaaggaaaucccccugcugcccagggcaacccgcccgcuccugccgggaaaggaaagaaugagaaccagaaggaaaaagaggaaaagaaugcggccaacaaucccccuagcgaggacgauauuaaaaaguacaucgacaaaauucggaacgauaucacagagaauuggucccccuguucugugaccugcggcuucggcguccgcguuagacggaaggcuggggccagcgcuaaaaaggcccaagaacucacacuguccgaccuugagaccgaaauuuguaagaucgagaacugcagcucuaucuuuaauguggucuccaacagccugggacucgugauuuuccuguuucuuguuuucuuucauuga

SEQ ID NO: 5258 - RNA, 945 nt, Artificial Sequence
  derived and/or modified CDS sequence (opt5) from Pow(contig93)__SBT35133.1__CSP
augagaaaccuggccaucuucgcugugagcgccuuucucuucgcggacuccggcuaccccgucuaugcucacaaugggaacucuauggagggacggaagcugaaugaacuuugcuacaacaauguugaucuguauaacacccucuuugacggccuggauguggagagcuccacaaaucaggccuucuuucuuaacucuaaaaagacgcugcgccuccugaaugaaaacccuaaagagaauaagaaaaagagaaaggacgauaaaauuccgguggaaaacaagcugaaacaaggggaccgggagaaugaucccccugcccccgucccucagggagaucccccugcuccggugccccagggcgacccucccgccgcuguuccucagggggaucccccggccccugugccccaaggagacccucccgcgccccagggcgacccuccggcccccgucccucagggcgaucccccugcucccgugccgcagggggacccucccgccccuguuccccaaggagacccucccgcuccggccccucagggcgauccucccgcgcccgccccgcagggggacggaaagcccccugcucccgccccucagggcgaugggaaccaacccgcuccuggaaaaggcaagagcgagaaucagaaggaaaaagacgagaagaacgccgccaacaaucccccguccgaagaugacaucaaaaaguacauugauaaaauccgcaaggacauuaccgagaacuggucuccuuguagcgugacaugcggccucggggucagagugcggcgcaaagcuggagcguccgccaagaaggcuaaugagcugaccaucaacgauguggaaacagagaucuguaaaauugaaaauugcagcucuaucuucaacgucguuuccaauagcauuggccuugugaucuuucuguuccucguguuuuuccauuga

SEQ ID NO: 5259 - RNA, 891 nt, Artificial Sequence
  derived and/or modified CDS sequence (opt5) from Pow(contig72)__SBT34702.1__CSP
augagaaaccuggccaucuucgcuguuagcgccuuucucuucgcggacuccggcuaccccgucuaugcucacaaugggaacucuauggagggacggaagcugaaugaacuuugcuacaacaauguugaucuguauaacacccucuuugacggccuggauguggagagcuccacaaaucaggccuucuuucuuaacucuaaaaagacgcugcgccuccugaaugaaaacccuaaagagaauaagaaaaagagaaaggacgauaaaauuccgguggaaaacaagcugaaacaaggggaccgggagaaugaucccccugcccccgucccucagggagaucccccugcuccggugccccagggcgacccucccgccccuguuccccagggggacccgccugcucccgugccucaaggagauccucccgcgccccagggcgacccgcccgccccugucccccagggcgauccucccgccccggcuccucagggggaucccccugcccccgcuccucaaggagacggcaagcccccggccccugcgccccagggggacggaaaccagcccgccccuggcaaaggaaagagcgagaaucagaaggaaaaagacgagaagaacgcugccaacaauccgcccuccgaagaugacaucaaaaaguacauugauaaaauccgcaaggacauuaccgagaacuggucuccuuguagcgugacaugcgggcucggcguuagagugcggcgcaaagcuggcgccuccgccaagaaggcuaaugagcugaccaucaacgaugucgaaacagagaucuguaaaauugaaaauugcagcucuaucuucaacgugguguccaauagcauugggcuugucaucuuucuguuccucguguuuuuccauuga

SEQ ID NO: 5260 - RNA, 1020 nt, Artificial Sequence
  derived and/or modified CDS sequence (opt5) from Po(PowCR01)__SBT72933.1__CSP
augagaaaccuggccaucuucgcugugagcgccuuucucuucgcggacuccggcuaccccgucuaugcucacaaugggaacucuauggagggacggaagcugaaugaacuuugcuacaacaauguugaucuguauaacacccucuuugacggccuggauguggagagcuccacaaaucaggccuucuuucuuaacucuaaaaagacgcugcgccuccugaaugaaaacccuaaagagaauaagaaaaagagaaaggacgauaaaauuccgguggaaaacaagcugaaacaaggggaccgggagaaugaucccccugcccccgucccucagggagaucccccugcuccggugccccagggcgacccucccgccgcuguuccucagggggaucccccggccccugugccccaaggagacccucccgcgccccagggcgacccuccggcccccgucccucagggcgaucccccugcucccgugccgcagggggacccucccgccccuguuccccaaggaaacccucccgcuccggugccucagggcgacccucccgcgccccagggggauccgcccgccccugucccccagggagacccucccgccccugcuccccaaggcgauccgccugcccccgcuccucagggggacggaaagcccccggccccugcuccccagggcgauggcaaucaaccugcccccgggaaaggaaagagcgagaaccagaaggaaaaagacgagaagaacgcggccaauaaucccccuuccgaagaugacaucaaaaaguacauugauaaaauccgcaaggacauuaccgagaacuggucuccguguagcgugacaugcggccucggggugagaguccggcgcaaagcuggagccuccgccaagaaggcuaacgagcugaccaucaaugauguugaaacagagaucuguaaaauugaaaacugcagcucuaucuucaaugugguguccaacagcauuggccuugucaucuuucuguuccucguguuuuuccauuga

SEQ ID NO: 5261 - RNA, 1164 nt, Artificial Sequence
  derived and/or modified CDS sequence (opt5) from Pv(Pt02.1)__ADB92551.1__CSP
augaagaacuucauccugcucgccgugagcuccauucugcuugucgaccuguuucccacccacugcggccauaauguugaucucucuaaagcuaucaaccugaauggggugggauucaacaauguggacgccagcucccuuggcgcggcucacgucgggcagucugccagcagaggacggggccugggggagaacccugaugacgaagagggagaugccaagaaaaagaaagacggcaagaaggcugaaccgaaaaauccccgcgagaacaagcucaaacaaccugaagauggcgccggggaccagcccggagcuaauggcgccgggaaccagccuggagcgaauggcgccgggaaccagcccggagcuaauggcgccggcaaccaaccuggggcuaauggagccggcaaccagccgggggcgaacggagccggcaaucagcccggggcuaacggagccggcaaucagccuggcgcuaacggggccggagaucaacccggcgccaauggggcuggaaaccagccuggcgcgaauggggccggcaaccagcccggagcuaauggcgccggggaccagccgggagccaacggcgcugggaaucaaccuggagccaacggcgcgggggaucagcccggcgcuaauggagccggcaaccagccuggggccaauggagcuggcaaccaacccggggccaacggagcuggcaaucagcccggggccaacggcgcgggaaaucagccuggcgccaacggggcuggaggccaggccgcugggggaaaugccgcgaacaagaaagccggcgacgcuggggccggcggacaagcugccggcgggaaugccgcuaacaagaaggcgggagaugccggcgcugggcagggacagaauaacgagggcgccaaugccccgaacgagaaauccgugaaggaauaccuggacaaaguuagagcuacagugggcacggaguggacccccuguucugucacaugcggggugggaguucgggugcgcagacgggucaaugccgcgaacaagaaaccugaagaccugacccucaaugaucuggagacagacguguguaccauggauaagugcgcuggcauuuuuaacguggucagcaacucccuugggcugguuauccuccuggugcuugcccuguucaauuga

SEQ ID NO: 5262 - RNA, 1134 nt, Artificial Sequence
  derived and/or modified CDS sequence (opt5) from Pv(Salvador I (Sal-1))__XP_001613068.1__CSP
augaagaacuucauccugcucgccgugagcuccauucugcuugucgaccuguuucccacccacugcggccauaauguugaucucucuaaagcuaucaaccugaauggggugaacuucaauaacguggacgccagcucccuuggagcggcucacgucggccagucugccagcagagggcggggacugggcgagaauccugaugacgaagagggggaugccaagaaaaagaaagacggaaagaaggcugaaccgaaaaacccccgcgagaauaagcucaaacaaccuggcgauagagccgacggccagcccgcuggggaucgggccgacggacagccugcgggcgaucgcgccgacgggcagcccgcuggagauagagccgacggccaaccugcuggggaccgggccgcgggacagccggccggcgaucgcgcugacggccagcccgccggggauagagcugacggacagccugccggcgaucgggccgacgggcaacccgcuggagaucgcgcggacggccagccugccggggauagagcugccggacagcccgccggcgaccgggcugccggccagccggcgggggaucgcgcugacggacaaccugccggcgacagagccgcugggcagcccgccggagaucgggcugacggccagccugccggggaucgcgcggccggccaacccgcuggagacagagccgauggccagcccgcuggggaccgggccgcgggacagccugccggcgauagagcugccgggcagccggcuggagaccgcgccgccggccaagcugcgggggaucgggccgcuggccaggccgccggaggcaacgcugggggacagggccagaauaacgaaggggccaaugcgcccaacgagaaguccgugaaagaguaccuggacaagguuagagcuacagugggaacggaauggaccccuuguucugucacaugcggcguggggguucgcgugcggagacgcgucaaugccgccaacaagaaacccgaggaucugacccucaacgaccuggaaacagauguguguaccauggacaagugcgcuggcauuuuuaauguggucagcaacucccuuggacugguuauccuccuggugcuugcccuguucaauuga

SEQ ID NO: 5263 - RNA, 1092 nt, Artificial Sequence
  derived and/or modified CDS sequence (opt5) from Pv(P01)__SGX77278.1__CSP
augaagaacuucauccugcucgccgugagcuccauucugcuugucgaccuguuucccacccacugcggccauaauguugaucucucuaaagcuaucaaccugaauggggugaacuucaauaacguggacgccagcucccuuggagcggcucacgucggccagucugccagcagagggcggggacugggcgagaauccugaugacgaagagggggaugccaagaaaaagaaagacggaaagaaggcugaaccgaaaaacccccgcgagaauaagcucaaacaaccugccggcgauagagcugacggccagcccgccggggaucgggcggacggacagccugccggcgaucgcgcugacgggcagcccgccggagauagagcugccggccaaccugcgggggaccgggccgacggacagccggcuggcgaucgcgccgcuggccagcccgccggggacagagccgauggacagccugcuggcgaccgggcggccgggcaacccgcuggagaucgcgccgacggccagccugccggggauagagcugccggacagcccgcgggcgaccgggcugccggccagccggccggggaucgcgcugacggacaaccugccggcgauagagcugccgggcagcccgcgggagaccgggccgacggccagccugcuggggaucgcgccgcuggccaacccgccggagacagagcggccggccagcccgcugggaacggagccggcgggcaggcugccggaggcaaugccgggggcaacgcuggaggcaaugccgggggaaacgcgggcgggcagggacaaaauaacgaaggcgcuaacgccccuaaugagaaguccgugaaagaguaccuggauaagguucgggccacaguggggacggaauggaccccguguucugucacaugcggcgugggaguuagagugcgccggagagucaacgcugccaauaagaaacccgaggaccugacccucaacgaucuggaaacagacguguguaccauggauaagugcgcgggcauuuuuaauguggucagcaacucccuugggcugguuauccuccuggugcuugcucuguucaauuga

SEQ ID NO: 5264 - RNA, 1188 nt, Artificial Sequence
  derived and/or modified CDS sequence (opt5) from Pv(Cam22)__AHL69650.1__CSP
augaagaacuucauccugcucgccgugagcuccauucugcuugucgaccuguuucccacccacugcggccauaauguugaucucucuaaagcuaucaaccugaauggggugggauucaacaauguggacgccagcucccuuggcgcggcucacgucgggcagucugccagcagaggacggggccugggggagaacccugaugacgaagagggagaugccaagaaaaagaaagacggcaagaaggcugaaccgaaaaauccccgcgagaacaagcucaaacaaccugaagauggcgccgggaaucagcccggagcuaacggcgccgggaaucagccuggagcgaacggcgccgggaaucagcccggagcuaacggcgccggcaaucaaccuggggcuaacggagccggcaaccagccgggggcgaauggagccggcaaccagcccggggcuaauggagccggcaaccagccuggcgcuaauggggccggaaaccaacccggcgccaauggggcugacgaucagccuggagcgaacggcgccgggaaucagcccggcgcuaacggagccggcaaucagccgggggccaacggagcuggcaaucaaccuggggccaacggagcgggcgaccagcccggggcuaauggcgccggaaaccagccuggcgccaacggggcuggagaucaacccggcgccaauggggcuggaaaccagcccggcgccaauggggcgggcaaccagccuggagccaauggcgcugggaaccagccgggagccaauggcgcugggaaccaacccggagccaauggcgcggggaaccagccuggcgccaauggagcuggcgggcaggccgcuggaggcaacgccgccaauaagaaagcuggggacgcgggagccggccagggccaaaacaaugagggggcuaacgcccccaacgagaaguccgugaaggaauaccuggauaaaguuagagccacagugggaacggaguggaccccuuguucugucacaugcggcguggggguucgggugcgcagacgggucaaugcugccaacaagaaacccgaagaccugacccucaaugaccuggagacagauguguguaccauggacaagugcgcgggaauuuuuaacguggucagcaauucccuuggccugguuauccuccuggugcuugcucuguucaacuga

SEQ ID NO: 5265 - RNA, 1188 nt, Artificial Sequence
  derived and/or modified CDS sequence (opt5) from Pv(Cam29)__AGN05257.1__CSP
augaagaacuucauccugcucgccgugagcuccauucugcuugucgaccuguuucccacccacugcggccauaauguugaucucucuaaagcuaucaaccugaauggggugggauucaacaauguggacgccagcucccuuggcgcggcucacgucgggcagucugccagcagaggacggggccugggggagaacccugaugacgaagagggagaugccaagaaaaagaaagacggcaagaaggcugaaccgaaaaauccccgcgagaacaagcucaaacaaccugaagauggcgaggggaaucagcccggagccaacggcgcugggaaucagccuggagccaacggcgcggggaaucagcccggagccaacggcgcuggcaaucaaccuggggccaacggagcuggcaaccagccgggggccaauggagcgggcaaccagcccggggccaauggagcuggcaaccagccuggcgccaauggggcugacgaucaacccggagccaacggcgccgggaaucagccuggagcuaacggcgcggggaaucagcccggcgccaacggagcuggcaaucagccgggggccaacggagccggcgaccaaccuggggcuaauggagccggcaaccagcccggggcgaauggcgcuggaaaccagccuggcgccaacggggccggaaaucaacccggcgcuaacggggccggaaaucagcccggcgcuaacggggccggcaaucagccuggagcgaacggcgccgggaaucagccgggagcuaacggcgccgggaaucaacccggagcuaacggcgccgggaaucagccuggcgcgaacggagccggcgggcaggcugccggaggcaaugcugccaacaagaaagccggggaugcuggagcgggccagggccaaaauaacgagggggccaacgcucccaaugaaaaguccgugaaggaguaccuggacaaaguuagagccacagugggaacggaauggaccccuuguucugucacaugcggcguggggguucgggugcgcagacgggucaacgccgcuaauaagaaacccgaggaucugacccucaacgaccuggagacagacguguguaccauggauaagugcgccggaauuuuuaauguggucagcaacucccuuggccugguuauccuccuggugcuugcgcuguucaauuga

SEQ ID NO: 5266 - RNA, 1188 nt, Artificial Sequence
  derived and/or modified CDS sequence (opt5) from Pv(Cam9)__AGN05240.1__CSP
augaagaacuucauccugcucgccgugagcuccauucugcuugucgaccuguuucccacccacugcggccauaauguugaucucucuaaagcuaucaaccugaauggggugggauucaacaauguggacgccagcucccuuggcgcggcucacgucgggcagucugccagcagaggacggggccugggggagaacccugaugacgaagagggagaugccaagaaaaagaaagacggcaagaaggcugaaccgaaaaauccccgcgagaacaagcucaaacaaccugaagauggcgccgggaaucagcccggagcuaacggcgccgggaaucagccuggagcgaacggcgccgggaaucagcccggagcuaacggcgccggcaaucaaccuggggcuaacggagccggcaaccagccgggggcgaauggagccggcaaccagcccggggcuaauggagccggcaaccagccuggcgcuaauggggccggaaaccaacccggcgccaauggggcugacgaucagccuggagcgaacggcgccgggaaucagcccggcgcuaacggagccggcaaucagccgggggccaacggagcuggcaaucaaccuggggccaacggagcgggcgaccagcccggggcuaauggcgccggaaaccagccuggcgccaacggggcuggagaucaacccggcgccaauggggcuggaaaccagcccggcgccaauggggcgggcaaccagccuggagccaaugaggcuggcaaccagccgggggccaauggagcuggcaaccaacccggggccaauggagcgggcaaccagccuggggccaauggcgcuggaggccaggccgcugggggaaacgccgccaauaagaaagcuggcgacgcgggggccggacagggccaaaacaaugagggcgcuaacgcccccaacgaaaaguccgugaaggaguaccuggauaaaguuagagccacaguggggacggaauggaccccuuguucugucacaugcggagugggcguucgggugcgcagacgggucaaugcugccaacaagaaacccgaggaccugacccucaaugaccuggagacagauguguguaccauggacaagugcgcggggauuuuuaacguggucagcaauucccuuggacugguuauccuccuggugcuugcucuguucaacuga

SEQ ID NO: 5267 - RNA, 1182 nt, Artificial Sequence
  derived and/or modified CDS sequence (opt5) from Pv(Ca05)__ADB92533.1__CSP
augaagaacuucauccugcucgccgugagcuccauucugcuugucgaccuguuucccacccacugcggccauaauguugaucucucuaaagcuaucaaccugaauggggugggauucaacaauguggacgccagcucccuuggcgcggcucacgucgggcagucugccagcagaggacggggccugggggagaacccugaugacgaagagggagaugccaagaaaaagaaagacggcaagaaggcugaaccgaaaaauccccgcgagaacaagcucaaacaaccugaagauggcgccggggaccagcccggagcuaauggcgccgggaaccagccuggagcgaauggcgccgggaaccagcccggagcuaauggcgccggcaaccaaccuggggcuaauggagccggcaaccagccgggggcgaacggagccggcaaucagcccggggcuaacggagccggcaaucagccuggcgcuaacggggccggaaaucaacccggcgccaacggggcugaugaccagccuggagcgaauggcgccgggaaccagcccggcgcuaauggagccggcaaccagccgggggccaauggagcuggcaaccaaccuggggccaauggagcgggcgaucagcccggggcuaacggcgccggaaaucagccuggcgccaacggggcuggagaccaacccggcgccaacggggcuggaaaucagcccggcgccaacggggcgggcaaucagccuggagccaacggcgcugggaaucagccgggagccaacggcgcugggaaucaacccggagccaacggcgccgggggccaggcggcuggaggcaaugccgcuaacaagaaagccggggaugccggaggcaaugcugggggaaacgcgggcggccaggggcagaauaacgagggagccaaugcuccuaacgagaaguccgugaaggaauaccuggacaaaguuagagccacagugggcacggaguggacccccuguucugucacaugcggggugggaguucgggugcgcagacgggucaacgccgcuaauaagaaaccugaagaccugacccucaacgaucuggagacagacguguguaccauggauaagugcgccggcauuuuuaauguggucagcaacucccuugggcugguuauccuccuggugcuugcgcuguucaauuga

SEQ ID NO: 5268 - RNA, 1182 nt, Artificial Sequence
  derived and/or modified CDS sequence (opt5) from Pv(Ch05)__ADB92538.1__CSP
augaagaacuucauccugcucgccgugagcuccauucugcuugucgaccuguuucccacccacugcggccauaauguugaucucucuaaagcuaucaaccugaauggggugggauucaacaauguggacgccagcucccuuggcgcggcucacgucgggcagucugccagcagaggacggggccugggggagaacccugaugacgaagagggagaugccaagaaaaagaaagacggcaagaaggcugaaccgaaaaauccccgcgagaacaagcucaaacaaccugaagauggcgccggggaccagcccggagcuaauggcgccgggaaccagccuggagcgaauggcgccgggaaccagcccggagcuaauggcgccggcaaccaaccuggggcuaauggagccggcaaccagccgggggcgaacggagccggcaaucagcccggggcuaacggagccggcaaucagccuggcgcuaacggggccggagaucaacccggcgccaauggggcugacgaucagccuggagcgaacggcgccgggaaucagcccggcgcuaacggagccggcaaucagccgggggccaacggagcuggcgaccaaccuggggccaauggagcgggcgaucagcccggggcuaacggcgccggaaaucagccuggcgccaacggggcuggagaccaacccggcgccaauggggcuggaaaccagcccggcgccaacggggcgggcaaucagccuggagccaacggcgcugggaaucagccgggagccaacggcgcugggaaucaacccggagccaacggcgccgggggccaggcggcuggaggcaaugccgcuaacaagaaagccggggacgccggaggcaaugcugggggaaacgcgggcggccaggggcagaauaacgagggagccaaugcuccuaacgagaaguccgugaaggaauaccuggauaaaguuagagccacagugggcacggaguggacccccuguucugucacaugcggggugggaguucgggugcgcagacgggucaaugccgcuaacaagaaaccugaagaccugacccucaacgaucuggagacagacguguguaccauggauaagugcgccggcauuuuuaauguggucagcaacucccuugggcugguuauccuccuggugcuugcgcuguucaauuga

SEQ ID NO: 5269 - RNA, 1173 nt, Artificial Sequence
  derived and/or modified CDS sequence (opt5) from Pv(Cam16)__AHL69649.1__CSP
augaagaacuucauccugcucgccgugagcuccauucugcuugucgaccuguuucccacccacugcggccauaauguugaucucucuaaagcuaucaaccugaauggggugggauucaacaauguggacgccagcucccuuggcgcggcucacgucgggcagucugccagcagaggacggggccugggggagaacccugaugacgaagagggagaugccaagaaaaagaaagacggcaagaaggcugaaccgaaaaauccccgcgagaacaagcucaaacaaccugaagauggcgccgggaaucagcccggagcuaacggcgccgggaaucagccuggagcgaacggcgccgggaaucagcccggagcuaacggcgccggcaaucaaccuggggcuaacggagccggcaaccagccgggggcgaauggagccggcaaccagcccggggcuaauggagccgacgaucagccuggcgcuaacggcgccgggaaucaacccggagccaacggcgcugggaaucagccuggagcgaacggcgccgggaaucagcccggcgcuaacggagccggcaaucagccgggggccaacggagcuggcaaucaaccuggggccaacggagcgggcgaccagcccggggcuaauggcgccggaaaccagccuggcgccaacggggcuggagaucaacccggcgccaauggggcuggaaaccagcccggcgccaauggggcgggcaaccagccuggagccaaugaggcuggcaaccagccgggggccaauggagcuggcaaccaacccggggccaauggagcgggcaaccagccuggggccaauggcgcuggaggccaggccgcugggggaaacgccggcgggaaugccggaggccagggccaaaacaaugagggggcuaacgcgcccaacgaaaaguccgugaaagaguaccuggacaagguuagagccacagugggaacggaauggaccccuuguucugucacaugcggcguggggguucgggugcgcagacgggucaaugcugccaacaagaaacccgaggaucugacccucaaugaccuggagacagacguguguaccauggauaagugcgccggaauuuuuaacguggucagcaauucccuuggccugguuauccuccuggugcuugcucuguucaacuga

SEQ ID NO: 5270 - RNA, 1170 nt, Artificial Sequence
  derived and/or modified CDS sequence (opt5) from Pv(Cam26)__AGN05254.1__CSP
augaagaacuucauccugcucgccgugagcuccauucugcuugucgaccuguuucccacccacugcggccauaauguugaucucucuaaagcuaucaaccugaauggggugaacuucaauaacguggacgccagcucccuuggagcggcucacgucggccagucugccagcagagggcggggacugggcgagaauccugaugacgaagagggggaugccaagaaaaagaaagacggaaagaaggcugaaccgaaaaacccccgcgagaauaagcucaaacaaccuggcgauagagccgacggccagcccgcuggggaucgggccgacggacagccugcgggcgaucgcgccgacgggcagcccgcuggagauagagccgcuggccaaccugccggggaccgggcggacggacagccggccggcgaucgcgcugccggccagcccgcuggggacagagccgccggacagccugcuggcgaucgggcggacgggcaacccgccggagaucgcgcugccggccagccugccggggacagagcugccggacagcccgcgggcgaucgggcugacggccagccggccggggaucgcgccgcuggacaaccugccggcgacagagcugaugggcagcccgccggagaccgggcggccggccagccugcuggggaccgcgccgcuggccaacccgccggagauagagcggacggccagcccgccggggaucgggcugccggacagccugcuggcgacagagccgccgggcagccggcuggagaucgcgcggccggccaacccgcugggaacggcgccggaggccaggccgcugggggaaaugccgcgaacaagaaagcugaagacgccggcgggaaugccggaggccaggggcagaacaaugagggcgcuaacgccccuaacgagaaguccgugaaggaauaccuggauaaaguucgggcgacagugggaacggaguggacccccuguucugucacaugcggcguggggguuagagugcgccggagagucaaugcugccaacaagaaaccugaagaccugacccucaaugauauugagacagacguguguaccauggauaagugcgccggaaucuuuaacguggucagcaauucccugggccuuguuauucugcucgugcuggcucuuuucaacuga

SEQ ID NO: 5271 - RNA, 1164 nt, Artificial Sequence
  derived and/or modified CDS sequence (opt5) from Pv(Ch01)__ADB92534.1__CSP
augaagaacuucauccugcucgccgugagcuccauucugcuugucgaccuguuucccacccacugcggccauaauguugaucucucuaaagcuaucaaccugaauggggugggauucaacaauguggacgccagcucccuuggcgcggcucacgucgggcagucugccagcagaggacggggccugggggagaacccugaugacgaagagggagaugccaagaaaaagaaagacggcaagaaggcugaaccgaaaaauccccgcgagaacaagcucaaacaaccugaagauggcgccggggaccagcccggagcuaauggcgccgggaaccagccuggagcgaauggcgccgggaaccagcccggagcuaauggcgccggcaaccaaccuggggcuaauggagccggcaaccagccgggggcgaacggagccggcaaucagcccggggcuaacggagccggcaaucagccuggcgcuaacggggccggaaaucaacccggcgccaacggggcugaugaccagccuggagcgaauggcgccgggaaccagcccggcgcuaauggagccggcgaucagccgggggccaacggagcuggcaaucaaccuggggccaacggagcgggcgaccagcccggggcuaauggcgccggaaaccagccuggcgccaauggggcuggaaaccaacccggcgccaacggggcuggaaaucagcccggcgccaacggggcgggcaaucagccuggagccaacggcgcugggggacaggccgcuggcgggaaugccgcgaacaagaaagccggagaugcuggcgccgggggccaagcugccggaggcaaugccgcuaacaagaaggcgggggacgccggagcuggccaggggcagaauaacgagggagccaaugccccgaacgagaaauccgugaaggaauaccuggacaaaguuagagcuacagugggcacggaguggacccccuguucugucacaugcggcguggggguucgggugcgcagacgggucaaugccgcgaacaagaaaccugaagaucugacccucaaugaccuggagacagauguguguaccauggacaagugcgcuggaauuuuuaacguggucagcaacucccuuggccugguuauccuccuggugcuugcccuguucaauuga

SEQ ID NO: 5272 - RNA, 1164 nt, Artificial Sequence
  derived and/or modified CDS sequence (opt5) from Pv(Nr04)__ADB92542.1__CSP
augaagaacuucauccugcucgccgugagcuccauucugcuugucgaccuguuucccacccacugcggccauaauguugaucucucuaaagcuaucaaccugaauggggugggauucaacaauguggacgccagcucccuuggcgcggcucacgucgggcagucugccagcagaggacggggccugggggagaacccugaugacgaagagggagaugccaagaaaaagaaagacggcaagaaggcugaaccgaaaaauccccgcgagaacaagcucaaacaaccugaagauggcgccggggaccagcccggagcuaauggcgccgggaaccagccuggagcgaauggcgccgggaaccagcccggagcuaauggcgccggcaaccaaccuggggcuaauggagccggcaaccagccgggggcgaacggagccggcaaucagcccggggcuaacggagccggcaaucagccuggcgcuaacggggccggagaucaacccggcgccaauggggcugacaaccagccuggagcgaauggcgccgggaaccagcccggcgcuaauggagccggcaaccagccgggggccaauggagcuggcaaccaaccuggggccaauggagcgggcgaucagcccggggcuaacggcgccggaaaucagccuggcgccaacggggcuggagaccaacccggcgccaacggggcuggaaaucagcccggcgccaacggggcgggcaaucagccuggagccaacggcgcugggggacaggccgcuggcgggaaugccgcgaacaagaaagccggagaugcuggcgccgggggccaagcugccggaggcaaugccgcuaacaagaaggcgggggacgccggagcuggccaggggcagaauaacgagggagccaaugccccgaacgagaaauccgugaaggaauaccuggacaaaguuagagcuacagugggcacggaguggacccccuguucugucacaugcggcguggggguucgggugcgcagacgggucaaugccgcgaacaagaaaccugaagaucugacccucaaugaccuggagacagauguguguaccauggacaagugcgcuggaauuuuuaacguggucagcaacucccuuggccugguuauccuccuggugcuugcccuguucaauuga

SEQ ID NO: 5273 - RNA, 1164 nt, Artificial Sequence
  derived and/or modified CDS sequence (opt5) from Pv(Pt03)__ADB92553.1__CSP
augaagaacuucauccugcucgccgugagcuccauucugcuugucgaccuguuucccacccacugcggccauaauguugaucucucuaaagcuaucaaccugaauggggugggauucaacaauguggacgccagcucccuuggcgcggcucacgucgggcagucugccagcagaggacggggccugggggagaacccugaugacgaagagggagaugccaagaaaaagaaagacggcaagaaggcugaaccgaaaaauccccgcgagaacaagcucaaacaaccugaagauggcgccggggaccagcccggagcuaauggcgccgggaaccagccuggagcgaauggcgccgggaaccagcccggagcuaauggcgccggcaaccaaccuggggcuaauggagccggcgaucagccgggggcgaacggagccggcaaccagcccggggcuaauggagccggcgaccagccuggcgcuaacggggccggaaaucaacccggcgccaacggggcuggaaaucagccuggcgcgaacggggccggcaaucagcccggagcuaacggcgccgggaaucagccgggagccaacggcgcugggaaucaaccuggagccaacggcgcgggggaucagcccggcgcuaauggagccggcaaccagccuggggccaauggagcuggcaaccaacccggggccaacggagcuggcaaucagcccggggccaacggcgcgggaaaucagccuggcgccaacggggcuggaggccaggccgcugggggaaaugccgcgaacaagaaagccggcgacgcuggggccggcggacaagcugccggcgggaaugccgcuaacaagaaggcgggagaugccggcgcugggcagggacagaauaacgagggcgccaaugccccgaacgagaaauccgugaaggaauaccuggacaaaguuagagcuacagugggcacggaguggacccccuguucugucacaugcggggugggaguucgggugcgcagacgggucaaugccgcgaacaagaaaccugaagaccugacccucaaugaucuggagacagacguguguaccauggauaagugcgcuggcauuuuuaacguggucagcaacucccuugggcugguuauccuccuggugcuugcccuguucaauuga

SEQ ID NO: 5274 - RNA, 1164 nt, Artificial Sequence
  derived and/or modified CDS sequence (opt5) from Pv(Vc03)__ADB92546.1__CSP
augaagaacuucauccugcucgccgugagcuccauucugcuugucgaccuguuucccacccacugcggccauaauguugaucucucuaaagcuaucaaccugaauggggugggauucaacaauguggacgccagcucccuuggcgcggcucacgucgggcagucugccagcagaggacggggccugggggagaacccugaugacgaagagggagaugccaagaaaaagaaagacggcaagaaggcugaaccgaaaaauccccgcgagaacaagcucaaacaaccugaagauggcgccggggaccagcccggagcuaauggcgccgggaaccagccuggagcgaauggcgccgggaaccagcccggagcuaauggcgccggcaaccaaccuggggcuaauggagccggcaaccagccgggggcgaacggagccggcaaucagcccggggcuaacggagccggcaaucagccuggcgcuaacggggccggagaucaacccggcgccaauggggcugacgaucagccuggagcgaacggcgccgggaaucagcccggcgcuaacggagccggcaaucagccgggggccaacggagcuggcaaucaaccuggggccaacggagcgggcgaccagcccggggcuaauggcgccggaaaccagccuggcgccaauggggcuggaaaccaacccggcgccaacggggcuggaaaucagcccggcgccaacggggcgggcaaucagccuggagccaacggcgcugggggacaggccgcuggcgggaaugccgcgaacaagaaagccggagaugcuggcgccgggggccaagcugccggaggcaaugccgcuaacaagaaggcgggggacgccggagcuggccaggggcagaauaacgagggagccaaugccccgaacgagaaauccgugaaggaauaccuggacaaaguuagagcuacagugggcacggaguggacccccuguucugucacaugcggcguggggguucgggugcgcagacgggucaaugccgcgaacaagaaaccugaagaucugacccucaaugaccuggagacagauguguguaccauggacaagugcgcuggaauuuuuaacguggucagcaacucccuuggccugguuauccuccuggugcuugcccuguucaauuga

SEQ ID NO: 5275 - RNA, 1164 nt, Artificial Sequence
  derived and/or modified CDS sequence (opt5) from Pv(Vc04)__ADB92547.1__CSP
augaagaacuucauccugcucgccgugagcuccauucugcuugucgaccuguuucccacccacugcggccauaauguugaucucucuaaagcuaucaaccugaauggggugggauucaacaauguggacgccagcucccuuggcgcggcucacgucgggcagucugccagcagaggacggggccugggggagaacccugaugacgaagagggagaugccaagaaaaagaaagacggcaagaaggcugaaccgaaaaauccccgcgagaacaagcucaaacaaccugaagauggcgccggggaccagcccggagcuaauggcgccgggaaccagccuggagcgaauggcgccgggaaccagcccggagcuaauggcgccggcaaccaaccuggggcuaauggagccggcaaccagccgggggcgaacggagccggcaaucagcccggggcuaacggagccggcaaucagccuggcgcuaacggggccgaugaccaacccggagccaauggcgcuggggaucagccuggagcgaacggcgccgggaaucagcccggcgcuaacggagccggcaaucagccgggggccaacggagcuggcgaccaaccuggggccaauggagcgggcgaucagcccggggcuaacggcgccggaaaucagccuggcgccaacggggcuggagaccaacccggcgccaauggggcuggaaaccagcccggcgccaacggggcgggcaaucagccuggagccaacggcgcugggggacaggccgcuggcgggaaugccgcgaacaagaaagccggagacgcuggcgccgggggccaagcugccggaggcaaugccgcuaacaagaaggcgggggaugccggagcuggccaggggcagaauaacgagggagccaaugccccgaacgagaaauccgugaaggaauaccuggacaaaguuagagcuacagugggcacggaguggacccccuguucugucacaugcggcguggggguucgggugcgcagacgggucaaugccgcgaacaagaaaccugaagaucugacccucaaugaccuggagacagauguguguaccauggacaagugcgcuggaauuuuuaacguggucagcaauucccuuggccugguuauccuccuggugcuugcccuguucaacuga

SEQ ID NO: 5276 - RNA, 1164 nt, Artificial Sequence
  derived and/or modified CDS sequence (opt5) from Pv(Vc05)__ADB92548.1__CSP
augaagaacuucauccugcucgccgugagcuccauucugcuugucgaccuguuucccacccacugcggccauaauguugaucucucuaaagcuaucaaccugaauggggugggauucaacaauguggacgccagcucccuuggcgcggcucacgucgggcagucugccagcagaggacggggccugggggagaacccugaugacgaagagggagaugccaagaaaaagaaagacggcaagaaggcugaaccgaaaaauccccgcgagaacaagcucaaacaaccugaagauggcgccggggaccagcccggagcuaauggcgccgggaaccagccuggagcgaauggcgccgggaaccagcccggagcuaauggcgccggcaaccaaccuggggcuaauggagccggcaaccagccgggggcgaacggagccggcaaucagcccggggcuaacggagccggcaaucagccuggcgcuaacggggccggagaucaacccggcgccaauggggcuggaaaccagccuggcgcgaauggggccggcaaccagcccggagcuaauggcgccgggaaccagccgggagccaauggcgcuggggaccaaccuggagccaacggcgcgggggaucagcccggcgcuaauggagccggcaaccagccuggggccaauggagcuggcaaccaacccggggccaacggagcuggcaaucagcccggggccaacggcgcgggaaaucagccuggcgccaacggggcuggaggccaggccgcugggggaaaugccgcgaacaagaaagccggcgacgcuggggccggcggacaagcugccggcgggaaugccgcuaacaagaaggcgggagaugccggcgcugggcagggacagaauaacgagggcgccaaugccccgaacgagaaauccgugaaggaauaccuggacaaaguuagagcuacagugggcacggaguggacccccuguucugucacaugcggggugggaguucgggugcgcagacgggucaaugccgcgaacaagaaaccugaagaccugacccucaaugaucuggagacagacguguguaccauggauaagugcgcuggcauuuuuaacguggucagcaacucccuugggcugguuauccuccuggugcuugcccuguucaauuga

SEQ ID NO: 5277 - RNA, 1161 nt, Artificial Sequence
  derived and/or modified CDS sequence (opt5) from Pv(Ca03)__ADB92531.1__CSP
augaagaacuucauccugcucgccgugagcuccauucugcuugucgaccuguuucccacccacugcggccauaauguugaucucucuaaagcuaucaaccugaauggggugggauucaacaauguggacgccagcucccuuggcgcggcucacgucgggcagucugccagcagaggacggggccugggggagaacccugaugacgaagagggagaugccaagaaaaagaaagacggcaagaaggcugaaccgaaaaauccccgcgagaacaagcucaaacaaccugaagauggcgccggggaccagcccggagcuaauggcgccgggaaccagccuggagcgaauggcgccgggaaccagcccggagcuaauggcgccggcaaccaaccuggggcuaauggagccggcaaccagccgggggcgaacggagccggcaaucagcccggggcuaacggagccggcaaucagccuggcgcuaacggggccgaugaccaacccggagccaauggcgcugaugaccagccuggggcgaacggagccggcaaucagcccggggcuaacggcgccggaaaucagccgggcgccaacggggcuggagaucaaccuggcgccaauggggcgggagaccagcccggcgcuaacggggccggcaaucagccuggagccaacggcgcuggggaccaacccggagccaauggcgcugggaaccagcccggagccaacggcgcggggaaucagccuggcgccaacggagcuggcaaucagccgggggccaacggagcuggcaaucaacccggggccaacggagcgggcgggcaggccgcuggcggaaaugccgcuaacaagaaagccggcgaugccgggggaggccaggggcagaauaacgagggagcuaaugcgccuaacgagaaguccgugaaggaauaccuggacaaaguuagagccacagugggcacggaguggacccccuguucugucacaugcggcguggggguucgggugcgcagacgggucaaugcugccaacaagaaaccugaagaucugacccucaaugaccuggagacagauguguguaccauggacaagugcgccggaauuuuuaacguggucagcaacucccuuggccugguuauccuccuggugcuugcucuguucaauuga

SEQ ID NO: 5278 - RNA, 1161 nt, Artificial Sequence
  derived and/or modified CDS sequence (opt5) from Pv(Cam5)__AHL69647.1__CSP
augaagaacuucauccugcucgccgugagcuccauucugcuugucgaccuguuucccacccacugcggccauaauguugaucucucuaaagcuaucaaccugaauggggugggauucaacaauguggacgccagcucccuuggcgcggcucacgucgggcagucugccagcagaggacggggccugggggagaacccugaugacgaagagggagaugccaagaaaaagaaagacggcaagaaggcugaaccgaaaaauccccgcgagaacaagcucaaacaaccugaagauggcgccgggaaucagcccggagcuaacggcgccgggaaucagccuggagcgaacggcgccgggaaucagcccggagcuaacggcgccggcaaucaaccuggggcuaacggagccggcaaccagccgggggcgaauggagccggcaaccagcccggggcuaauggagccggcaaccagccuggcgcuaauggggccgacgaucaacccggagccaacggcgcugggaaucagccuggagcgaacggcgccgggaaucagcccggcgcuaacggagccggcaaucagccgggggccaacggagcuggcgaccaaccuggggccaauggagcgggcaaccagcccggggcuaauggcgccggagaucagccuggcgccaacggggcuggaaaccaacccggcgccaauggggcuggaaaccagcccggcgccaaugaggcggggaaccagccuggcgccaauggagcuggcaaccagccgggggccaauggagcuggcaaccaacccggggccaauggagcgggcgggcaggccgcuggcggaaacgccgcuaauaagaaagccggcgacgccggggcuggacagggccagaacaaugagggggcgaacgccccuaaugaaaaguccgugaaggaguaccuggauaaaguuagagcuacagugggaacggaauggacccccuguucugucacaugcggcgugggcguucgggugcgcagacgggucaacgccgccaacaagaaaccugaggaccugacccucaaugaccuggagacagauguguguaccauggacaagugcgcugggauuuuuaacguggucagcaauucccuuggacugguuauccuccuggugcuugcccuguucaacuga

SEQ ID NO: 5279 - RNA, 1161 nt, Artificial Sequence
  derived and/or modified CDS sequence (opt5) from Pv(Cam5)__AGN05236.2__CSP
augaagaacuucauccugcucgccgugagcuccauucugcuugucgaccuguuucccacccacugcggccauaauguugaucucucuaaagcuaucaaccugaauggggugaacuucaauaacguggacgccagcucccuuggagcggcucacgucggccagucugccagcagagggcggggacugggcgagaauccugaugacgaagagggggaugccaagaaaaagaaagacggaaagaaggcugaaccgaaaaacccccgcgagaauaagcucaaacaaccuggcgauagagccgacggccagcccgcuggggauggagccgcgggccagccugccggggacggagcugccggccagcccgcuggggaucgggccgcgggacaaccugccggcgaccgcgcugccggccagccggcuggggauggagccgccggccagcccgcuggggacggagcggccggccagccugcuggggacagagccgccggacaacccgcuggcgaucgggccgcgggccagccugcuggggaccgcgccgauggacagcccgccggcgacagagcugccgggcagccggcuggagaucgggccgcgggccaaccugccggggaccgcgcugauggccagcccgccggagacagagcugccggccagccugcgggggaucgggccgcuggacaacccgccggcgaccgcgcugccgggcagcccgccggagauagagcugacggccagccugcgggggaccgggccgcuggccagccggccggagaucgcgccgcuggccaacccgccggggacagagcggcuggacagccugccggcaacggggccggaggccaggcugccgggggcaaugcgggaggccaggggcaaaacaaugaaggagcuaacgcccccaaugagaaguccgugaaagaguaccuggauaagguucgggccacagugggcacggaauggaccccuuguucugucacaugcggggugggaguuagagugcgccggagagucaacgcugccaacaagaaacccgaggaccugacccucaaugaucuggaaacagacguguguaccauggauaagugcgcuggcauuuuuaacguggucagcaauucccuugggcugguuauccuccuggugcuugcccuguucaacuga

SEQ ID NO: 5280 - RNA, 1161 nt, Artificial Sequence
  derived and/or modified CDS sequence (opt5) from Pv(Cam7)__AGN05238.1__CSP
augaagaacuucauccugcucgccgugagcuccauucugcuugucgaccuguuucccacccacugcggccauaauguugaucucucuaaagcuaucaaccugaauggggugggauucaacaauguggacgccagcucccuuggcgcggcucacgucgggcagucugccagcagaggacggggccugggggagaacccugaugacgaagagggagaugccaagaaaaagaaagacggcaagaaggcugaaccgaaaaauccccgcgagaacaagcucaaacaaccugaagauggcgccgggaaucagcccggagcuaacggcgccgggaaucagccuggagcgaacggcgccgggaaucagcccggagcuaacggcgccggcaaucaaccuggggcuaacggagccggcaaccagccgggggcgaauggagccggcaaccagcccggggcuaauggagccggcaaccagccuggcgcuaauggggccgacgaucaacccggagccaacggcgcugggaaucagccuggagcgaacggcgccgggaaucagcccggcgcuaacggagccggcaaucagccgggggccaacggagcuggcaaucaaccuggggccaacggagcgggcgaccagcccggggcuaauggcgccggaaaccagccuggcgccaacggggcuggagaucaacccggcgccaauggggcuggaaaccagcccggcgccaaugaggcggggaaccagccuggcgccaauggagcuggcaaccagccgggggccaauggagcuggcaaccaacccggggccaauggagcgggcgggcaggccgcuggcggaaacgccgcuaauaagaaagccggcgacgccggggcuggacagggccagaacaaugagggggcgaacgccccuaaugaaaaguccgugaaggaguaccuggauaaaguuagagcuacagugggaacggaauggacccccuguucugucacaugcggcgugggcguucgggugcgcagacgggucaacgccgccaacaagaaaccugaggaccugacccucaaugaccuggagacagauguguguaccauggacaagugcgcugggauuuuuaacguggucagcaauucccuuggacugguuauccuccuggugcuugcccuguucaacuga

SEQ ID NO: 5281 - RNA, 1161 nt, Artificial Sequence
  derived and/or modified CDS sequence (opt5) from Pv(CSP27VK247)__ANS71607.1__CSP
augaagaacuucauccugcucgccgugagcuccauucugcuugucgaccuguuucccacccacugcggccauaauguugaucucucuaaagcuaucaaccugaauggggugggauucaacaauguggacgccagcucccuuggcgcggcucacgucgggcagucugccagcagaggacggggccugggggagaacccugaugacgaagagggagaugccaagaaaaagaaagacggcaagaaggcugaaccgaaaaauccccgcgagaacaagcucaaacaaccugaagauggcgccgggaaucagcccggagcuaacggcgccggggaccagccuggagcgaauggcgccgggaaccagcccggagcuaauggcgccggcaaccaaccuggggcuaauggagccggcaaccagccgggggcgaacggagccggcaaucagcccggggcuaacggagccggcaaucagccuggcgcuaacggggccggagaucaacccggcgccaauggggcuggaaaccagccuggcgcgaauggggccggcaaccagcccggagcuaauggcgccgggaaccagccgggagccaauggcgcuggggaccaaccuggagccaacggcgcggggaaucagcccggcgcuaacggagccggcgaucagccuggggccaauggagcuggcaaccaacccggggccaacggagcuggcaaucagcccggggccaacggcgcgggaaaucagccuggcgccaacggggcuggaaaucagccgggcgccaacggggcuggaaaucaacccggcgccaacggggcgggcggacaggccgcuggcgggaaugccgcuaacaagaaagccggagacgccggcgcugggcagggacagaauaacgagggcgcgaaugccccuaacgagaaguccgugaaggaauaccuggauaaaguuagaacaacggugggcaccgaguggacacccuguucugugaccugcggggucggaguucgggugcgcagacgggucaaugcugccaacaagaaaccugaagaccugacacucaacgaccuggagaccgauguguguacaauggacaagugcgccggcauuuuuaauguggucagcaacucccuugggcugguuauccuccuggugcuugcucuguucaauuga

SEQ ID NO: 5282 - RNA, 1161 nt, Artificial Sequence
  derived and/or modified CDS sequence (opt5) from Pv(CSP38VK247)__ANS71618.1__CSP
augaagaacuucauccugcucgccgugagcuccauucugcuugucgaccuguuucccacccacugcggccauaauguugaucucucuaaagcuaucaaccugaauggggugaacuucaauaacguggacgccagcucccuuggagcggcucacgucggccagucugccagcagagggcggggacugggcgagaauccugaugacgaagagggggaugccaagaaaaagaaagacggaaagaaggcugaaccgaaaaacccccgcgagaauaagcucaaacaaccugaagauggcgccggcgaccagcccggggcuaacggagccggcaaucagccuggggcgaacggagccggcaaucagcccggggcuaacggagccggcaaucaaccuggcgcuaacggggccggaaaccagccgggcgcgaauggggccggaaaccagcccggcgcuaauggggccggaaaccagccuggcgcuaauggcgccggggaucaacccggagccaacggcgcugggaaucagccuggagcgaacggcgccggggaccagcccggcgcuaauggagccggcaaccagccgggggccaauggagcuggcaaccaaccuggggccaauggagcgggcgaucagcccggggcuaacggcgccggaaaucagccuggcgccaacggggcuggagaccaacccggcgccaacggggcuggaaaucagcccggcgccaacggggcgggcaaucagccuggagccaacggcgcugggaaucagccgggagccaacggcgcugggaaucaacccggagccaacggcgccgggggccaggcggcuggaggcaaugccgcuaacaagaaagccggggaugccggagcuggccaggggcagaauaacgagggagcgaaugccccuaacgagaaguccgugaaggaauaccuggacaaaguuagagcuacagugggcacggaguggacccccuguucugucacaugcggcguggggguucgggugcgcagacgggucaaugccgccaacaagaaaccugaagaccugacccucaacgauauugagacagacguguguaccauggauaagugcgcuggaaucuuuaauguggucagcaacucccugggccuuguuauucugcucgugcuggcccuuuucaauuga

SEQ ID NO: 5283 - RNA, 1161 nt, Artificial Sequence
  derived and/or modified CDS sequence (opt5) from Pv(CSP48VK247)__ANS71628.1__CSP
augaagaacuucauccugcucgccgugagcuccauucugcuugucgaccuguuucccacccacugcggccauaauguugaucucucuaaagcuaucaaccugaauggggugggauucaacaauguggacgccagcucccuuggcgcggcucacgucgggcagucugccagcagaggacggggccugggggagaacccugaugacgaagagggagaugccaagaaaaagaaagacggcaagaaggcugaaccgaaaaauccccgcgagaacaagcucaaacaaccugaagauggcgccgggaaucagcccggagcuaacggcgccggggaccagccuggagcgaauggcgccgggaaccagcccggagcuaauggcgccggcaaccaaccuggggcuaauggagccggcaaccagccgggggcgaacggagccggcaaucagcccggggcuaacggagccggcaaucagccuggcgcuaacggggccggagaucaacccggcgccaauggggcuggaaaccagccuggcgcgaauggggccggcaaccagcccggagcuaauggcgccgggaaccagccgggagccaauggcgcuggggaccaaccuggagccaacggcgcggggaaucagcccggcgcuaacggagccggcgaucagccuggggccaauggagcuggcaaccaacccggggccaacggagcuggcaaucagcccggggccaacggcgcgggaaaucagccuggcgccaacggggcuggaaaucagccgggcgccaacggggcuggaaaucaacccggcgccaacggggcgggcggacaggccgcuggcgggaaugccgcuaacaagaaagccggagacgccggcgcugggcagggacagaauaacgagggcgcgaaugccccuaacgagaaguccgugaaggaauaccuggauaaaguuagagcuacagugggcacggaguggacccccuguucugucacaugcggggugggaguucgggugcgcagacgggucaaugccgccaacaagaaaccugaagaccugacccucaacgaccuggagacagauguguguaccauggacaagugcgcuggcauuuuuaauguggucagcaacucccuugggcugguuauccuccuggugcuugcccuguucaauuga

SEQ ID NO: 5284 - RNA, 1161 nt, Artificial Sequence
  derived and/or modified CDS sequence (opt5) from Pv(Nr01)__ADB92539.1__CSP
augaagaacuucauccugcucgccgugagcuccauucugcuugucgaccuguuucccacccacugcggccauaauguugaucucucuaaagcuaucaaccugaauggggugggauucaacaauguggacgccagcucccuuggcgcggcucacgucgggcagucugccagcagaggacggggccugggggagaacccugaugacgaagagggagaugccaagaaaaagaaagacggcaagaaggcugaaccgaaaaauccccgcgagaacaagcucaaacaaccugaagauggcgccggggaccagcccggagcuaauggcgccgggaaccagccuggagcgaauggcgccgggaaccagcccggagcuaauggcgccggcaaccaaccuggggcuaauggagccggcaaccagccgggggcgaacggagccggcaaucagcccggggcuaacggagccggcaaucagccuggcgcuaacggggccggagaucaacccggcgccaauggggcugacgaucagccuggagcgaacggcgccgggaaucagcccggcgcuaacggagccggcaaucagccgggggccaacggagcuggcgaccaaccuggggccaauggagcgggcgaucagcccggggcuaacggcgccggaaaucagccuggcgccaacggggcuggagaccaacccggcgccaauggggcuggaaaccagcccggcgccaacggggcgggcaaucagccuggagccaacggcgcugggggacagccgggcgccaauggggcuggaaaccaacccggcgccaauggggcgggcggacaggccgcuggcgggaacgccgcuaauaagaaagccggagacgccggcgcugggcagggacagaacaaugagggcgcgaacgccccuaaugagaaguccgugaaggaauaccuggauaaaguuagagcuacagugggcacggaguggacccccuguucugucacaugcggggugggaguucgggugcgcagacgggucaacgccgccaauaagaaaccugaagaccugacccucaacgaucuggagacagacguguguaccauggauaagugcgcuggcauuuuuaauguggucagcaacucccuugggcugguuauccuccuggugcuugcccuguucaacuga

SEQ ID NO: 5285 - RNA, 1161 nt, Artificial Sequence
  derived and/or modified CDS sequence (opt5) from Pv(Nr02)__ADB92540.1__CSP
augaagaacuucauccugcucgccgugagcuccauucugcuugucgaccuguuucccacccacugcggccauaauguugaucucucuaaagcuaucaaccugaauggggugggauucaacaauguggacgccagcucccuuggcgcggcucacgucgggcagucugccagcagaggacggggccugggggagaacccugaugacgaagagggagaugccaagaaaaagaaagacggcaagaaggcugaaccgaaaaauccccgcgagaacaagcucaaacaaccugaagauggcgccggggaccagcccggagcuaauggcgccgggaaccagccuggagcgaauggcgccgggaaccagcccggagcuaauggcgccggcaaccaaccuggggcuaauggagccggcaaccagccgggggcgaacggagccggcaaucagcccggggcuaacggagccggcaaucagccuggcgcuaacggggccggagaucaacccggcgccaauggggcuggagaccagccuggcgcgaacggggccggcaaucagcccggagcuaacggcgccgggaaucagccgggagccaacggcgcuggggaucaaccuggagccaauggcgcgggggaccagcccggcgcuaacggagccggcaaucagccuggggccaacggagcuggcgaucaacccggggccaauggagcuggcaaccagcccggggccaacggcgcgggaaaucagccuggcgccaacggggcuggaaaucagccgggcgccaacggggcuggaaagcaacccggcgccaauggggcgggcggacaggccgcuggcgggaacgccgcuaauaaaaaggccggagacgccggcgcugggcagggacagaacaaugagggcgcgaacgccccuaaugagaaguccgugaaagaauaccuggacaagguuagagcuacagugggcacggaguggacccccuguucugucacaugcggggugggaguucgggugcgcagacgggucaacgccgccaauaaaaagccugaagaucugacccucaacgaccuggagacagauguguguaccauggacaaaugcgcuggcauuuuuaauguggucagcaacucccuugggcugguuauccuccuggugcuugcccuguucaacuga

SEQ ID NO: 5286 - RNA, 1161 nt, Artificial Sequence
  derived and/or modified CDS sequence (opt5) from Pv(Nr05)__ADB92543.1__CSP
augaagaacuucauccugcucgccgugagcuccauucugcuugucgaccuguuucccacccacugcggccauaauguugaucucucuaaagcuaucaaccugaauggggugggauucaacaauguggacgccagcucccuuggcgcggcucacgucgggcagucugccagcagaggacggggccugggggagaacccugaugacgaagagggagaugccaagaaaaagaaagacggcaagaaggcugaaccgaaaaauccccgcgagaacaagcucaaacaaccugaagauggcgccggggaccagcccggagcuaauggcgccgggaaccagccuggagcgaauggcgccgggaaccagcccggagcuaauggcgccggcaaccaaccuggggcuaauggagccggcaaccagccgggggcgaacggagccggcaaucagcccggggcuaacggagccggcaaucagccuggcgcuaacggggccggaaaucaacccggcgccaacggggcugaugaccagccuggagcgaauggcgccgggaaccagcccggcgcuaauggagccggcaaccagccgggggccaauggagcuggcaaccaaccuggggccaauggagcgggcgaucagcccggggcuaacggcgccggaaaucagccuggcgccaacggggcuggagaccaacccggcgccaacggggcuggaaaucagcccggcgccaacggggcgggcaaucagccuggagccaacggcgcugggaaucagccgggagccaacggcgcugggaaucaacccggagccaacggcgccgggggccaggcggcuggaggcaaugccgcuaacaagaaagccggggaugccggagcuggccaggggcagaauaacgagggagcgaaugccccuaacgagaaguccgugaaggaauaccuggacaaaguuagagcuacagugggcacggaguggacccccuguucugucacaugcggcguggggguucgggugcgcagacgggucaaugccgccaacaagaaaccugaagaccugacccucaacgaucuggagacagacguguguaccauggauaagugcgcuggaauuuuuaauguggucagcaacucccuuggccugguuauccuccuggugcuugcccuguucaauuga

SEQ ID NO: 5287 - RNA, 1161 nt, Artificial Sequence
  derived and/or modified CDS sequence (opt5) from Pv(Vc01)__ADB92544.1__CSP
augaagaacuucauccugcucgccgugagcuccauucugcuugucgaccuguuucccacccacugcggccauaauguugaucucucuaaagcuaucaaccugaauggggugggauucaacaauguggacgccagcucccuuggcgcggcucacgucgggcagucugccagcagaggacggggccugggggagaacccugaugacgaagagggagaugccaagaaaaagaaagacggcaagaaggcugaaccgaaaaauccccgcgagaacaagcucaaacaaccugaagauggcgccggggaccagcccggagcuaauggcgccgggaaccagccuggagcgaauggcgccgggaaccagcccggagcuaauggcgccggcaaccaaccuggggcuaauggagccggcaaccagccgggggcgaacggagccggcaaucagcccggggcuaacggagccggcaaucagccuggcgcuaacggggccggaaaucaacccggcgccaacggggcugaugaccagccuggagcgaauggcgccgggaaccagcccggcgcuaauggagccggcaaccagccgggggccaauggagcuggcaaccaaccuggggccaauggagcgggcgaucagcccggggcuaacggcgccggaaaucagccuggcgccaacggggcuggagaccaacccggcgccaacggggcuggaaaucagcccggcgccaacggggcgggcaaucagccuggagccaacggcgcugggaaucagccgggagccaacggcgcugggaaucaacccggagccaacggcgccgggggccaggcggcuggaggcaaugccgcuaacaagaaagccggggaugccggaggcgggcagggacagaauaacgagggcgcuaaugcgccuaacgagaaguccgugaaggaauaccuggacaaaguuagagccacagugggcacggaguggacccccuguucugucacaugcggggugggaguucgggugcgcagacgggucaaugcugccaacaagaaaccugaagaccugacccucaacgaucuggagacagacguguguaccauggauaagugcgccggcauuuuuaauguggucagcaacucccuugggcugguuauccuccuggugcuugcucuguucaauuga

SEQ ID NO: 5288 - RNA, 1161 nt, Artificial Sequence
  derived and/or modified CDS sequence (opt5) from Pv(Vc02)__ADB92545.1__CSP
augaagaacuucauccugcucgccgugagcuccauucugcuugucgaccuguuucccacccacugcggccauaauguugaucucucuaaagcuaucaaccugaauggggugggauucaacaauguggacgccagcucccuuggcgcggcucacgucgggcagucugccagcagaggacggggccugggggagaacccugaugacgaagagggagaugccaagaaaaagaaagacggcaagaaggcugaaccgaaaaauccccgcgagaacaagcucaaacaaccugaagauggcgccggggaccagcccggagcuaauggcgccgggaaccagccuggagcgaauggcgccgggaaccagcccggagcuaauggcgccggcaaccaaccuggggcuaauggagccggcaaccagccgggggcgaacggagccggcaaucagcccggggcuaacggagccggcaaucagccuggcgcuaacggggccggagaucaacccggcgccaauggggcugacgaucagccuggagcgaacggcgccgggaaucagcccggcgcuaacggagccggcaaucagccgggggccaacggagcuggcgaccaaccuggggccaauggagcgggcgaucagcccggggcuaacggcgccggaaaucagccuggcgccaacggggcuggagaccaacccggcgccaauggggcuggaaaccagcccggcgccaacggggcgggcaaucagccuggagccaacggcgcugggaaucagccgggagccaacggcgcugggaaucaacccggagccaacggcgccgggggccaggcggcuggaggcaaugccgcuaacaagaaagccggggacgccggagcuggccaggggcagaauaacgagggagcgaaugccccuaacgagaaguccgugaaggaauaccuggauaaaguuagagcuacagugggcacggaguggacccccuguucugucacaugcggcguggggguucgggugcgcagacgggucaaugccgccaacaagaaaccugaagaccugacccucaaugaucuggagacagacguguguaccauggauaagugcgcuggaauuuuuaacguggucagcaacucccuuggccugguuauccuccuggugcuugcccuguucaauuga

SEQ ID NO: 5289 - RNA, 1158 nt, Artificial Sequence
  derived and/or modified CDS sequence (opt5) from Pv(Cam46)__AHL69652.1__CSP
augaagaacuucauccugcucgccgugagcuccauucugcuugucgaccuguuucccacccacugcggccauaauguugaucucucuaaagcuaucaaccugaauggggugggauucaacaauguggacgccagcucccuuggcgcggcucacgucgggcagucugccagcagaggacggggccugggggagaacccugaugacgaagagggagaugccaagaaaaagaaagacggcaagaaggcugaaccgaaaaauccccgcgagaacaagcucaaacaaccugaagauggcgccgggaaucagcccggagcuaacggcgccgggaaucagccuggagcgaacggcgccgggaaucagcccggagcuaacggcgccgacgaucaaccuggcgcuaauggggccggaaaccagccgggcgcgaacggggccggaaaucagcccggcgcuaacggggccggaaaucagccuggcgcuaacggcgccgggaaucaacccggagccaacggcgcugacgaucagccuggggcgaauggagccggcaaccagcccggggcuaauggcgccggaaaccagccgggcgccaauggggcuggaaaccaaccuggcgccaauggggcgggagaccagcccggcgcuaacggggccggcaaucagccuggagccaacggcgcugggaaccaacccggagccaauggcgcugggaaccagcccggagccaauggcgcggggaaccagccuggcgccaauggagcuggcaaccagccgggggccaauggagcuggcaaccaacccggggccaauggagcgggcgggcaggccgcuggcggaaacgccggcgggaaugcuggaggcaacgccgggggacagggccagaauaacgagggcgccaaugcuccuaacgagaaguccgugaaagaauaccuggauaagguuagagcgacaguggggacggaguggacccccuguucugucacaugcggagugggcguucgggugcgcagacgggucaacgccgcuaauaagaaaccugaagaccugacccucaacgaccuggagacagauguguguaccauggacaagugcgccgggauuuuuaauguggucagcaacucccuuggacugguuauccuccuggugcuugcccuguucaauuga

SEQ ID NO: 5290 - RNA, 1143 nt, Artificial Sequence
  derived and/or modified CDS sequence (opt5) from Pv(Cam20)__AGN05250.1__CSP
augaagaacuucauccugcucgccgugagcuccauucugcuugucgaccuguuucccacccacugcggccauaauguugaucucucuaaagcuaucaaccugaauggggugaacuucaauaacguggacgccagcucccuuggagcggcucacgucggccagucugccagcagagggcggggacugggcgagaauccugaugacgaagagggggaugccaagaaaaagaaagacggaaagaaggcugaaccgaaaaacccccgcgagaauaagcucaaacaaccuggcgauagagccgacggccagcccgcuggggaucgggccgacggacagccugcgggcgaucgcgccgacgggcagcccgcuggagauagagccgcuggccaaccugccggggaccgggcggacggacagccggccggcgaucgcgcugccggccagcccgcuggggacagagccgauggacagccugccggcgaccgggcugcggggcaacccgccggagaucgcgcugacggccagccugccggggauagagccgcuggacagcccgccggcgaccgggcggauggccagccggcuggggaccgcgccgccggacaaccugcuggcgauagagccgcugggcagcccgccggagaccgggcggccggccagccugcuggggaccgcgccgauggccaacccgcuggagacagagccgcgggccagcccgccggggaucgggcugccggacagccugcuggcgacagagccgccgggcagccggcuggaaacggcgccgggggccaagcggcuggaggcaaugccgccaacaagaaagcugaagaugccgggggaaaugcgggcgggcagggacagaacaaugagggcgcuaacgcccccaacgagaaguccgugaaggaauaccuggacaaaguucgcgccacaguggggacggaguggaccccuuguucugucacaugcggcgugggaguucgggugagacgccgggucaaugcugccaacaagaaacccgaagaucugacccucaaugacauugagacagauguguguaccauggacaagugcgcgggcaucuuuaacguggucagcaauucccuggggcuuguuauucugcucgugcuggcucuuuucaacuga

SEQ ID NO: 5291 - RNA, 1143 nt, Artificial Sequence
  derived and/or modified CDS sequence (opt5) from Pv(Cam22)__AGN05252.1__CSP
augaagaacuucauccugcucgccgugagcuccauucugcuugucgaccuguuucccacccacugcggccauaauguugaucucucuaaagcuaucaaccugaauggggugaacuucaauaacguggacgccagcucccuuggagcggcucacgucggccagucugccagcagagggcggggacugggcgagaauccugaugacgaagagggggaugccaagaaaaagaaagacggaaagaaggcugaaccgaaaaacccccgcgagaauaagcucaaacaaccuggcgauagagccgacggccagcccgcuggggaucgggccgacggacagccugcgggcgaucgcgccgacgggcagcccgcuggagauagagccgcuggccaaccugccggggaccgggcggacggacagccggccggcgaucgcgcugccggccagcccgcuggggacagagccgauggacagccugccggcgaccgggcugcggggcaacccgccggagaucgcgcugccggccagccugccggggacagagcugauggacagcccgccggcgaccgggcggcuggccagccggccggggaucgcgccgacggacaaccugcuggcgauagagccgcugggcagcccgccggagaccgggcggccggccagccugcuggggaccgcgccgauggccaacccgcuggagacagagccgcgggccagcccgccggggaucgggcugccggacagccugcuggcgacagagccgccgggcagccggcuggaaacggcgccgggggccaagcggcuggaggcaaugccgccaacaagaaagcugaagaugccgggggaaaugcgggcgggcagggacagaacaaugagggcgcuaacgcccccaacgagaaguccgugaaggaauaccuggacaaaguucgcgccacaguggggacggaguggaccccuuguucugucacaugcggcgugggaguucgggugagacgccgggucaaugcugccaacaagaaacccgaagaucugacccucaaugacauugagacagauguguguaccauggacaagugcgcgggcaucuuuaacguggucagcaauucccuggggcuuguuauucugcucgugcuggcucuuuucaacuga

SEQ ID NO: 5292 - RNA, 1143 nt, Artificial Sequence
  derived and/or modified CDS sequence (opt5) from Pv(Cam36)__AHL69651.1__CSP
augaagaacuucauccugcucgccgugagcuccauucugcuugucgaccuguuucccacccacugcggccauaauguugaucucucuaaagcuaucaaccugaauggggugaacuucaauaacguggacgccagcucccuuggagcggcucacgucggccagucugccagcagagggcggggacugggcgagaauccugaugacgaagagggggaugccaagaaaaagaaagacggaaagaaggcugaaccgaaaaacccccgcgagaauaagcucaaacaaccugccggcgauggcgcugccgugcagcccgcgggggacggagccgcuguucagccugccggcgauggggcugacggacagcccgccggcgauggggcggccgugcaaccugcuggagacggcgccgcuggccagccggccggggauagagccgcuggacagcccgcgggcaaccgggccgcugggcagccugccggagaccgcgccgacggccaacccgcuggggauagagccgcgggacagccugcuggcgaccgggccgccggccagcccgcuggggaucgcgccgacggacagccggcuggcgauagagccgcggggcaaccugccggagaccgggcugccggccagcccgcuggggaucgcgccgcgggccagccugccggagacagagcugauggccaacccgccggggaccgggcugccggacagcccgccggcgaucgcgcugcggggcagccugccggagacagagcugccggccaggccgcugggggcaaugccggaggcaacgcugggggaaaugcgggcgggaacgccggaggcaaugccgggggcaacgcuggaggccaagggcagaacaaugaaggagccaacgcgccgaaugagaaguccgucaaagaguaccuggacaaggugcgggcuacaguuggcacggaauggacccccuguucugugacaugcggggucggagugcgcgugagacggagagucaacgccgccaauaagaaaccugaggaucugacccucaacgaccuggaaacagauguuuguaccauggacaagugcgcuggcauuuuuaauguggugagcaacucccuugggcuggucauccuccuggugcuugcccuguucaauuga

SEQ ID NO: 5293 - RNA, 1137 nt, Artificial Sequence
  derived and/or modified CDS sequence (opt5) from Pv(Pt01.7)__ADB92550.1__CSP
augaagaacuucauccugcucgccgugagcuccauucugcuugucgaccuguuucccacccacugcggccauaauguugaucucucuaaagcuaucaaccugaauggggugggauucaacaauguggacgccagcucccuuggcgcggcucacgucgggcagucugccagcagaggacggggccugggggagaacccugaugacgaagagggagaugccaagaaaaagaaagacggcaagaaggcugaaccgaaaaauccccgcgagaacaagcucaaacaaccugaagauggcgccggggaccagcccggagcuaauggcgccgggaaccagccuggagcgaauggcgccgggaaccagcccggagcuaauggcgccggcaaccaaccuggggcuaauggagccggcaaccagccgggggcgaacggagccgaugaccagcccggcgcuaauggggccggaaaccagccuggcgcuaauggcgccgggaaccaacccggagccaauggcgcugggaaccagccuggagcgaauggcgccggggaucagcccggcgcuaacggagccggcaaucagccgggggccaacggagcuggcgaccaaccuggggccaauggagcgggcaaccagcccggggcuaauggcgccggaaaccagccuggcgccaauggggcuggaaaccaacccggcgccaacggggcuggaaaucagcccggcgccaacggggcgggcggacaggccgcuggcgggaaugccgcuaacaagaaagccggagaugcgggcgccgggggacaggcugccggcgggaaugcugccaacaagaaggccggcgacgcuggagcgggccaagggcagaauaacgagggagccaaugcuccuaacgagaaauccgugaaggaauaccuggacaaaguuagagccacagugggcacggaguggaccccguguucugucacaugcggggugggaguucgggugcgcagacgggucaaugccgcuaacaagaaacccgaagaucugacccucaaugaccuggagacagauguguguaccauggacaagugcgccggcauuuuuaacguggucagcaauucccuuggccugguuauccuccuggugcuugcgcuguucaacuga

SEQ ID NO: 5294 - RNA, 1134 nt, Artificial Sequence
  derived and/or modified CDS sequence (opt5) from Pv(Cam39)__AGN05267.1__CSP
augaagaacuucauccugcucgccgugagcuccauucugcuugucgaccuguuucccacccacugcggccauaauguugaucucucuaaagcuaucaaccugaauggggugggauucaacaauguggacgccagcucccuuggcgcggcucacgucgggcagucugccagcagaggacggggccugggggagaacccugaugacgaagagggagaugccaagaaaaagaaagacggcaagaaggcugaaccgaaaaauccccgcgagaacaagcucaaacaaccugccggcgauagagcugacgggcagcccgccggagaucgggcggacggccagccugccggggaucgcgcugacggacagcccgccggcgauagagcugccgggcaaccugcgggagaccgggccgacggccagccggcuggcgaucgcgccgcugggcagcccgccggagacagagccgauggccagccugcuggggaccgggcggccggacaacccgcuggcgaucgcgccgacgggcagccugccggagauagagcugccggccagcccgcgggcgaccgggcugccgggcagccggccggagaucgcgcugccggccaaccugcuggggacagagccgauggacagcccgcgggcgaccgggccgcugggcagccugccggcgaccgcgcugauggacaacccgccggcgacagagcggccgggcagcccgcuggagaucgggccgcuggccagccugccggggacagagccgcuggacagccggcgggcaauggggccggcggacaagcugccggcgggaacgccggaggcaaugcugggggaaacgccggcgggcagggccagaauaacgaaggagcgaaugcucccaacgagaaguccgugaaagaguaccuggauaagguucgcgccacagugggcacggaauggaccccuuguucugucacaugcggggugggaguucgggugagacgccgggucaacgccgcuaauaagaaacccgaggaccugacccucaacgaucuggaaacagacguguguaccauggauaagugcgccggcauuuuuaauguggucagcaacucccuugggcugguuauccuccuggugcuugcgcuguucaauuga

SEQ ID NO: 5295 - RNA, 1134 nt, Artificial Sequence
  derived and/or modified CDS sequence (opt5) from Pv(Nr03)__ADB92541.1__CSP
augaagaacuucauccugcucgccgugagcuccauucugcuugucgaccuguuucccacccacugcggccauaauguugaucucucuaaagcuaucaaccugaauggggugaacuucaauaacguggacgccagcucccuuggagcggcucacgucggccagucugccagcagagggcggggacugggcgagaauccugaugacgaagagggggaugccaagaaaaagaaagacggaaagaaggcugaaccgaaaaacccccgcgagaauaagcucaaacaaccuggcgauagagccgacggccagcccgcuggggaucgggccgacggacagccugcgggcgaucgcgccgacgggcagcccgcuggagauagagccgacggccaaccugcuggggaccgggccgauggacagccggcgggcgaccgcgccgauggccagcccgcuggggacagagccgauggacagccugcuggcgaccgggccgaugggcaacccgccggagaccgcgcugauggccagccugcgggggacagagccgauggacagcccgcuggcgaccgggccgacggccagccggccggggaucgcgcugacggacaaccugccggcgauagagcggacgggcagcccgcuggagaucgggccgacggccagccugccggggaucgcgcugacggccaacccgccggagauagagcugacggccagcccgccggggaucgggcggccggacagccugcuggcgacagagccgcugggcagccggccggagaucgcgcggccggccaacccgcugggaacggcgccggaggccaggcugccgggggaaaugccggcgggcagggacagaacaaugaaggcgcuaacgcgccuaaugagaaguccgugaaagaguaccuggacaagguucgggccacaguggggacggaauggacccccuguucugucacaugcggcgugggaguuagagugcgccggagagucaacgcugccaacaagaaaccugaggaccugacccucaaugaucuggaaacagacguguguaccauggauaagugcgccggcauuuuuaacguggucagcaauucccuugggcugguuauccuccuggugcuugcucuguucaacuga

SEQ ID NO: 5296 - RNA, 1134 nt, Artificial Sequence
  derived and/or modified CDS sequence (opt5) from Pv(Pt04.1)__ADB92554.1__CSP
augaagaacuucauccugcucgccgugagcuccauucugcuugucgaccuguuucccacccacugcggccauaauguugaucucucuaaagcuaucaaccugaauggggugaacuucaauaacguggacgccagcucccuuggagcggcucacgucggccagucugccagcagagggcggggacugggcgagaauccugaugacgaagagggggaugccaagaaaaagaaagacggaaagaaggcugaaccgaaaaacccccgcgagaauaagcucaaacaaccuggcgauagagccgacggccagcccgcuggggaucgggccgacggacagccugcgggcgaucgcgccgacgggcagcccgcuggagauagagccgcuggccaaccugccggggaccgggcggccggacagccggcuggcgaccgcgccgauggccagcccgcuggggacagagccgauggacagccugccggcgaccgggcugaugggcaacccgcgggagaccgcgccgauggccagccugcuggggacagagccgccggacagcccgcuggcgaucgggccgcgggccagccggcuggggaccgcgccgauggacaaccugccggcgacagagcugccgggcagcccgcuggagaccgggccgauggccagccugcgggggaccgcgccgcuggccaacccgccggagauagagcugacggccagcccgccggggaucgggcggccggacagccugcuggcgacagagccgcugggcagccggccggagaucgcgccgcuggccaagcggccggggaccgggcugccggccaggccgcuggaggcaacgccgggggacagggccagaauaacgaaggggcgaaugcucccaacgagaaguccgugaaagaguaccuggauaagguuagagccacagugggaacggaauggaccccuuguucugucacaugcggcguggggguucgcgugcggagacgcgucaaugccgcuaacaagaaacccgaggaccugacccucaacgaucuggaaacagacguguguaccauggauaagugcgccggcauuuuuaauguggucagcaacucccuuggacugguuauccuccuggugcuugcgcuguucaauuga

SEQ ID NO: 5297 - RNA, 1134 nt, Artificial Sequence; identical to SEQ ID NO: 5262
  derived and/or modified CDS sequence (opt5) from Pv(Sal1)__ADB92528.1__CSP

SEQ ID NO: 5298 - RNA, 1131 nt, Artificial Sequence
  derived and/or modified CDS sequence (opt5) from Pv(Cam27)__AGN05255.1__CSP
augaagaacuucauccugcucgccgugagcuccauucugcuugucgaccuguuucccacccacugcggccauaauguugaucucucuaaagcuaucaaccugaauggggugggauucaacaauguggacgccagcucccuuggcgcggcucacgucgggcagucugccagcagaggacggggccugggggagaacccugaugacgaagagggagaugccaagaaaaagaaagacggcaagaaggcugaaccgaaaaauccccgcgagaacaagcucaaacaaccugccggcgcuagagccgaugggcagcccgcgggagaccgggccgauggccagccugcuggggaccgcgccgauggacagcccgcuggcgacagagccgcggggcaaccugccggagaucgggcugacggccagccggccggcgaccgcgcugccgggcagcccgccggagauagagcugacggccagccugcgggggaucgggccgcuggacaacccgccggcgaccgcgccgaugggcagccugcuggagacagagccgcgggccagcccgcuggcgaucgggccgccgggcagccggcuggagaccgcgccgauggccaaccugcuggggacagagccgcgggacagcccgccggcgaucgggcugacgggcagccugccggcgaccgcgcugccggacaacccgcgggcgauagagccgcugggcagcccgccggagaccgggcugccggccagccugccgggaauggagcuggcgggcaggcggccggcggaaacgcuggcgggaaugccggaggcaacgccgggggaaaugcuggcgggaacgccggcggacaaggccagaauaacgaaggggcgaacgcuccgaaugagaaguccgugaaagaguaccuggauaagguuagagccacagugggaacggaauggacccccuguucugucacaugcggcguggggguucgcgugcggagacgcgucaacgccgcuaauaagaaaccugaggaccugacccucaacgaucuggaaacagacguguguaccauggauaagugcgccggaauuuuuaauguggucagcaacucccuuggccugguuauccuccuggugcuugcgcuguucaauuga

SEQ ID NO: 5299 - RNA, 1131 nt, Artificial Sequence
  derived and/or modified CDS sequence (opt5) from Pv(Cam46)__AGN05273.2__CSP
augaagaacuucauccugcucgccgugagcuccauucugcuugucgaccuguuucccacccacugcggccauaauguugaucucucuaaagcuaucaaccugaauggggugaacuucaauaacguggacgccagcucccuuggagcggcucacgucggccagucugccagcagagggcggggacugggcgagaauccugaugacgaagagggggaugccaagaaaaagaaagacggaaagaaggcugaaccgaaaaacccccgcgagaauaagcucaaacaaccugccggcgauagagcugacggccagcccgccggggaucgggcggacggacagccugccggcgaucgcgcugacgggcagcccgccggagauagagcugccggccaaccugcgggggaccgggccgacggacagccggcuggcgaucgcgccgcuggccagcccgccggggacagagccgauggacagccugcuggcgaccgggcggccgggcaacccgcuggagaucgcgccgacggccagccugccggggauagagcugccggacagcccgcgggcgaccgggcugccggccagccggccggggaucgcgcugacggacaaccugccggcgauagagcugccgggcagcccgcgggagaccgggccgacggccagccugcuggggaucgcgccgcuggccaacccgccggagacagagcggccggccagcccgcuggggaucgggccgcuggacagccugccggcaacggggccggaggccaggcugccgggggcaaugcgggaggcaacgcugggggaaaugccggcgggaacgccggaggcaaugcugggggccaaggacagaacaacgaaggcgccaaugcgccgaacgagaaguccgugaaagaguaccuggacaagguuagagcuacaguggggacggaauggacccccuguucugucacaugcggagugggcguucgcgugcggagacgcgucaaugccgccaacaagaaaccugaggaucugacccucaaugaccuggaaacagauguguguaccauggacaagugcgcugggauuuuuaacguggucagcaauucccuuggacugguuauccuccuggugcuugcccuguucaacuga

SEQ ID NO: 5300 - RNA, 1128 nt, Artificial Sequence
  derived and/or modified CDS sequence (opt5) from Pv(CSP10VK210)__ANS71590.1__CSP
augaagaacuucauccugcucgccgugagcuccauucugcuugucgaccuguuucccacccacugcggccauaauguugaucucucuaaagcuaucaaccugaauggggugaacuucaauaacguggacgccagcucccuuggagcggcucacgucggccagucugccagcagagggcggggacugggcgagaauccugaugacgaagagggggaugccaagaaaaagaaagacggaaagaaggcugaaccgaaaaacccccgcgagaauaagcucaaacaaccuggcgauagagccgacggccagcccgcuggggaucgggccgacggacagccugcgggcgaucgcgccgacgggcagcccgcuggagauagagccgacggccaaccugcuggggaccgggccgcgggacagccggccggcgaucgcgcugccggccagcccgcuggggacagagccgauggacagccugccggcgaccgggcugcggggcaacccgccggagaucgcgcugacggccagccugccggggauagagccgcuggacagcccgccggcgaccgggcggcuggccagccggccggggaucgcgccgcuggacaaccugccggcgacagagcugaugggcagcccgccggagaccgggcggccggccagccugcuggggaccgcgccgcuggccaacccgccggagauagagcggccggccagcccgcuggggaccgggccgcuggacagccugccggcaacggggccggaggccaggcugccgggggcaaugcggcuaacaagaaagccgaagaugccggaggcaaugcugggggaaacgccggcgggcaaggacagaauaacgagggcgcgaacgcuccgaaugagaaguccgugaaggaauaccuggacaaaguuagagccacaguggggacggaguggacccccuguucugucacaugcggcgugggaguucgcgugcggagacgcgucaacgccgcuaauaagaaaccugaagaucugacccucaacgaccuggagacagauguguguaccauggacaagugcgccggcauuuuuaauguggucagcaacucccuugggcugguuauccuccuggugcuugcgcuguucaauuga

SEQ ID NO: 5301 - RNA, 1122 nt, Artificial Sequence
  derived and/or modified CDS sequence (opt5) from Pv(Cam19)__AGN05249.1__CSP
augaagaacuucauccugcucgccgugagcuccauucugcuugucgaccuguuucccacccacugcggccauaauguugaucucucuaaagcuaucaaccugaauggggugggauucaacaauguggacgccagcucccuuggcgcggcucacgucgggcagucugccagcagaggacggggccugggggagaacccugaugacgaagagggagaugccaagaaaaagaaagacggcaagaaggcugaaccgaaaaauccccgcgagaacaagcucaaacaaccugccggcgauagagcugacgggcagcccgccggagaucgggcggacggccagccugccggggaucgcgcugacggacagcccgccggcgauagagcugacgggcaaccugccggagaccgggcggauggccagccggccggcgaccgcgcugccgggcagcccgcuggagauagagccgacggccagccugccggggaucgggcugcgggacaacccgccggcgaccgcgcugaugggcagccugccggagacagagccgauggccagcccgcuggcgaccgggccgcggggcagccggcuggagaucgcgccgacggccaaccugccggggacagagcugccggacagcccgcuggcgaucgggccgacgggcagccugcgggcgaucgcgccgcuggacaacccgccggcgacagagcugccgggcagcccgcgggagaucgggccgcuggccagccugccgggaauggagcuggcgggcaggccgccggcggaaacgcuggcgggaaugcgggaggcaacgccgggggaaaugcuggcgccgggcaaggccagaacaaugaaggagccaacgcuccgaacgagaaguccgugaaagaguaccuggacaagguuagagccacagugggcacggaauggacccccuguucugucacaugcggggugggaguucgcgugcggagacgcgucaaugcggcuaacaagaaaccugaggaucugacccucaaugaccuggaaacagauguguguaccauggacaagugcgccggcauuuuuaacguggucagcaauucccuugggcugguuauccuccuggugcuugcccuguucaacuga

SEQ ID NO: 5302 - RNA, 1119 nt, Artificial Sequence
  derived and/or modified CDS sequence (opt5) from Pv(Cam10)__AGN05241.2__CSP
augaagaacuucauccugcucgccgugagcuccauucugcuugucgaccuguuucccacccacugcggccauaauguugaucucucuaaagcuaucaaccugaauggggugggauucaacaauguggacgccagcucccuuggcgcggcucacgucgggcagucugccagcagaggacggggccugggggagaacccugaugacgaagagggagaugccaagaaaaagaaagacggcaagaaggcugaaccgaaaaauccccgcgagaacaagcucaaacaaccugccggcgauagagcugacgggcagcccgccggagaucgggcggacggccagccugccggggaucgcgcugacggacagcccgccggcgauagagcugccgggcaaccugcgggagaccgggccgacggccagccggcuggcgaucgcgccgcugggcagcccgccggagacagagccgauggccagccugcuggggaccgggcggccggacaacccgcuggcgaucgcgccgacgggcagccugccggagauagagcugccggccagcccgcgggcgaccgggcugccgggcagccggccggagaucgcgcugacggccaaccugccggggauagagcugccggacagcccgcgggcgaccgggccgacgggcagccugcuggcgaucgcgccgcuggacaacccgccggcgacagagcggccgggcagcccgcuggagaucgggccgcuggccagccugccgggaauggagccggcgggcaggcugcgggcggaaacgccggcgggaaugcuggaggcaacgccgggggaaaugccggcgggcaaggccagaacaaugaaggagcuaacgccccgaacgagaaguccgugaaagaguaccuggacaagguuagagcgacagugggcacggaauggacccccuguucugucacaugcggggugggaguucgcgugcggagacgcgucaaugcugccaacaagaaaccugaggaucugacccucaaugaccuggaaacagauguguguaccauggacaagugcgccggcauuuuuaacguggucagcaauucccuugggcugguuauccuccuggugcuugcucuguucaacuga

SEQ ID NO: 5303 - RNA, 1119 nt, Artificial Sequence
  derived and/or modified CDS sequence (opt5) from Pv(Cam3)__AGN05234.2__CSP
augaagaacuucauccugcucgccgugagcuccauucugcuugucgaccuguuucccacccacugcggccauaauguugaucucucuaaagcuaucaaccugaauggggugaacuucaauaacguggacgccagcucccuuggagcggcucacgucggccagucugccagcagagggcggggacugggcgagaauccugaugacgaagagggggaugccaagaaaaagaaagacggaaagaaggcugaaccgaaaaacccccgcgagaauaagcucaaacaaccugccggcgauagagcugacggccagcccgccggggaucgggcggacggacagccugccggcgaucgcgcugacgggcagcccgccggagauagagcugccggccaaccugcgggggaccgggccgacggacagccggcuggcgaucgcgccgcuggccagcccgccggggacagagccgauggacagccugcuggcgaccgggcggccgggcaacccgcuggagaucgcgccgacggccagccugccggggauagagcugccggacagcccgcgggcgaccgggcugccggccagccggccggggaucgcgcugacggacaaccugccggcgauagagcugccgggcagcccgcgggagaccgggccgacggccagccugcuggggaucgcgccgcuggccaacccgccggagacagagcggccggccagcccgcuggggaucgggccgcuggacagccugccggcaacggggccggaggccaggcugccgggggcaaugcgggaggcaacgcugggggaaaugccggcgggaacgccggaggccaagggcagaauaacgaaggcgcuaacgccccgaaugagaaguccgugaaagaguaccuggacaagguuagagcgacagugggaacggaauggacccccuguucugucacaugcggcguggggguucgcgugcggagacgcgucaacgcugccaauaagaaaccugaggaucugacccucaacgaccuggaaacagauguguguaccauggacaagugcgccggaauuuuuaauguggucagcaacucccuuggccugguuauccuccuggugcuugcucuguucaauuga

SEQ ID NO: 5304 - RNA, 1119 nt, Artificial Sequence
  derived and/or modified CDS sequence (opt5) from Pv(Cam30)__AGN05258.1__CSP
augaagaacuucauccugcucgccgugagcuccauucugcuugucgaccuguuucccacccacugcggccauaauguugaucucucuaaagcuaucaaccugaauggggugaacuucaauaacguggacgccagcucccuuggagcggcucacgucggccagucugccagcagagggcggggacugggcgagaauccugaugacgaagagggggaugccaagaaaaagaaagacggaaagaaggcugaaccgaaaaacccccgcgagaauaagcucaaacaaccugccggcgauggcgcugccgugcagcccgcgggggacggagccgcuguucagccugccggcgauggggcugacggacagcccgccggcgauggggcggccggacaaccugcuggcgacagagccgauggccagccggcuggggaccgggccgccggacagcccgcuggcgaccgcgcggaugggcagccugccggagacagagcugccggccaacccgccggggaucgggcugacggacagccugccggcgaucgcgcggcuggccagcccgccggggacagagccgcuggacagccggccggcgaucgggcugacgggcaaccugccggagaucgcgcggccggccagcccgcuggggacagagccgauggccagccugcuggagaccgggccgcgggccaacccgccggggaccgcgcugccggacagcccgcuggcgauagagccgccgggcagccugcuggaaacggcgccgggggccaggcggcuggaggcaaugccgggggaaacgccggcgggaaugcuggaggcaacgccgggggccaaggacagaauaacgaaggcgcgaacgcuccgaaugagaaguccgugaaagaguaccuggacaagguccgggccacaguggggacggaauggacccccuguucuguuacaugcggagugggcguccgcgugagacggagagugaacgccgcuaauaagaaaccugaggaucugacccucaacgaccuggaaacagaugucuguaccauggacaagugcgccgggauuuuuaauguugugagcaacucccuuggacuggugauccuccugguccuugcgcuguucaauuga

SEQ ID NO: 5305 - RNA, 1119 nt, Artificial Sequence
  derived and/or modified CDS sequence (opt5) from Pv(Cam43)__AGN05271.1__CSP
augaagaacuucauccugcucgccgugagcuccauucugcuugucgaccuguuucccacccacugcggccauaauguugaucucucuaaagcuaucaaccugaauggggugggauucaacaauguggacgccagcucccuuggcgcggcucacgucgggcagucugccagcagaggacggggccugggggagaacccugaugacgaagagggagaugccaagaaaaagaaagacggcaagaaggcugaaccgaaaaauccccgcgagaacaagcucaaacaaccugccggcgauagagcugacgggcagcccgccggagaucgggcggacggccagccugccggggaucgcgcugacggacagcccgccggcgauagagcugacgggcaaccugccggagaccgggcggauggccagccggccggcgaccgcgcugccgggcagcccgcuggagauagagccgacggccagccugccggggaucgggcugcgggacaacccgccggcgaccgcgcugaugggcagccugccggagacagagccgauggccagcccgcuggcgaccgggccgcggggcagccggcuggagaucgcgccgacggccaaccugccggggacagagcugccggacagcccgcuggcgaucgggccgacgggcagccugcgggcgaucgcgccgcuggacaacccgccggcgacagagcugccgggcagcccgcgggaaauggcgccgggggacaggcugccggcgggaacgcuggcggaaaugccggcgggaacgccggaggcaaugcugggggaaacgcgggcgggaaugccggcgcuggacagggccaaaacaacgaaggggccaaugccccuaacgagaaguccgugaaagaguaccuggauaagguucgggcuacagugggaacggaauggaccccguguucugucacaugcggcguggggguuagagugcgccggagagucaaugccgcgaacaagaaacccgaggaccugacccucaaugaucuggaaacagacguguguaccauggauaagugcgcuggaauuuuuaacguggucagcaauucccuuggccugguuauccuccuggugcuugcccuguucaacuga

SEQ ID NO: 5306 - RNA, 1116 nt, Artificial Sequence
  derived and/or modified CDS sequence (opt5) from Pv(Cam40)__AGN05268.1__CSP
augaagaacuucauccugcucgccgugagcuccauucugcuugucgaccuguuucccacccacugcggccauaauguugaucucucuaaagcuaucaaccugaauggggugggauucaacaauguggacgccagcucccuuggcgcggcucacgucgggcagucugccagcagaggacggggccugggggagaacccugaugacgaagagggagaugccaagaaaaagaaagacggcaagaagacagaaccgaaaaauccccgcgagaacaagcucaaacaaccuggcgauagagcugacgggcagcccgccggagaucgggcugacggccagccugccggggaucgcgcggccggacagcccgcuggcgacagagccgaugggcaaccugcuggagaccgggccgacggccagccggcgggcgaucgcgccgcugggcagcccgccggagacagagcugauggccagccugccggggaccgggccgcuggacaacccgcgggcgaucgcgccgacgggcagccugcuggagauagagccgccggccagcccgcuggcgaccgggccgcggggcagccggcuggagaucgcgccgacggccaaccugccggggauagagcugccggacagcccgcuggcgaccgggccgacgggcagccugcgggcgaucgcgccgcuggacaacccgccggcgacagagcugccgggcagcccgcgggagaucgggccgcuggccagccugccgggaauggagcuggcgggcaggccgccggcggaaacgcuggcgggaaugcgggaggcaacgccgggggaaaugcuggcgggcaaggccagaacaaugaaggagccaacgccccgaacgagaaguccgugaaagaguaccuggacaagguuagagcuacggugggcaccgaauggacacccuguucugugaccugcggggucggaguucgcgugcggagacgcgucaaugccgcgaacaagaaaccugaggaucugacacucaaugaccuggaaaccgauguguguacaauggacaagugcgcuggcauuuuuaacguggucagcaauucccuugggcugguuauccuccuggugcuugcccuguucaacuga

SEQ ID NO: 5307 - RNA, 1116 nt, Artificial Sequence
  derived and/or modified CDS sequence (opt5) from Pv(CSP14VK210)__ANS71594.1__CSP
augaagaacuucauccugcucgccgugagcuccauucugcuugucgaccuguuucccacccacugcggccauaauguugaucucucuaaagcuaucaaccugaauggggugaacuucaauaacguggacgccagcucccuuggagcggcucacgucggccagucugccagcagagggcggggacugggcgagaauccugaugacgaagagggggaugccaagaaaaagaaagacggaaagaaggcugaaccgaaaaacccccgcgagaauaagcucaaacaaccuggcgauagagccgacggccagcccgcuggggaucgggccgacggacagccugcgggcgaucgcgccgcugggcagcccgccggagacagagcugauggccaaccugccggggaccgggcggccggacagccggcuggcgaccgcgccgauggccagcccgcuggggacagagccgccggacagccugcuggcgaucgggcggacgggcaacccgccggagaucgcgcugccggccagccugccggggacagagcugauggacagcccgccggcgaccgggcggcuggccagccggccggggaucgcgccgcuggacaaccugccggcgacagagcugaugggcagcccgccggagaccgggcggacggccagccugccggggaucgcgcugccggccaacccgcuggagacagagccgcgggccagcccgccggggaucgggcugccggacagccugcuggcaacggggccggaggccaggccgcugggggcaaugcggccaacaagaaagcugaagacgccggaggcaaugccgggggacaaggccagaacaaugagggggcuaacgccccgaacgagaaguccgugaaggaauaccuggauaaaguuagagcgacagugggaacggaguggacccccuguucugucacaugcggcguggggguucgcgugcggagacgcgucaaugcugccaacaagaaaccugaagaccugacccucaaugauauugagacagacguguguaccauggauaagugcgccggcaucuuuaacguggucagcaauucccugggacuuguuauucugcucgugcuggcucuuuucaacuga

SEQ ID NO: 5308 - RNA, 1116 nt, Artificial Sequence
  derived and/or modified CDS sequence (opt5) from Pv(CSP22VK210)__ANS71602.1__CSP
augaagaacuucauccugcucgccgugagcuccauucugcuugucgaccuguuucccacccacugcggccauaauguugaucucucuaaagcuaucaaccugaauggggugaacuucaauaacguggacgccagcucccuuggagcggcucacgucggccagucugccagcagagggcggggacugggcgagaauccugaugacgaagagggggaugccaagaaaaagaaagacggaaagaaggcugaaccgaaaaacccccgcgagaauaagcucaaacaaccuggcgauagagccgacggccagcccgcuggggaucgggccgacggacagccugcgggcgaucgcgccgacgggcagcccgcuggagauagagccgcuggccaaccugccggggaccgggcggacggacagccggccggcgaucgcgcugccggccagcccgcuggggacagagccgauggacagccugccggcgaccgggcugcggggcaacccgccggagaucgcgcugccggccagccugccggggacagagcugauggacagcccgccggcgaccgggcggcuggccagccggccggggaucgcgccgcuggacaaccugccggcgacagagcugaugggcagcccgccggagaccgggcggccggccagccugcuggggaccgcgccgcuggccaacccgccggagauagagcggccggccagcccgcuggggaccgggccgcuggacagccugccggcaacggggccggaggccaggcugccgggggcaaugcggcuaacaagaaagccgaagaugccggaggcaaugcugggggacaaggccagaacaaugagggggccaacgcgccgaacgagaaguccgugaaggaauaccuggacaaaguuagagcuacagugggaacggaguggacccccuguucugucacaugcggcguggggguucgcgugcggagacgcgucaaugccgccaacaagaaaccugaagaucugacccucaaugacauugagacagauguguguaccauggacaagugcgcuggcaucuuuaacguggucagcaauucccugggacuuguuauucugcucgugcuggcccuuuucaacuga

SEQ ID NO: 5309 - RNA, 1116 nt, Artificial Sequence
  derived and/or modified CDS sequence (opt5) from Pv(CSP28VK210)__ANS71608.1__CSP
augaagaacuucauccugcucgccgugagcuccauucugcuugucgaccuguuucccacccacugcggccauaauguugaucucucuaaagcuaucaaccugaauggggugaacuucaauaacguggacgccagcucccuuggagcggcucacgucggccagucugccagcagagggcggggacugggcgagaauccugaugacgaagagggggaugccaagaaaaagaaagacggaaagaaggcugaaccgaaaaacccccgcgagaauaagcucaaacaaccuggcgauagagccgacggccagcccgcuggggaucgggccgacggacagccugcgggcgaucgcgccgacgggcagcccgcuggagauagagccgcuggccaaccugccggggaccgggcggacggacagccggccggcgaucgcgcugccggccagcccgcuggggacagagccgauggacagccugccggcgaccgggcugcggggcaacccgccggagaucgcgcugacggccagccugccggggauagagccgcuggacagcccgccggcgaccgggcggauggccagccggcuggggaccgcgccgccggacaaccugcuggcgauagagccgcugggcagcccgccggagaccgggcggacggccagccugccggggaucgcgcugccggccaacccgcuggagacagagccgcgggccagcccgccggggaucgggcugccggacagccugcuggcaacggggccggaggccaggccgcugggggcaaugcggccaacaagaaagcugaagacgccggaggcaaugccgggggacaaggccagaacaaugagggggcuaacgccccgaacgagaaguccgugaaggaauaccuggauaaaguuagagcgacagugggaacggaguggacccccuguucugucacaugcggcguggggguucgcgugcggagacgcgucaaugcugccaacaagaaaccugaagaccugacccucaaugauauugagacagacguguguaccauggauaagugcgccggcaucuuuaacguggucagcaauucccugggacuuguuauucugcucgugcuggcucuuuucaacuga

SEQ ID NO: 5310 - RNA, 1116 nt, Artificial Sequence
  derived and/or modified CDS sequence (opt5) from Pv(CSP31VK210)__ANS71611.1__CSP
augaagaacuucauccugcucgccgugagcuccauucugcuugucgaccuguuucccacccacugcggccauaauguugaucucucuaaagcuaucaaccugaauggggugaacuucaauaacguggacgccagcucccuuggagcggcucacgucggccagucugccagcagagggcggggacugggcgagaauccugaugacgaagagggggaugccaagaaaaagaaagacggaaagaaggcugaaccgaaaaacccccgcgagaauaagcucaaacaaccuggcgauagagccgacggccagcccgcuggggaucgggccgacggacagccugcgggcgaucgcgccgcugggcagcccgccggagacagagcugauggccaaccugccggggaccgggcggccggacagccggcuggcgaccgcgccgauggccagcccgcuggggacagagccgccggacagccugcuggcgaucgggcggacgggcaacccgccggagaucgcgcugacggccagccugccggggauagagccgcuggacagcccgccggcgaccgggcggcuggccagccggccggggaucgcgccgcuggacaaccugccggcgacagagcugaugggcagcccgccggagaccgggcggccggccagccugcuggggaccgcgccgcuggccaacccgccggagauagagcggccggccagcccgcuggggaccgggccgcuggacagccugccggcaacggggccggaggccaggcugccgggggcaaugcggcuaacaagaaagccgaagaugccggaggcaaugcugggggacaaggccagaacaaugagggggccaacgcgccgaacgagaaguccgugaaggaauaccuggacaaaguuagagcuacagugggaacggaguggacccccuguucugucacaugcggcguggggguucgcgugcggagacgcgucaaugccgccaacaagaaaccugaagaucugacccucaaugacauugagacagauguguguaccauggacaagugcgcuggcaucuuuaacguggucagcaauucccugggacuuguuauucugcucgugcuggcccuuuucaacuga

SEQ ID NO: 5311 - RNA, 1116 nt, Artificial Sequence
  derived and/or modified CDS sequence (opt5) from Pv(CSP37VK210)__ANS71617.1__CSP
augaagaacuucauccugcucgccgugagcuccauucugcuugucgaccuguuucccacccacugcggccauaauguugaucucucuaaagcuaucaaccugaauggggugaacuucaauaacguggacgccagcucccuuggagcggcucacgucggccagucugccagcagagggcggggacugggcgagaauccugaugacgaagagggggaugccaagaaaaagaaagacggaaagaaggcugaaccgaaaaacccccgcgagaauaagcucaaacaaccuggcgauagagccgacggccagcccgcuggggaucgggccgacggacagccugcgggcgaucgcgccgacgggcagcccgcuggagauagagccgcuggccaaccugccggggaccgggcggccggacagccggcuggcgaccgcgccgcuggccagcccgccggggauagagccgacggacagccugcuggcgaucgggcggccgggcaacccgcuggagaccgcgccgauggccagccugccggggacagagcugccggacagcccgcgggcgaucgggcugacggccagccggccggggaucgcgccgcuggacaaccugccggcgacagagcugccgggcagcccgcgggagaucgggccgacggccagccugcuggggaccgcgccgcuggccaacccgccggagauagagcggccggccagcccgcuggggaccgggccgcuggacagccugccggcaacggggccggaggccaggcugccgggggcaaugcggcuaacaagaaagccgaagaugccggaggcaaugcugggggacaaggccagaacaaugagggggccaacgcgccgaacgagaaguccgugaaggaauaccuggacaaaguuagagcuacagugggaacggaguggacccccuguucugucacaugcggcguggggguucgcgugcggagacgcgucaaugccgccaacaagaaaccugaagaucugacccucaaugacauugagacagauguguguaccauggacaagugcgcuggcaucuuuaacguggucagcaauucccugggacuuguuauucugcucgugcuggcccuuuucaacuga

SEQ ID NO: 5312 - RNA, 1116 nt, Artificial Sequence
  derived and/or modified CDS sequence (opt5) from Pv(CSP50VK210)__ANS71630.1__CSP
augaagaacuucauccugcucgccgugagcuccauucugcuugucgaccuguuucccacccacugcggccauaauguugaucucucuaaagcuaucaaccugaauggggugaacuucaauaacguggacgccagcucccuuggagcggcucacgucggccagucugccagcagagggcggggacugggcgagaauccugaugacgaagagggggaugccaagaaaaagaaagacggaaagaaggcugaaccgaaaaacccccgcgagaauaagcucaaacaaccuggcgauagagccgacggccagcccgcuggggaucgggccgacggacagccugcgggcgaucgcgccgcugggcagcccgccggagacagagcugauggccaaccugccggggaccgggcggccggacagccggcuggcgaccgcgccgauggccagcccgcuggggacagagccgccggacagccugcuggcgaucgggcggacgggcaacccgccggagaucgcgcugccggccagccugccggggacagagcugauggacagcccgccggcgaccgggcggcuggccagccggccggggaucgcgccgcuggacaaccugccggcgacagagcugaugggcagcccgccggagaccgggcggccggccagccugcuggggaccgcgccgcuggccaacccgccggagauagagcggccggccagcccgcuggggaccgggccgcuggacagccugccggcaacggggccggaggccaggcugccgggggcaaugcggcuaacaagaaagccgaagaugccggaggcaaugcugggggacaaggccagaacaaugagggggccaacgcgccgaacgagaaguccgugaaggaauaccuggacaaaguuagagcuacagugggaacggaguggacccccuguucugucacaugcggcguggggguucgcgugcggagacgcgucaaugccgccaacaagaaaccugaagaucugacccucaaugacauugagacagauguguguaccauggacaagugcgcuggcaucuuuaacguggucagcaauucccugggacuuguuauucugcucgugcuggcccuuuucaacuga

SEQ ID NO: 5313 - RNA, 1107 nt, Artificial Sequence
  derived and/or modified CDS sequence (opt5) from Pv(Cam16)__AGN05247.1__CSP
augaagaacuucauccugcucgccgugagcuccauucugcuugucgaccuguuucccacccacugcggccauaauguugaucucucuaaagcuaucaaccugaauggggugaacuucaauaacguggacgccagcucccuuggagcggcucacgucggccagucugccagcagagggcggggacugggcgagaauccugaugacgaagagggggaugccaagaaaaagaaagacggaaagaaggcugaaccgaaaaacccccgcgagaauaagcucaaacaaccugccggcgauagagcugacggccagcccgccggggaucgggcggacggacagccugccggcgaucgcgcugccgggcagcccgcuggagacagagccgauggccaaccugcgggggaccgggccgacggacagccggcuggcgaucgcgccgcuggccagcccgccggggacagagccgauggacagccugcuggcgaccgggcggccgggcaacccgcuggagaucgcgccgacggccagccugccggggauagagcugacggacagcccgccggcgaucgggcggcuggccagccggccggggaccgcgccgauggacaaccugcuggcgacagagccgcugggcagcccgccggagaccgggcggauggccagccugccggggaccgcgcugccggccaacccgcuggagauagagccgcgggccagcccgccggggaccgggcugccggacagccugcuggcaacggggccggaggccaggccgcugggggcaaugcgggaggcaacgccgggggaaaugcuggcgggcaaggacagaacaaugaaggcgccaacgccccgaacgagaaguccgugaaagaguaccuggauaagguuagagcuacaguggggacggaauggacccccuguucugucacaugcggcgugggaguucgcgugcggagacgcgucaaugccgcgaacaagaaaccugaggaccugacccucaaugaucuggaaacagacguguguaccauggauaagugcgcuggcauuuuuaacguggucagcaauucccuugggcugguuauccuccuggugcuugcccuguucaacuga

SEQ ID NO: 5314 - RNA, 1107 nt, Artificial Sequence
  derived and/or modified CDS sequence (opt5) from Pv(Cam32)__AGN05260.1__CSP
augaagaacuucauccugcucgccgugagcuccauucugcuugucgaccuguuucccacccacugcggccauaauguugaucucucuaaagcuaucaaccugaauggggugggauucaacaauguggacgccagcucccuuggcgcggcucacgucgggcagucugccagcagaggacggggccugggggagaacccugaugacgaagagggagaugccaagaaaaagaaagacggcaagaaggcugaaccgaaaaauccccgcgagaacaagcucaaacaaccugccggcgauagagcugacgggcagcccgccggagaucgggcggacggccagccugccggggaucgcgcugacggacagcccgccggcgauagagcugccgggcaaccugcgggagaccgggccgacggccagccggcuggcgaucgcgccgcugggcagcccgccggagacagagccgauggccagccugcuggggaccgggcggccggacaacccgcuggcgaucgcgccgacgggcagccugccggagauagagcugccggccagcccgcgggcgaccgggcugccgggcagccggccggagaucgcgcugacggccaaccugccggggauagagcugccggacagcccgcgggcgaccgggccgacgggcagccugcuggcgaucgcgccgcuggacaacccgccggcgacagagcggccgggcagcccgcuggagaucgggccgcuggccagccugccgggaauggagccggcgggcaggcugcgggcggaaacgccggcgggaaugcuggaggcaacgccgggggacaaggccagaauaacgaaggggccaaugcuccgaacgagaaguccgugaaagaguaccuggacaagguuagagccacagugggcacggaauggacccccuguucugucacaugcggagugggcguucgcgugcggagacgcgucaacgcggcuaauaagaaaccugaggaucugacccucaacgaccuggaaacagauguguguaccauggacaagugcgccgggauuuuuaauguggucagcaacucccuuggacugguuauccuccuggugcuugcccuguucaauuga

SEQ ID NO: 5315 - RNA, 1107 nt, Artificial Sequence
  derived and/or modified CDS sequence (opt5) from Pv(Cam38)__AGN05266.1__CSP
augaagaacuucauccugcucgccgugagcuccauucugcuugucgaccuguuucccacccacugcggccauaauguugaucucucuaaagcuaucaaccugaauggggugaacuucaauaacguggacgccagcucccuuggagcggcucacgucggccagucugccagcagagggcggggacugggcgagaauccugaugacgaagagggggaugccaagaaaaagaaagacggaaagaaggcugaaccgaaaaacccccgcgagaauaagcucaaacaaccuggcgauagagccgacggccagcccgcuggggaucgggccgacggacagccugcgggcgaucgcgccgcugggcagcccgccggagacagagcugauggccaaccugccggggaccgggcggccggacagccggcuggcgaccgcgccgauggccagcccgcuggggacagagccgccggacagccugcuggcgaucgggcggacgggcaacccgccggagaucgcgcugccggccagccugccggggacagagcugauggacagcccgccggcgaccgggcggcuggccagccggccggggaucgcgccgacggacaaccugcuggcgauagagccgcugggcagcccgccggagaccgggcggccggccagccugcuggggaccgcgccgauggccaacccgcuggagacagagccgcgggccagcccgccggggaucgggcugccggacagccugcuggcgacagagccgccgggcagccggcuggaaacggcgccgggggccaagcggcuggaggcaaugccgggggacagggccagaacaaugaaggggccaacgcucccaaugagaaguccgugaaagaguaccuggauaagguucgcgccacagugggaacggaauggaccccuuguucugucacaugcggcguggggguucgggugagacgccgggucaacgcggcuaacaagaaacccgaggaccugacccucaaugaucuggaaacagacguguguaccauggauaagugcgccggcauuuuuaacguggucagcaauucccuuggacugguuauccuccuggugcuugcccuguucaacuga

SEQ ID NO: 5316 - RNA, 1104 nt, Artificial Sequence
  derived and/or modified CDS sequence (opt5) from Pv(CSP19VK210)__ANS71599.1__CSP
augaagaacuucauccugcucgccgugagcuccauucugcuugucgaccuguuucccacccacugcggccauaauguugaucucucuaaagcuaucaaccugaauggggugaacuucaauaacguggacgccagcucccuuggagcggcucacgucggccagucugccagcagagggcggggacugggcgagaauccugaugacgaagagggggaugccaagaaaaagaaagacggaaagaaggcugaaccgaaaaacccccgcgagaauaagcucaaacaaccuggcgauagagccgacggccagcccgcuggggaucgggccgacggacagccugcgggcgaucgcgccgacgggcagcccgcuggagauagagccgcuggccaaccugccggggaccgggcggacggacagccggccggcgaucgcgcugccggccagcccgcuggggacagagccgauggacagccugccggcgaccgggcugcggggcaacccgccggagaucgcgcugacggccagccugccggggauagagccgcuggacagcccgccggcgaccgggcggauggccagccggcuggggaccgcgccgccggacaaccugcuggcgauagagccgcugggcagcccgccggagaccgggcggacggccagccugccggggaucgcgcugccggccaacccgcuggagacagagccgcgggccagcccgccggggaucgggcugccggacagccugcuggcaacggggccggaggccaggccgcugggggcaaugcggccaacaagaaagcugaagacgccggaggccaagggcagaauaacgagggagccaaugcuccgaacgagaaguccgugaaggaauaccuggauaaaguuagagccacagugggcacggaguggacccccuguucugucacaugcggggugggaguucgcgugcggagacgcgucaacgcggcuaauaagaaaccugaagaccugacccucaacgauauugagacagacguguguaccauggauaagugcgccggcaucuuuaauguggucagcaacucccuggggcuuguuauucugcucgugcuggcccuuuucaauuga

SEQ ID NO: 5317 - RNA, 1089 nt, Artificial Sequence
  derived and/or modified CDS sequence (opt5) from Pv(CSP24VK210)__ANS71604.1__CSP
augaagaacuucauccugcucgccgugagcuccauucugcuugucgaccuguuucccacccacugcggccauaauguugaucucucuaaagcuaucaaccugaauggggugaacuucaauaacguggacgccagcucccuuggagcggcucacgucggccagucugccagcagagggcggggacugggcgagaauccugaugacgaagagggggaugccaagaaaaagaaagacggaaagaaggcugaaccgaaaaacccccgcgagaauaagcucaaacaaccuggcgauagagccgacggccagcccgcuggggaucgggccgacggacagccugcgggcgaucgcgccgacgggcagcccgcuggagauagagccgcuggccaaccugccggggaccgggcggacggacagccggccggcgaucgcgcugccggccagcccgcuggggacagagccgauggacagccugccggcgaccgggcugcggggcaacccgccggagaucgcgcugacggccagccugccggggauagagccgcuggacagcccgccggcgaccgggcggauggccagccggcuggggaccgcgccgccggacaaccugcuggcgauagagccgcugggcagcccgccggagaccgggcggacggccagccugccggggaucgcgcugccggccaacccgcuggagacagagccgcgggccagcccgccgggaacggagcuggcgggcaggccgcuggaggcaaugccgccaacaagaaagcugaagaugccgggggcaaugcgggaggccaggggcaaaacaaugagggagcuaacgccccuaacgagaaguccgugaaggaauaccuggacaaaguucgggccacagugggcacggaguggaccccguguucugucacaugcggggugggaguuagagugcgccggagagucaaugcugccaacaagaaacccgaagaucugacccucaaugacauugagacagauguguguaccauggacaagugcgcgggcaucuuuaacguggucagcaauucccuggggcuuguuauucugcucgugcuggcucuuuucaacuga

SEQ ID NO: 5318 - RNA, 1089 nt, Artificial Sequence
  derived and/or modified CDS sequence (opt5) from Pv(CSP35VK210)__ANS71615.1__CSP
augaagaacuucauccugcucgccgugagcuccauucugcuugucgaccuguuucccacccacugcggccauaauguugaucucucuaaagcuaucaaccugaauggggugaacuucaauaacguggacgccagcucccuuggagcggcucacgucggccagucugccagcagagggcggggacugggcgagaauccugaugacgaagagggggaugccaagaaaaagaaagacggaaagaaggcugaaccgaaaaacccccgcgagaauaagcucaaacaaccuggcgauagagccgacggccagcccgcuggggaucgggccgacggacagccugcgggcgaucgcgccgcugggcagcccgccggagacagagcugauggccaaccugccggggaccgggcggccggacagccggcuggcgaccgcgccgauggccagcccgcuggggacagagccgccggacagccugcuggcgaucgggcggacgggcaacccgccggagaucgcgcugccggccagccugccggggacagagcugauggacagcccgccggcgaccgggcggcuggccagccggccggggaucgcgccgcuggacaaccugccggcgacagagcugaugggcagcccgccggagaccgggcggccggccagccugcuggggaccgcgccgcuggccaacccgccggagauagagcggccggccagcccgcugggaacggagccggcgggcaggcugccggaggcaaugccgcuaacaagaaagcggaagacgccgggggcaaugcuggaggccaggggcaaaacaaugagggagccaacgccccuaacgagaaguccgugaaggaauaccuggauaaaguucgggcuacagugggcacggaguggaccccguguucugucacaugcggggugggaguuagagugcgccggagagucaaugccgcgaacaagaaacccgaagaccugacccucaaugauauugagacagacguguguaccauggauaagugcgcuggcaucuuuaacguggucagcaauucccuggggcuuguuauucugcucgugcuggcccuuuucaacuga

SEQ ID NO: 5319 - RNA, 1062 nt, Artificial Sequence
  derived and/or modified CDS sequence (opt5) from Pv(CSP9VK210)__ANS71589.1__CSP
augaagaacuucauccugcucgccgugagcuccauucugcuugucgaccuguuucccacccacugcggccauaauguugaucucucuaaagcuaucaaccugaauggggugaacuucaauaacguggacgccagcucccuuggagcggcucacgucggccagucugccagcagagggcggggacugggcgagaauccugaugacgaagagggggaugccaagaaaaagaaagacggaaagaaggcugaaccgaaaaacccccgcgagaauaagcucaaacaaccuggcgauagagccgacggccagcccgcuggggaucgggccgacggacagccugcgggcgaucgcgccgcugggcagcccgccggagacagagcugauggccaaccugccggggaccgggcggccggacagccggcuggcgaccgcgccgauggccagcccgcuggggacagagccgccggacagccugcuggcgaucgggcggacgggcaacccgccggagaucgcgcugccggccagccugccggggacagagcugccggacagcccgcgggcgaucgggcugacggccagccggccggggaucgcgccgcuggacaaccugccggcgacagagcugccgggcagcccgcgggagaucgggccgcuggccagccugccggggaccgcgcugccggccaacccgcgggaaacggcgccgggggacaggcugccggcgggaaugcugccaacaagaaagccgaagacgcuggaggcaaugccgggggccagggacagaacaaugagggcgcgaacgcucccaacgagaaguccgugaaggaauaccuggauaaaguuagagccacaguggggacggaguggaccccuuguucugucacaugcggagugggcguucgggugagacgccgggucaaugccgcuaacaagaaaccggaagaccugacccucaaugauauugagacagacguguguaccauggauaagugcgccgggaucuuuaacguggucagcaauucccugggacuuguuauucugcucgugcuggcgcuuuucaacuga

SEQ ID NO: 5320 - RNA, 894 nt, Artificial Sequence
  derived and/or modified CDS sequence (opt5) from Pv(Pt02.2)__ADB92552.1__CSP
augaagaacuucauccugcucgccgugagcuccauucugcuugucgaccuguuucccacccacugcggccauaauguugaucucucuaaagcuaucaaccugaauggggugggauucaacaauguggacgccagcucccuuggcgcggcucacgucgggcagucugccagcagaggacggggccugggggagaacccugaugacgaagagggagaugccaagaaaaagaaagacggcaagaaggcugaaccgaaaaauccccgcgagaacaagcucaaacaaccugaagauggcgccggggaccagcccggagcuaauggcgccgggaaccagccuggagcgaauggcgccgggaaccagcccggagcuaauggcgccggcaaccaaccuggggcuaauggagccggcaaccagccgggggcgaacggagccggcaaucagcccggggcuaacggagccggcaaucagccuggcgcuaacggggccggaggccaagccgcugggggaaaugcggccaacaagaaagcuggcgaugccggggccggcggacaggcugccggcgggaaugcggcuaacaagaaggccggagacgccggcgcugggcagggacagaauaacgagggcgccaaugcucccaacgagaaauccgugaaggaauaccuggauaaaguuagagccacaguggggacggaguggaccccuuguucugucacaugcggcgugggaguucgggugcgcagacgggucaaugcggccaacaagaaacccgaagaccugacccucaaugaucuggagacagacguguguaccauggacaagugcgcuggcauuuuuaacguggucagcaacucccuugggcugguuauccuccuggugcuugcccuguucaauuga

SEQ ID NO: 5321 - RNA, 840 nt, Artificial Sequence
  derived and/or modified CDS sequence (opt5) from Pv(Pt04.5)__ADB92555.1__CSP
augaagaacuucauccugcucgccgugagcuccauucugcuugucgaccuguuucccacccacugcggccauaauguugaucucucuaaagcuaucaaccugaauggggugggauucaacaauguggacgccagcucccuuggcgcggcucacgucgggcagucugccagcagaggacggggccugggggagaacccugaugacgaagagggagaugccaagaaaaagaaagacggcaagaaggcugaaccgaaaaauccccgcgagaacaagcucaaacaaccugaagauggcgccggggaccagcccggagcuaauggcgccgggaaccagccuggagcgaauggcgccgggaaccagcccggagcuaauggcgccggcaaccaaccuggggcuaauggagccggcaaccagccgggggcgaacggagccggcgggcaggcugccggaggcaaugcugccaacaagaaagccggcgaugcuggggcgggaggccaggccgcugggggaaaugccgccaacaagaaggcuggcgacgccggggcgggccaaggacagaauaacgagggcgcuaaugcccccaacgagaaauccgugaaggaauaccuggauaaaguuagagccacaguggggacggaguggaccccuuguucugucacaugcggagugggcguucgggugcgcagacgggucaaugcugccaacaagaaacccgaagaccugacccucaaugaucuggagacagacguguguaccauggacaagugcgcugggauuuuuaacguggucagcaauucccuuggacugguuauccuccuggugcuugcccuguucaacuga

SEQ ID NO: 5322 - RNA, 1023 nt, Artificial Sequence; identical to SEQ ID NO: 251
  derived and/or modified CDS sequence (opt5) from Pb(ANKA)__XP_022712148.1__CSP

SEQ ID NO: 5323 - RNA, 1194 nt, Artificial Sequence
  derived and/or modified CDS sequence (opt6) from Pf(3D7)__XP_001351122.1__CSP
augaugcgaaaacucgcgauacuaagcguaucaucauuccuauucgucgaagcacuuuuccaagaauaccaaugcuauggaucaaguucaaacacacgaguacuaaaugaauuaaacuacgauaaugccgggacaaaccuauacaaugaacuagaaaugaacuacuacgguaaacaagaaaacugguacucucuaaaaaaaaacagcagaagcuuaggagaaaacgacgacggaaacaaugaagacaaugaaaaacuaagaaaacccaaacacaaaaaacugaaacaaccagcagacggaaauccagacccaaacgcaaacccaaacguagacccaaacgcaaacccaaacguagacccaaacgcaaacccaaacguagacccaaacgcaaacccgaacgcaaacccaaacgcaaacccaaacgcaaacccaaaugcaaacccaaacgcaaacccaaacgcaaacccaaacgcaaacccaaacgccaacccaaacgcaaauccaaacgcaaacccaaacgcaaaccccaacgcaaacccaaacgccaacccaaacgcaaacccgaacgcaaacccgaacgcaaacccaaacguagacccaaacgcaaacccaaaugcaaacccaaaugcaaacccaaacgcgaacccaaacgcaaacccaaacgcaaacccaaaugcgaacccaaacgcaaacccaaacgcaaacccaaacgcaaacccaaacgcuaacccaaacgcaaacccaaacgcaaacccuaacgcaaauccaaacgcaaacccaaaugcaaacccaaacgcaaacccaaacgcaaacccaaacaaaaacaaccaaggaaacgggcaaggacacaauaugccaaacgacccaaacagaaacguagacgaaaacgcaaaugcaaacagcgcaguaaaaaacaacaacaacgaagaaccaucagauaaacacauaaaagaauauuuaaacaaaauacaaaacucacuaucaacagaauggucaccaugcagugucaccugugguaacggcauacaaguacgcauaaaaccagguuccgcaaacaaaccaaaagaugaacuagauuaugccaacgacauagaaaaaaaaauaugcaaaauggaaaaaugcucauccgucuucaacguaguaaacagcuccaucggacucauaaugguccucucauuuuuauuccuaaauuaa

SEQ ID NO: 5324 - RNA, 1335 nt, Artificial Sequence
  derived and/or modified CDS sequence (opt6) from Pf(Pal97-089)__BAM84949.1__CSP
augaugagaaaauuagcaauccuaucaguaucaucauuccuauucguagaagcccuauuccaagaauaucaaugcuacggauccucaucaaacacaagaguacuaaacgaacuaaacuacgacaaugcagguaccaaccuauauaaugaacuagaaaugaauuacuacggaaaacaagaaaauugguacucauuaaaaaaaaacucaagaucacuaggagaaaacgacgacggagacaacgacaacggcgacaacggacgagaaggaaaagacgaagacaaaagggacggaaauaacgaagacaacgaaaaauuaagaaaacccaaacauaaaaaacuaaaacagccaggagacggaaacccugauccaaacgcaaacccaaacguagacccaaacgcaaacccaaacguagacccaaacgcaaacccaaacgcaaacccaaacgccaacccaaacgcaaauccaaacgccaacccaaaugcaaacccaaaugcuaauccuaacgcaaacccaaacgcaaauccaaacgcaaauccaaaugcgaaccccaaugcaaaccccaacgcaaacccaaacgcuaacccaaacgcaaacccaaaugcaaacccaaaugccaacccaaacgcaaaccccaacgcaaacccaaaugccaacccaaacgcaaacccaaacgcaaacccaaacgcuaauccaaacgcaaacccuaaugcaaacccaaacgcaaacccaaacgccaaccccaacgcaaaccccaacgcaaauccaaacgcaaacccuaacgcaaacccaaacgcuaacccaaacgcaaaccccaacgcaaacccaaacgccaaccccaacgcaaauccaaaugccaaccccaacgcaaaccccaacgcuaacccaaacgcaaaccccaacgcaaacccuaaugcaaauccaaacgcaaacccaaacgcuaaccccaacgcaaacccaaacaaaaacaaucaaggaaacggacaaggacauaauaugccaaaugaccccaaccgaaacgucgacgaaaaugccaacgcaaacaacgcagucaaaaacaacaauaaugaagaacccucagacaaacacauagaacaauaccuaaaaaaaauccaauacucacuaucaacagaauggucgccaugcucaguaacaugcggaaacggaauacaaguaagaaucaaaccaggaucagccgauaaaccaaaagaucaacucgacuaugaaaacgauauagaaaaaaaaauaugcaaaauggaaaaauguucuucaguauuuaacguaguaaacucaucaauaggacucauaaugguauuaucauucuuauuccuaaacuaa

SEQ ID NO: 5325 - RNA, 1329 nt, Artificial Sequence
  derived and/or modified CDS sequence (opt6) from Pf(T9/94)__BAD73956.1__CSP
augaugcgcaaauuagcuauacucucaguaucaucauucuuauuuguugaagcauuauuucaagaauaccaaugcuacggaagcucaucaaacacaaggguacuaaacgaguuaaacuacgacaacgccggaaccaaccuauacaacgaacuagaaaugaauuacuauggaaaacaagaaaauugguacagccuaaaaaaaaauucaagaucacuuggagaaaacgaugacggagacaacgacaacggaaauaacaacaacggaaacaauaacaacggagacaacggcagagaaggaaaagacgaagacaaaagagacggcaacaacgaagacaacgaaaaauuacgaaaaccaaaacacaaaaaacuaaaacaaccaggagacgauaacccagacccaaacgccaacccaaacguagauccaaacgccaauccaaacguagacccaaacgcaaacccaaacgcaaacccaaacgcaaaccccaacgccaauccaaacgcaaaccccaaugcaaacccaaacgcaaauccaaacgcaaacccaaacgcaaaucccaacgccaacccaaacgcaaacccaaacgcaaaccccaacgccaauccaaacgcaaacccaaacgcaaaccccaacguagacccaaacgcaaaccccaacgcaaacccaaaugcaaaccccaacgcaaacccaaacgcaaacccaaacgcuaacccaaacgcuaacccaaaugcaaaccccaaugcaaacccaaaugcaaaccccaacgcaaauccaaacgcaaacccgaacgccaacccaaaugcaaauccaaaugcaaauccaaacgcaaacccaaacgcaaacccaaacgcaaacccaaacgcaaauccaaacgcaaauccaaaugcaaacccaaacgcaaacccaaacgcgaacccaaacgcaaauccaaacgcaaacccaaacgcaaacccaaacaaaaacaaccaaggaaauggacaaggacacaacaugccaaaugacccaaacagaaacguugaugaaaaugcaaaugcaaacaacgccguaaaaaacaacaauaaugaagaaccaucagauaaacacauugaacaauacuuaaaaaaaauacaaaauucacuaucuacagaauggucucccugcagugucacauguggcaauggaauacaaguaagaauaaaacccggaucagcagacaaaccaaaagaucaauuagacuaugaaaaugauauagaaaaaaaaauaugcaaaauggaaaaauguuccucaguauucaacgugguaaacucuucaaucggacuaauaaugguacuaucauuucuauuucuaaacuaa

SEQ ID NO: 5326 - RNA, 1329 nt, Artificial Sequence
  derived and/or modified CDS sequence (opt6) from Pf(Tq/94)__AAA29551.1__CSP
augaugagaaaacuagcaauauuaucaguaucaucuuuccuauucguagaagcacuauuccaagaauaccaauguuauggaucaucaaguaauacaagaguucuuaacgaacucaacuacgauaacgcggguaucaacuuauacaaugaacuagaaaugaauuacuacggaaaacaagaaaauugguacagccuaaaaaaaaacucacgaucacuaggagaaaacgacgacggagacaacgacaacggcaacaacaacaacggaaauaauaauaauggagacaacggccgagaaggaaaagaugaagacaaaagagacggaaacaaugaagacaaugaaaaacuacgcaaaccuaaacacaaaaaauuaaaacaacccggagacggaaacccagauccaaacgcaaauccaaacguagacccaaacgcaaacccaaacguagauccaaacgcaaacccaaacgcaaacccaaacgccaacccaaacgcaaacccgaacgcaaacccaaacgcaaacccaaaugccaaccccaacgcaaacccgaacgccaacccaaacgcaaauccaaacgcaaacccaaacgcaaacccaaacgcaaauccaaaugcaaacccaaacgcaaauccaaauguagauccaaacgcaaauccaaacgcaaacccaaacgcaaacccaaaugcaaacccaaacgcaaacccaaacgcaaauccaaacgcaaacccaaacgcaaacccaaacgcaaacccuaaugcgaaccccaacgcaaacccaaacgcaaauccaaacgcaaacccaaaugcuaauccaaacgcuaacccaaacgcaaacccaaacgcaaauccgaacgcaaacccaaacgcaaacccaaacgcaaacccaaacgcaaauccaaacgcaaacccaaaugcaaacccaaacgcaaacccaaacgcaaacccaaaugcaaauccaaacaaaaacaaccaaggaaacggacaaggacacaacaugccaaacgacccaaauagaaacgucgacgaaaacgcaaacgcaaacaaugcgguuaaaaacaacaacaacgaagaaccaucagacaaacauaucgaacaauaccuaaaaaaaauucaaaacucauuaucaacagaauggucaccaugcagcguaacaugcggaaacggcauacaaguaagaaucaaaccagguucagcugacaaaccaaaagaucaacucgacuaugaaaaugacauagaaaaaaaaauauguaaaauggaaaaaugcagcucaguauucaacguaguaaauagcucaauaggacuaauaaugguacuaucauuccuauuccuaaacuaa

SEQ ID NO: 5327 - RNA, 1329 nt, Artificial Sequence
  derived and/or modified CDS sequence (opt6) from Pf(Wellcome)__AAA29554.1__CSP
augaugagaaaacuagccauacuauccguaucaagcuuucuauuuguagaagccuuauuccaagaauaucaaugcuauggauccucuuccaauacaagaguacuaaaugaacuaaacuacgacaaugccggaaccaauuuauacaacgaacuagaaaugaauuauuacggaaaacaagaaaacugguacucacuaaaaaaaaacucaagaucccuaggagaaaacgacgauggcgacaaugauaauggaaacaacaacaacggaaacaauaacaacggagacaacggccgugaaggaaaagaugaagacaaaagagacgguaauaaugaagacaacgaaaaauuacgaaaacccaaacauaaaaaacuaaaacaaccaggagacggaaacccagauccaaacgcaaauccaaacgucgaccccaacgcaaacccaaacguagacccaaacgcaaacccaaacgccaaucccaacgcaaauccaaacgcaaacccaaaugcaaacccaaacgccaacccuaaugcaaacccaaacgcaaacccaaacgcaaaccccaacgccaacccaaacgcaaacccaaacgcaaauccaaacgcgaacccaaacgcaaacccaaaugcaaaucccaauguagacccaaacgcaaauccaaacgcaaaccccaacgcaaacccaaaugcaaacccaaacgcaaauccaaacgcaaacccaaacgcaaacccaaaugccaauccaaacgcaaacccaaacgcaaacccaaacgccaacccuaacgcaaauccaaacgcaaacccaaacgcaaacccaaacgcaaacccaaacgcaaacccaaacgcaaaucccaaugcgaacccaaacgcgaacccaaacgcaaaucccaaugcaaacccgaacgcaaacccaaacgcaaacccaaacgcaaauccaaacgcaaauccaaacgcaaaccccaauaaaaauaaccaaggaaacggacaaggacacaacaugccaaacgaccccaacagaaaugucgaugaaaaugcuaaugcaaacaaugcaguaaaaaacaauaacaacgaagaaccaucagacaaacacauagaacaauaccuaaaaaaaauacaaaacucccuaucaaccgaauggucaccauguagcgucaccugcggaaauggaauacaaguacgaauaaaaccaggaucagccgauaaaccaaaagaccaacuagacuacgaaaacgauauagaaaaaaaaauauguaaaauggaaaaaugcucaucagucuucaauguaguuaauucaucaaucggauuaauaaugguacuaucauuccuauucuuaaacuaa

SEQ ID NO: 5328 - RNA, 1323 nt, Artificial Sequence
  derived and/or modified CDS sequence (opt6) from Pf(Pal97-115)__BAM84958.1__CSP
augaugagaaaacucgcaauacuaucaguaucaucauuccuauucgucgaagcucuauuucaagaauaccaauguuacgguucaucauccaauacaaggguccuaaacgaacucaacuacgauaaugcaggcacaaaccuauacaaugaacuagaaaugaacuacuacggaaaacaagaaaacugguauucccuaaaaaaaaauucaagaucacuaggagaaaacgaugacggaaacaacaacaacggagacaacggacgagaaggaaaagaugaagacaaaagagacggaaacaacgaagacaaugaaaaauuaagaaaacccaaacacaaaaaacuaaaacaaccaggagauggaaacccugacccaaacgcaaaccccaacguagacccaaaugcaaacccaaacguagacccaaacgccaaccccaacguagacccaaaugcaaauccaaacgcaaauccaaacgcaaacccaaacgcaaacccaaaugcaaacccaaacgcaaacccaaacgcaaacccaaaugcaaacccaaacgcaaacccuaacgcaaacccaaacgcaaacccaaacgcaaacccaaacgcaaacccaaacgcaaacccaaacgcaaacccaaacgcuaaccccaacgcaaacccaaaugcaaaccccaacgcaaacccaaaugcaaacccaaacgcaaacccaaacgcaaacccaaacguagacccaaaugcaaauccaaacgccaacccaaacgcaaacccaaacgcaaacccaaacgcaaauccaaacgcaaacccaaacgcaaacccaaacgcaaacccaaacgcaaacccaaaugcaaacccaaacgcaaacccaaacgcaaacccaaaugcaaacccuaacgcaaacccaaacgcaaauccaaacgcaaaccccaacgcaaauccaaacgcaaaccccaacgcaaacccaaacaaaaauaaucaaggcaacggccaaggucacaacaugcccaacgacccaaauagaaacguagacgaaaaugcaaaugcuaacaacgcaguaaaaaacaacaacaacgaagaaccuucagaucaacacauagaaaaauacuuaaaaauaauacaaaacucauuaucaacagaaugguccccuugcuccguaacuugcggaaacggaauccaaguacguauaaaacccggcucagcagacaaaccaaaagaccaauuagacuaugcaaacgauauagaaaaaaaaauauguaaaauggaaaaauguucauccguauucaacguaguaaacucaucaaucggacucauaaugguguuauccuuccuauuccuaaauuaa

SEQ ID NO: 5329 - RNA, 1323 nt, Artificial Sequence
  derived and/or modified CDS sequence (opt6) from Pf(PMS5)__BAN59428.1__CSP
augaugcgaaaacuagccauacuaucagucuccagcuuucuauucguagaagcacuauuccaagaauaccaauguuauggaucaucaucaaacacaagaguauuaaacgaacuaaacuaugacaacgcaggcacaaaccuauauaacgaacuagaaaugaacuacuauggaaaacaagaaaacugguacagucuaaaaaaaaacucgcgaucacuuggagaaaacgacgacggaaacaacaacaauggagacaacggcagagaaggcaaagacgaagacaaaagagacggaaacaacgaagacaacgaaaaauuacgcaaaccaaaacacaaaaaacuaaaacaaccaggagacggcaacccagacccaaacgcaaacccaaacguagacccaaacgcaaacccaaacguagacccaaacgccaacccaaacguagacccaaaugcaaacccaaacgccaaccccaacgcaaacccaaaugcaaacccaaacgcaaacccaaacgccaacccaaacgcaaacccaaacgccaacccaaacgccaacccaaacgcaaacccaaaugcaaacccaaacgcgaacccaaacgcaaaccccaacgcaaauccaaacgcaaaccccaaugcaaaccccaacgcaaacccaaacgcaaacccaaacgcaaauccaaaugcuaacccaaaugccaacccgaacgcaaacccaaacgccaauccaaacgcaaaucccaacgcaaacccaaacgcaaacccaaacgcaaacccaaacgcuaacccaaacgcuaacccgaaugcaaacccaaacgcaaauccaaacgcaaaucccaacgcaaauccaaacgcaaauccaaacgcaaacccaaaugcaaaccccaacgcaaauccaaaugcgaauccaaacgcaaacccaaacgcaaacccaaacgcaaacccaaaugcaaauccaaacaaaaacaaccaaggcaacggacaaggccacaauaugccaaacgacccaaaccgcaaugucgacgaaaacgccaacgcuaauaacgaugucaaaaauaauaauaacgaagaaccaucagauaaacacauagaacaauaccuaaaaaaaauacaauacucacucucaacagaaugguccccauguucaguaaccugcggaaacggaauacaaguaagaauaaaaccaggaucagccgacaaaccaaaagaccaauuagacuacgaaaacgauauagaaaaaaaaauauguaaaauggaaaaaugcagcucuguauuuaacguaguaaacuccuccaucggcuuaauaaugguacuauccuuccuauucuuaaacuaa

SEQ ID NO: 5330 - RNA, 1320 nt, Artificial Sequence
  derived and/or modified CDS sequence (opt6) from Pf(J2)__ACO49408.1__CSP
augagaaaauuagcaauacuaucaguaucaucauuccuauucguugaagccuuauuccaagaauaccaaugcuacggcagcuccagcaauacaagaguacuaaacgaacuaaacuacgacaacgcaggaacaaaccucuauaaugaacuagaaaugaauuacuacggaaaacaagaaaacugguacucacucaaaaaaaacucaagaucccuaggcgaaaacgacgacggaaacaacaacaauggagauaacggaagagaaggaaaagacgaagacaaaagagacggaaacaaugaagacaacgaaaaauuaagaaaacccaaacacaaaaaacuaaaacaaccaggagacggaaacccagacccaaacgcaaacccaaacguagaucccaacgcaaaccccaacguagacccaaacgcaaacccaaacguagauccaaacgccaacccaaaugcaaacccaaaugccaacccaaacgcaaauccaaaugcaaacccaaacgcaaacccaaacgcaaacccaaaugccaacccaaaugcaaauccaaaugcaaaccccaacgccaauccaaaugcaaacccaaaugcgaauccaaacgcaaacccaaaugcaaauccaaaugcaaacccaaauguagacccaaacgcaaacccaaacgcaaacccaaaugcaaauccaaaugcaaacccaaacgcaaacccaaacgcaaacccaaacgcaaacccaaacgcaaaccccaacgcaaacccaaacgcaaaccccaaugcaaauccaaaugcaaauccaaacgcaaacccaaacgcaaauccaaacgccaauccaaacgcaaacccaaacgcaaauccaaacgcaaacccaaacgcaaacccaaacgcaaacccaaacgcaaacccaaacgcaaacccaaaugccaacccaaacgcaaaccccaaugcaaaccccaacaaaaacaaccaaggaaacggacaaggccacaauaugccaaacgauccaaaccgaaacguagacgaaaaugcaaacgcaaacaacgauguuaaaaacaacaacaacgaagaacccucagacaaacacauagaacaauaccuaaaaaaaauacaauacucacuaucaacagaauggucaccaugcagcgucacaugcggcaauggaauacaaguacgaauaaaaccaggaucagcagacaaaccaaaagaucaacuggacuaugaaaaugacauagaaaaaaaaauaugcaaaauggaaaaaugcagcucaguuuuuaacguaguaaacucaucuauaggauuaaucaugguacucucauucuuauuccuaaacuaa

SEQ ID NO: 5331 - RNA, 1320 nt, Artificial Sequence
  derived and/or modified CDS sequence (opt6) from Pf(M4)__ACO49420.1__CSP
augaggaaacucgcaauucuuagcguuucaucuuuccuauucguagaagcacuauuucaagaauaccaaugcuacggaaguucaucaaacacacgaguacuaaacgaacucaacuacgacaaugcaggaacaaaucuuuacaaugaacucgaaaugaacuacuacggaaaacaagaaaacugguacucacuaaaaaaaaacucacgaucacucggagaaaaugacgacggaaacaacaacaauggagacaacggcagagaaggaaaagaugaagacaaaagagacggaaacaacgaagacaacgaaaaacucagaaaaccaaaacauaaaaaacuaaaacaaccaggagauggaaacccagacccaaaugcaaauccaaacguagacccaaacgcaaauccaaacguagacccaaacgcaaaucccaaugcaaacccaaacgcaaacccaaacgcaaaccccaaugcaaacccaaaugcaaacccaaaugcaaacccaaacgcaaaccccaacgccaacccaaacgcaaauccaaacgcaaauccaaacgcaaauccaaaugcaaacccaaacgcaaacccaaacgcaaacccaaacgccaacccaaacgucgacccaaacgcaaauccaaacgcaaaccccaacgcaaacccaaacgcaaaccccaacgcaaaccccaacgcaaauccaaacgcaaacccuaacgccaauccaaacgcaaauccaaacgcaaauccaaaugcaaacccaaacgcaaauccaaacgcaaacccaaacgcaaaccccaacgcaaaccccaaugccaacccaaacgcaaacccaaacgcaaacccaaaugcaaacccaaacgcaaacccaaacgcaaacccaaaugcaaacccaaaugcaaacccaaacgcaaauccaaaugccaacccaaacgccaauccaaacgcaaacccaaacaaaaacaaccaaggaaacggacaaggacacaauaugcccaacgacccaaauagaaacguagacgaaaaugcaaaugcaaacaacgcaguaaaaaauaauaacaacgaagaacccuccgacaaacacauaacagaauaucuaaaaaaaauacaaaacucacucucuacagaauggucaccaugcucaguaacaugcgguaacggaauacaaguccgaauaaaacccggauccgcaggcaaauccaaagacgaauuagacuacgaaaacgacauugaaaaaaaaauaugcaaaauggaaaaaugcucaucaguuuucaacguaguaaauucaucaauaggccucauuaugguacuaucauuucuauuccuaaauuaa

SEQ ID NO: 5332 - RNA, 1320 nt, Artificial Sequence
  derived and/or modified CDS sequence (opt6) from Pf(TMS121)__ACO49498.1__CSP
augagaaaacuagcaauacuuucaguaucauccuuucuauuugucgaagcacuauuccaagaauaccaaugcuacggaaguucgucuaacaccagaguauuaaaugaacuaaauuacgauaacgccggaacaaacuuauauaacgaacuagaaaugaacuauuacggaaaacaagaaaacugguauucacuaaaaaaaaacucaagaucacuaggagaaaacgacgauggaaacaacaacaacggagacaacggacgagaaggaaaagacgaagacaaaagagacggaaacaacgaagacaacgaaaaauuacguaaacccaaacacaaaaaacuaaaacaacccggcgacggaaaucccgacccaaacgcaaacccaaacguagacccaaacgcaaacccaaacguagacccaaacgcaaacccaaacguagacccaaacgcaaacccaaacgccaacccuaacgcaaaccccaaugcaaauccaaaugcaaacccaaacgcaaauccaaacgcaaacccaaacgcaaacccaaacgccaacccaaacgcuaacccaaacgcaaacccaaacgcaaacccaaacgcaaauccaaacgcaaaccccaaugcaaacccaaacgcaaauccaaacgcaaacccaaacgcaaacccaaacgccaacccaaacgccaacccuaaugccaauccuaaugcaaacccaaacgcaaauccaaaugcaaacccaaacgcaaacccaaacgccaacccaaacgcaaacccaaacgcaaaucccaacgcaaacccaaacgcaaacccaaacgccaaccccaaugcaaauccaaacgcaaacccaaacgcaaacccaaacgcaaacccaaacgcaaacccaaacgcaaacccaaacgcaaacccaaacgcaaacccgaacgcaaaccccaacgcaaacccuaacgcuaacccgaacaaaaacaaccaaggaaacggacaaggacauaacaugcccaacgacccaaacagaaacgucgacgaaaacgcaaaugcaaacaacgacguaaaaaacaauaacaacgaagaaccaucagacaaacacauagaacaauaccuaaaaaaaauccaaaacucacuaucaaccgaauggucaccauguucaguaacauguggaaacggaauacaagucagaauaaaaccaggcucagcaaacaaaccaaaagacgaacuagacuacgaaaacgacauagaaaaaaaaauaugcaaaauggaaaaaugcucaucaguuuucaacgucguaaauagcuccauaggauuaauaaugguacucucauuccuauuccuaaauuaa

SEQ ID NO: 5333 - RNA, 1320 nt, Artificial Sequence
  derived and/or modified CDS sequence (opt6) from Pf(TMS180)__ACO49505.1__CSP
augcgaaaacuagcuauacuaucaguaucauccuuccuauucguagaagcacuauuucaagaauaccaaugcuacggaagcucaucaaacacaagaguccuaaacgaacuaaacuacgauaaugccggaacaaacuuauacaacgaacuagaaaugaacuacuacggaaaacaagaaaauugguauucccucaaaaaaaacucacgaucguuaggagaaaacgacgauggcaacaacaacaauggagacaacggcagagaaggaaaagaugaagacaaaagagauggaaacaacgaagacaacgaaaaacuaagaaaaccaaaacacaaaaaacuaaaacaaccaggagacggaaacccagacccaaacgcaaacccaaacguagacccaaacgcaaacccaaauguagacccaaacgcaaacccaaaugucgacccaaaugcaaacccaaacgcaaacccaaacgccaacccaaacgcaaacccaaaugcaaacccaaacgcaaacccaaacgcaaaucccaacgcaaacccaaacgcaaacccaaaugcaaacccaaacgcaaauccaaacgcaaacccaaacgcaaacccaaacgccaacccaaacgcaaacccaaacgcaaacccaaacgcaaauccaaacgccaacccaaacgcaaaccccaacgcaaacccaaacgccaacccaaacgccaaucccaacgcaaacccaaacgccaaccccaacgcaaacccuaacgcaaacccaaacgcaaaccccaaugcaaauccaaacgcaaacccaaacgcaaacccaaacgcaaacccaaacgcuaacccaaacgcaaacccaaacgcaaacccaaacgcaaaccccaacgcaaacccaaacgcaaacccaaacgcaaauccgaacgccaacccaaacgcuaauccaaaugcaaacccaaacgcaaaccccaacaaaaacaaucaaggaaauggacaaggacacaacaugccaaacgauccaaaucgaaacgucgaugaaaacgcaaacgcaaauaacgacguaaaaaacaacaacaacgaagaaccaucagauaaacacaucgaacaauaccuaaaaaaaauacaauacucacuaucaacagaaugguccccaugcucaguaacaugcggcaacggaauacaaguaagaauaaaaccaggaucagcagacaaaccuaaagaccaacuagacuacgaaaacgauauagaaaaaaaaauaugcaaaauggaaaaaugcagcuccguauucaacguagucaacucuuccauaggacucauaaugguacuuucauucuuauuccuaaacuaa

SEQ ID NO: 5334 - RNA, 1311 nt, Artificial Sequence
  derived and/or modified CDS sequence (opt6) from Pf(836)__AAA29576.1__CSP
augaugcgcaaauuagcaauacuaucaguaucaucuuuucuauucguagaagcccuauuucaagaauaucaaugcuacggaucaucauccaacaccagaguacuaaaugaauuaaacuacgacaaugcaggaauaaaccucuacaacgaacuagaaaugaauuacuacggaaaacaagagaauugguacucacuaaaaaaaaacucacgcucacuaggagaaaacgaugacgguaacaacaacaacggagacaacggaagagaaggaaaagacgaagauaaaagagacggaaacaaugaagacaacgaaaaacuccgaaaacccaaacacaaaaaauuaaaacagcccggagacggcaauccagacccaaacgcaaaucccaacguagacccaaacgcaaacccaaauguagauccaaacgcaaacccaaacgcaaacccaaacgcaaacccaaaugcaaacccaaacgcaaacccaaaugcaaacccaaacgcaaauccuaaugcaaacccaaacgcaaacccaaacgcaaacccaaaugcuaacccaaacgcaaacccaaaugcaaacccaaacgcaaaccccaaugcaaacccaaacguagauccaaacgcaaacccaaacgcaaacccgaacgcaaacccaaacgcaaacccaaacgcaaacccaaacgcaaacccaaacgcaaacccaaacgcaaacccaaacgcaaacccaaacgcuaacccaaacgcaaauccaaacgcaaacccaaacgcaaacccaaaugcaaacccaaacgcaaacccaaacgcuaacccaaacgcaaauccaaaugcaaauccaaacgcaaacccaaacgccaacccaaaugcaaacccaaacgcgaacccaaacgccaaccccaacgcaaauccaaacgcaaacccaaaugcaaacccaaacgcaaacccaaacaaaaacaaccaaggaaauggacaaggacacaacaugccaaacgacccaaacagaaauguagacgaaaacgcaaaugcaaauaacgcagucaaaaacaauaacaacgaagaacccucagacaaacauauaacugaauacuuaaaaaaaauacaaaacucacuaucaacagaauggucacccugcagcgucaccugcgguaauggcauccaaguacgaauaaaaccagguuccgcaggaaaaucaaaagacgaacucgacuacgaaaacgauauagaaaaaaaaauaugcaaaauggaaaaaugcagcucagucuuuaacgucguaaacucaucaauaggacucauaaugguacucuccuuccuauuccuaaacuaa

SEQ ID NO: 5335 - RNA, 1311 nt, Artificial Sequence
  derived and/or modified CDS sequence (opt6) from Pf(842)__AAA29545.1__CSP
augaugagaaaacuagccauacucucagucuccucauuccucuucgucgaagcucuauuccaagaauaucaaugcuacggaucaucaucaaacacacgaguauuaaacgaauuaaacuaugacaaugccggcauaaaccucuacaacgaauuagaaaugaacuauuacggaaaacaagaaaauugguacagcuuaaaaaaaaacucacgaucacuaggagaaaacgaugacggcaacaacaacaacggugacaacggacgagaaggcaaagacgaagacaaaagagacggaaacaacgaagacaaugaaaaacuuagaaaaccaaaacauaaaaaauuaaaacaaccaggagaugguaaucccgauccaaaugcaaacccaaacguagacccaaacgcaaauccaaacguagauccaaacgcaaauccaaacguagacccaaacgccaacccaaaugcaaaccccaacgcaaacccaaacgcaaacccaaacgcaaacccaaacgcaaacccaaaugcaaacccaaacgcaaacccaaacgcaaacccaaacgcaaacccaaaugcaaacccaaacgcaaacccaaacgcaaacccaaaugcaaacccaaacgcaaauccaaacgcaaacccaaacgcaaacccaaaugcaaauccaaaugcaaauccaaaugcaaaucccaaugcaaaucccaaugcaaacccaaacgcaaauccaaacgccaaccccaacgcaaauccaaacgcaaacccaaacgccaaccccaacgcaaaccccaacgcaaacccaaacgcaaacccaaaugcaaacccaaacgccaacccaaacgcaaauccaaacgcaaauccaaacgcaaacccaaaugcaaauccaaacgcaaacccaaacgcaaacccaaaugcaaacccaaaugcaaacccaaacgcaaauccaaacaaaaauaaccaaggaaacggacaaggacacaacaugccaaaugacccaaacagaaacgucgacgaaaacgcuaaugcaaacaacgacguaaaaaacaacaacaacgaagaaccaucagacaaacacauagaacaauacuuaaaaaaaauccaauacucacuaucaaccgaauggucaccaugcuccguaacaugcggaaacggaauacaagucagaauaaaaccaggcucagcagacaaaccaaaagaccaacuagacuacgaaaaugacauagaaaaaaaaauaugcaaaauggaaaaaugcucaucaguauucaacguagucaauaguucgauaggacuaauaaugguacuaucguuccuauucuuaaacuaa

SEQ ID NO: 5336 - RNA, 1311 nt, Artificial Sequence
  derived and/or modified CDS sequence (opt6) from Pf(India)__AAN87576.1__CSP
augaugagaaaauuagcaauauuaagcgucucaucauuccuauucguagaagcacuuuuccaagaauaucaaugcuauggcuccucaucaaacacaagaguccucaacgaauuaaauuacgacaaugcaggaacaaacuuauacaacgaauuagaaaugaacuauuacggaaaacaagaaaacugguauagccuuaaaaaaaacucacgaagccuaggagaaaacgaugacggaaacaacaacaacggagacaauggaagagaaggaaaagacgaagacaaaagagacggaaacaacgaagacaacgaaaaacuucgaaaacccaaacacaaaaaauuaaaacaaccaggagacggaaauccagacccaaaugcaaacccaaauguagauccaaaugcaaacccaaacguagacccaaaugcaaacccaaaugcaaaccccaacgcaaacccaaacgccaacccaaacgcaaauccaaacgcaaauccaaacgcaaauccaaaugcaaacccaaacgcaaacccaaacgcaaacccaaacgcaaacccaaacgcaaaucccaacgcaaauccaaacgccaaccccaacgccaacccaaacgcaaacccaaacgcaaacccaaacgcaaauccaaacgcaaacccaaacgccaaccccaacgcaaacccaaacgcaaaucccaacgccaauccaaacgcaaacccaaacgcaaacccaaacgcuaauccaaacgcaaaccccaacgcaaacccaaacgcgaacccaaacgcaaacccaaacgcaaauccuaaugcaaacccaaacgcaaacccaaaugcaaacccaaacgcuaacccaaacgcaaacccaaacgcaaacccaaacgcaaauccaaacgccaauccaaacgcaaacccaaacgcaaacccaaacgcaaacccaaaugcaaacccaaacaaaaacaaucaaggaaacggacaaggacacaacaugccgaacgacccaaacagaaauguagacgaaaacgcaaaugcaaauaaugacguaaaaaauaacaauaacgaagaacccucagacaaacacauagaagaauacuuaaaaaaaauacaaaacucacuaucaacagaauggucacccugcagugucacaugcggaaacggaauacaaguaagaauaaaacccgguucagcaaacaaacccaaagaugaacuaaauuacgaaaaugacauagaaaagaaaauauguaaaauggaaaaaugcagcuccgucuucaacguuguaaacaguucaauaggacuaauaaugguacuaucauuccuauuccuaaacuaa

SEQ ID NO: 5337 - RNA, 1311 nt, Artificial Sequence
  derived and/or modified CDS sequence (opt6) from Pf(India)__AAN87620.1__CSP
augaugagaaaauuagccauacuuucaguaucaaguuuccuauucguugaagcacuauuucaagaauaucaaugcuacggaagcucaucuaacacaagaguacuaaacgaauuaaacuacgauaacgcuggcacaaaccuauacaacgaauuggaaaugaacuacuacggaaaacaagaaaacugguauucucuaaaaaaaaacucaagaucgcuaggagaaaacgacgacggaaauaacaacaacggagacaacggaagagaaggaaaagacgaagacaaaagggauggaaacaacgaagacaacgaaaaacuacgaaaaccaaaacauaaaaaacuaaaacaaccaggaggagacaacccagacccaaacgcaaacccaaacgucgacccaaaugcaaacccaaacgcaaacccgaacgcaaacccaaaugcaaacccaaacguaaaccccaacgcaaaccccaacgcaaacccaaacgcaaacccaaacgcaaauccaaaugcaaaucccaacgcaaauccaaacgcaaaccccaacgcaaauccaaacguagacccaaacgccaaccccaaugcaaacccaaacgcaaauccaaacgcaaacccaaacgcgaacccuaacgcaaauccaaaugcaaacccaaaugcaaacccaaaugcaaaucccaaugcaaauccaaacgcaaaccccaacgcaaacccaaacgcaaaccccaaugcaaacccaaacgcuaauccaaacgccaacccaaaugcaaacccaaaugcaaacccaaacgcaaacccaaacgcaaauccaaacgcaaacccaaacgcaaacccaaaugcaaacccaaacgcaaacccaaaugcaaacccaaaugcaaacccaaacgcaaauccaaacgcaaacccaaacgcaaauccaaacgcaaacccgaacgcaaacccaaacaaaaacaaccaaggcaauggccaaggacacaacaugccaaacgauccaaaccgcaacguagacgaaaaugccaacgcaaauaacgcaguaaaaaacaauaacaacgaagaaccaucagacaaacacauagaacaauaucucaaaaaaauacaaaacucacuaucaacagaauggucaccaugcucaguaacaugcggaaacggcauacaaguacgaauaaaaccaggcuccgcaaauaaaccaaaagacgaacuagacuacgaaaacgacauagaaaaaaaaauaugcaaaauggaaaaaugcucaucaguauucaacguaguaaauaguucaauaggucuaauaaugguacuuucguuccuauuucucaacuaa

SEQ ID NO: 5338 - RNA, 1311 nt, Artificial Sequence
  derived and/or modified CDS sequence (opt6) from Pf(PFS19)__BAN59401.1__CSP
augaugagaaaacuagcaauauuaucagucucaagcuucuuauucguagaagcacuauuccaagaauaccaaugcuacggaucaucaagcaauaccagaguacuaaaugaauuaaacuaugacaacgcaggaacaaacuuauacaaugaacucgaaaugaacuacuauggaaaacaagaaaacugguacucacuaaaaaaaaacucaagaucacucggagaaaacgacgacggaaacaauaacaauggagacaacggaagagaaggaaaagacgaagacaaaagagacggaaauaacgaagacaacgaaaaauuacgaaaaccuaaacacaaaaaauuaaaacaaccaggagacggaaauccagauccaaaugccaacccaaacgucgacccaaacgcaaacccaaacguagacccaaacgcaaacccaaacguagacccaaacgcaaacccaaacgcaaacccaaaugcaaacccaaacgcaaacccaaacgcaaacccaaaugcaaaccccaacgcaaacccaaacgcaaaccccaacgccaaccccaacgcaaacccaaacgcaaaccccaacgcaaacccaaacgcaaauccaaaugcaaacccaaacgcaaacccaaacgcaaacccaaaugcaaacccaaacgcaaacccaaacgcaaacccaaaugcaaacccaaaugcaaauccuaaugcaaacccaaacgccaauccaaacgcaaacccaaacgcaaacccaaacgcaaauccaaacgcaaauccaaacgcaaacccaaacgcaaacccaaacgccaacccuaacgcaaacccaaacgcaaacccaaacgcaaacccuaacgccaauccuaaugccaauccaaacgcaaacccaaacgcaaacccaaacgccaacccaaacgcaaacccaaacgccaacccaaacgccaacccaaacaaaaacaaccaaggcaacggucaaggccacaacaugccuaacgacccaaaccgaaacgucgacgaaaaugcaaaugcaaacaacgcggucaaaaacaacaauaacgaagaaccaucagauaaacacaucgaacaauaccuaaaaaaaauacaaaacucacucucaacagaauggucaccaugcucaguuacaugcggaaacggcauacaaguaagaauaaaaccaggaucagcaaauaaacccaaagaugaauuagacuacgaaaacgacauagaaaaaaaaauauguaaaauggaaaaaugcuccucaguauucaacguagucaacucauccauaggacuaaucaugguauuaucauuuuuauuccuaaacuaa

SEQ ID NO: 5339 - RNA, 1311 nt, Artificial Sequence
  derived and/or modified CDS sequence (opt6) from Pf(Sol95-121)__BAM85068.1__CSP
augaugagaaaacuagcaauacuaucagucucauccuuccucuucgucgaagcacuauuccaagaauaccaaugcuacggaagcucaucaaauaccagaguacuaaacgaacuaaauuacgacaaugcaggaacaaaccuauacaaugaauuagaaaugaauuacuacgggaaacaagaaaacugguacucacuaaaaaaaaauucaagaucacuaggugaaaacgaugacggaaacaacaacaacggagacaacgguagagaaggaaaagacgaagacaaaagagauggaaacaacgaagacaacgaaaaauuaagaaaaccuaaacacaaaaaauuaaaacaaccaguagauggaaacccagacccaaacgcaaacccuaacguagauccaaaugcaaacccaaacguagacccaaaugcaaacccaaacguagaccccaacgcaaauccaaacgcaaaccccaaugcaaacccaaacgcaaacccaaacgcuaauccaaacgcaaauccaaacgcaaacccaaacgcaaacccgaacgcaaacccaaacgcaaauccaaacgccaauccaaacgcaaacccaaacgcaaacccaaacgcaaacccaaacgccaacccaaaugcaaacccaaaugcaaacccaaacgcaaacccaaacgcaaacccaaacgcaaacccaaacgcaaaccccaacgcaaacccaaacgcaaacccaaacgccaacccaaacgcaaacccaaaugcuaaccccaacgcaaacccaaaugcaaacccaaacgcaaacccaaacgcaaacccaaaugccaacccaaacgcaaacccaaacgcaaauccaaaugcaaacccaaacgcaaacccaaacgccaacccaaaugcaaacccaaacgccaauccgaacgcaaacccaaaugcaaaaccaaacgcaaaccccaacaaaaacaaccaaggaaacggacaaggacacaacaugccaaacgacccaaauagaaacguagacgaaaaugccaacgccaacaaugcaguaaaaaacaauaacaacgaagaaccaucagacaaacacauagaacaauaccuaaaaaaaauacaaaacucacuaucaacagaauggucaccaugcagcgugacaugcggcaacggcauacaaguacgcauaaaaccaggaucagcagacaaaccaaaagaccaacuagacuacgaaaaugauauagaaaaaaaaauaugcaaaauggaaaaaugcagcucuguauucaacguaguaaacucaucuauaggacucauaaugguacuauccuuccucuuccuaaacuaa

SEQ ID NO: 5340 - RNA, 1311 nt, Artificial Sequence
  derived and/or modified CDS sequence (opt6) from Pf(T837)__BAM84914.1__CSP
augaugagaaaauuagccauacucucuguuucauccuuucuauucgucgaagcacuauuccaagaauaccaaugcuacggaagcucaucaaauacaagaguccuaaaugaauuaaacuacgacaacgcaggaacaaaccuauacaacgaacuagaaaugaacuacuacggaaaacaagaaaacugguacucucuaaaaaaaaacucacgaucacuaggagaaaaugaugauggcaacaacaacaacggugacaauggcagagaagguaaagacgaagacaaaagagacggaaacaacgaagacaaugaaaaauuacgaaaacccaaacacaaaaaauuaaaacaaccaggagacgguaacccugaccccaacgcaaacccaaauguagauccaaacgcaaacccaaacguagacccaaacgcaaaccccaacgcaaacccaaaugcaaacccaaacgccaacccgaacgcaaaccccaaugcaaacccaaacgcuaaccccaacgcaaacccaaacgcaaauccaaacgcaaacccaaacgcaaaccccaacgcaaauccaaacgcaaacccaaaugcaaacccaaacgcaaacccaaacguagaccccaaugcaaacccuaacgcgaacccaaaugccaacccaaacgcaaacccaaaugcaaacccaaacgcaaacccaaacgcaaacccaaaugcaaacccaaaugcaaauccaaacgcaaauccaaacgcaaauccaaacgccaacccaaaugcaaacccaaacgcaaacccaaaugcaaacccaaacgcaaacccaaacgccaacccaaacgccaacccaaacgcaaauccaaacgccaacccaaaugcaaacccaaacgcaaacccaaacgccaacccaaacgcaaacccaaacgcaaacccgaacgcaaauccaaacgcaaacccuaauaaaaacaaccaaggaaacggacaaggacacaacaugccaaacgacccaaauagaaacguagacgaaaaugcaaacgcuaacaaugccguaaaaaacaacaauaacgaagaaccaucagacaaacacauaacagaauaccuaaaaaaaauacaaaacucacuaucaacagaauggagcccauguucaguaacaugcgguaacggaauacaagucagaauaaaaccaggaucagcaggaaaaucaaaagacgaauuagauuacgaaaacgacauagaaaaaaaaaucugcaaaauggaaaaaugcucaucaguauucaacguagucaacagcucaauuggacuaauaaugguacuaucauuucuauuuuuaaacuaa

SEQ ID NO: 5341 - RNA, 1311 nt, Artificial Sequence
  derived and/or modified CDS sequence (opt6) from Pf(TiMS95-071)__BAM84865.1__CSP
augaugagaaaacuagccauauuaucaguaucaaguuuuuuauucguagaagcccuauuccaggaauaccaaugcuacggaucauccucuaacaccagaguacucaacgaacuaaacuaugacaacgcaggaacaaacuuauauaaugaacuagaaaugaacuauuacggaaaacaagaaaacugguacagucuaaaaaaaaacucaagaucccucggagaaaacgacgacgguaacaacaauaacggcgacaacggaagagaaggaaaagacgaagauaaaagagacggcaacaacgaagacaacgaaaaauuaagaaaaccaaaacacaaaaaacuaaaacaacccggagauggaaacccagacccaaacgccaacccaaacguagacccaaacgcaaacccaaauguagacccaaaugcaaacccaaacgucgacccaaacgcaaacccaaaugcaaacccaaacgcaaaccccaaugcaaauccaaacgcaaacccaaaugcaaacccaaacgcaaacccaaacgcuaacccgaacgcaaauccaaacgcaaacccaaaugcaaauccaaacgcaaacccaaaugcaaacccaaacgccaacccaaacgcaaacccaaacgcaaacccaaaugcaaacccaaacgcaaacccaaaugcaaauccaaacgcaaacccaaaugcaaauccaaacgccaaccccaacgcaaacccaaacgcaaacccaaaugcaaaccccaacgcaaacccaaacgcaaauccaaacgcaaacccaaaugcaaacccaaacgcaaacccaaacgcaaacccaaacgcaaacccaaacgcaaacccaaacgcaaacccaaacgcgaacccaaaugcaaacccaaaugcaaacccaaacgcaaauccaaacgcaaacccaaacgcaaauccaaacgcgaacccaaauaaaaacaaccaaggaaauggacaaggacacaacaugccaaaugaccccaacagaaacguagaugaaaacgcaaacgcaaauaacgacguaaaaaacaacaauaacgaagaaccaucggacaaacacauagaacaauaccuaaaaaaaauacaauacucauuaucgacagaauggucaccaugcagcgucacaugcgguaauggaauacaagucagaauaaaaccagguucagcagacaaaccaaaagaccaacuagacuaugaaaacgacauagaaaagaaaauaugcaaaauggaaaaaugcucuucaguauucaacguaguaaauuccucaauuggacucauaaugguacuaucauucuuauucuuaaauuaa

SEQ ID NO: 5342 - RNA, 1308 nt, Artificial Sequence
  derived and/or modified CDS sequence (opt6) from Pf(TM69)__ACO49446.1__CSP
augagaaaacuagcaauacuauccguuuccucauuccuauucguagaagccuuauuccaagaauaucaaugcuacggaucaucaucaaacaccagaguauuaaacgaacuaaacuacgacaacgcaggcacaaaccuauacaacgaauuagaaaugaacuacuacggcaaacaagaaaacugguacucacuaaaaaaaaacucgcgaucccuaggagaaaacgacgacggaaacaauaauaauggagauaacggaagagaaggaaaagacgaagacaaacgagacggaaauaacgaagacaaugaaaaacuacgaaaacccaaacacaaaaaacucaaacaaccuggagacggaaacccggacccuaacgcaaacccaaaugucgacccaaacgcaaacccaaacguagacccaaacgcaaauccuaacguagacccaaacgcaaauccaaacgcaaacccaaaugcaaauccaaacgcaaacccaaacgccaaccccaaugcaaacccaaacgcaaaccccaacgcaaauccaaacgcaaauccaaacgcaaauccaaaugcaaacccaaacgcaaacccaaacgccaacccaaacgcaaauccaaacgcaaacccgaacgcaaaccccaacgcaaacccaaaugcaaacccaaaugccaacccaaacgcaaacccaaacgccaauccaaacgcaaacccaaacgcaaauccaaacgcaaaccccaacgcaaacccaaacgcaaacccaaacgcaaacccaaaugcaaauccaaacgcaaacccaaacgcaaacccaaacgcaaaccccaacgcaaauccaaacgccaacccaaacgcaaauccaaaugcaaacccaaacgcaaauccaaaugcaaaucccaacgccaauccaaacgcaaacccaaacgccaacccaaacgccaauccaaacaaaaauaaccaaggaaacggacaaggacacaauaugccaaacgacccaaaccgcaacguagacgaaaacgcaaacgcaaauaacgacguaaaaaacaacaacaacgaagaacccuccgacaaacacauagaacaauaccucaaaaaaauacaauacucacuuucaacugaauggucaccauguagcguaaccugcggaaacggcauacaaguaagaauaaaaccaggcucagcagacaaaccaaaagaccaauuagacuacgaaaacgacauagaaaaaaaaauaugcaaaauggaaaaaugcagcucaguuuucaacguagucaacucauccauaggucucauaaugguccuaucauuuuuauuccuaaacuaa

SEQ ID NO: 5343 - RNA, 1308 nt, Artificial Sequence
  derived and/or modified CDS sequence (opt6) from Pf(TMS177)__ACO49503.1__CSP
augagaaaacuagcaauacucucaguaucauccuuccuauucgucgaagcauuauuccaagaauaccaaugcuacggauccucuagcaacacuagaguacuaaacgaauuaaacuacgacaacgcaggaaccaacuuauacaaugaacuagaaaugaauuauuauggaaaacaagaaaacugguacagcuuaaaaaaaaacucaagaucacuuggagaaaacgacgacggcaacaacaauaacggagacaacggaagagaaggaaaagacgaagacaaacgagauggaaacaacgaagauaacgaaaaacuaagaaaaccaaaacacaaaaaacuaaaacaaccaggagacggaaacccagacccgaacgcaaauccaaacguggacccaaacgccaacccaaacguagacccaaaugcgaauccaaauguagacccaaaugcaaaccccaacgcaaauccaaacgcaaacccaaacgcaaaccccaacgcaaacccaaacgcaaaccccaacgccaauccaaacgcaaacccaaaugcaaauccaaacgcaaacccaaaugccaacccaaacgcaaacccaaacgcaaacccaaacgcaaacccaaacgcaaacccaaacgccaaccccaacgcaaauccaaacgcaaaccccaacgcaaacccuaacgccaauccaaacgcaaacccaaacgcaaacccaaacgccaacccaaacgcaaauccaaacgcaaacccaaacgcaaacccaaacgccaacccaaacgccaacccaaacgcuaacccaaacgccaacccaaacgcaaacccaaacgcaaacccaaacgcaaacccaaaugcaaacccaaacgcaaacccaaacgcaaacccuaacgcaaacccaaacgcaaaccccaacgcaaacccaaacgcaaauccaaaugcaaacccaaacaaaaacaaccaaggaaacggacaaggacacaacaugccaaaugauccaaaccgaaacguagacgaaaaugcaaaugcaaacaacgcaguaaaaaauaacaacaacgaagaaccaucugacaaacacauagaacaauaccuaaaaaaaauccaaaacuccuuaucaacagaauggucaccaugcagcguuacaugcggcaacggaauacaaguccgcauaaaacccggaucagcaaacaaaccaaaagacgaacuagacuacgaaaacgacauagaaaaaaaaauauguaaaauggaaaaaugcucaucagucuuuaacguaguaaacucuucaauaggacuaauaauggucuuauccuuccuauuccuaaacuaa

SEQ ID NO: 5344 - RNA, 1308 nt, Artificial Sequence
  derived and/or modified CDS sequence (opt6) from Pf(TMS178)__ACO49504.1__CSP
augcgcaaacuagcuauacuaucaguauccucuuuuuuauucguagaagccuuauuccaagaauaccaaugcuauggauccagcuccaacacaagaguacuaaacgaacuaaacuacgauaaugcaggaacaaaccuauauaaugaacuagaaaugaacuacuauggaaaacaagaaaacugguacucacuaaaaaaaaacucaagaucccucggagaaaacgacgacggaaauaacaauaauggagacaauggcagagaaggaaaagacgaagacaaaagagacggaaauaacgaagacaacgaaaaacuccgaaaacccaaacacaaaaaauuaaaacaaccaggagacggaaacccagauccaaacgcaaacccaaauguagacccaaacgcaaacccaaacguagaccccaacgcaaaccccaacgcaaauccaaaugccaaccccaaugccaauccuaacgcaaacccaaacgcaaacccaaacgcaaaucccaacgcaaacccaaaugcaaacccaaacgcaaacccuaacgcaaauccaaacgcaaacccaaacgcaaacccaaaugcuaacccaaacgccaacccaaacguagaucccaacgcaaauccaaaugcaaacccaaacgcaaaucccaacgcaaacccaaacgcaaauccaaacgcaaacccaaacgcaaacccaaacgcaaacccuaacgccaauccaaaugcaaacccaaaugcaaacccaaacgcaaacccaaacgcaaauccaaacgcaaauccaaacgcaaacccaaacgcaaacccaaacgcaaacccaaacgcaaacccaaacgcaaauccaaacgccaacccaaaugcaaacccaaacgccaacccaaacgcaaaccccaacgcaaaccccaacgcaaacccaaacgcaaacccaaacgccaacccaaauaaaaacaaucaaggaaacggacaaggacacaacaugccaaacgacccaaacagaaacguagacgaaaacgccaaugcaaauaacgcaguaaaaaacaacaauaacgaagaaccaucagauaaacacauaacagaauaccucaaaaaaauacaaaacucauuaucaacagaauggucacccugcagcgucacaugcggaaauggaauacaaguaagaauaaaacccggaucagcaggcaaauccaaagaugaacuagacuacgaaaacgacauagaaaaaaaaauauguaaaauggaaaaaugcagcucaguauucaauguaguaaacagcucaauaggauuaauaaugguacuuucauuccuauuccuaaacuaa

SEQ ID NO: 5345 - RNA, 1305 nt, Artificial Sequence
  derived and/or modified CDS sequence (opt6) from Pf(YL864)__ADF48458.1__CSP
augagaaaacuagcaauacuaucagucucaucauuccucuucgucgaagcacuauuucaggaauaccaaugcuacggcuccucaucaaacacaagaguacuaaacgaacuaaacuacgacaacgcagguaccaaucuauacaacgaacuagaaaugaacuacuacgguaaacaagaaaacugguacucccuaaaaaaaaacucaagaucauuaggagaaaacgacgaugguaacaacaacaacggagacaacggccgcgaaggaaaagacgaagauaaaagagacggaaacaacgaagacaacgaaaaacuaagaaaaccaaaacacaaaaaacuaaaacaaccaggagacggcaauccagauccaaacgcaaacccgaacguagaccccaacgccaacccaaacgucgauccaaacgcaaauccaaacguagacccaaaugcaaacccaaacgcaaaccccaaugcaaacccaaacgccaacccaaacgcaaacccaaacgcaaacccaaacgcaaacccaaacgccaaccccaacgcaaacccaaacgcaaacccaaacgcaaacccaaacgcaaacccaaacgcaaacccaaacgcaaacccaaacgcaaauccaaacguagacccgaaugcaaacccaaaugcaaacccaaacgcaaaccccaacgcaaacccaaaugcaaacccaaaugcaaaccccaacgcaaacccaaacgcaaacccaaacgcaaacccaaacgcaaacccaaacgcaaauccaaacgccaacccaaacgcaaacccaaacgcaaauccaaaugccaauccaaacgcaaacccaaacgcaaacccaaacgcaaacccaaacgcaaacccaaacgcaaacccuaacgccaacccaaacgcaaacccaaaugcaaaccccaaugcaaacccaaacgcaaauccuaacaaaaacaaucaaggaaacggacaaggacacaacaugccaaacgacccaaaccgaaacguagacgaaaaugcaaaugcaaacaacgacgaaaacaacaauaacgaagaaccaagugacaaacauauagaacaauaccuuaaaaaaauacaauacucauuaagcacagaauggucaccaugcucagucacauguggaaauggaauacaaguaagaauaaaacccggaagcgcagacaaaccaaaagaccaacucgacuacgaaaacgacauagaaaaaaaaauauguaaaauggaaaaaugcucaagcguauuuaacgucgucaacucaucaauaggauuaauaaugguuuuaucauuccuuuucuuaaacuaa

SEQ ID NO: 5346 - RNA, 1299 nt, Artificial Sequence
  derived and/or modified CDS sequence (opt6) from Pf(838)__AAA29543.1__CSP
augaugagaaaacucgcaauacuuucaguuucaucuuuucuauucguagaagcccuauuccaagaauaccaaugcuauggaucaucaucaaacacuagaguacuaaaugagcuaaacuaugacaacgcgggaauaaaccucuacaacgaacuagaaaugaacuacuacggaaaacaagaaaacugguacucacucaaaaaaaacucaagaucacuaggagaaaacgacgacggaaauaacaacaauggcgauaacggacgagaaggaaaagaugaagacaaaagagauggaaacaacgaagacaacgaaaaauuacgaaaacccaaacacaaaaaacuaaaacaaccaggagauggaaacccagauccaaacgccaacccgaauguagacccaaaugcaaacccaaacguagacccaaaugcaaacccaaacguagacccaaacgcaaacccaaacgcaaaucccaacgcaaauccaaacgcaaauccaaacgcaaaucccaacgcaaauccaaacgcgaacccaaacgccaacccaaaugcaaaccccaaugcuaacccaaacgcaaacccaaaugccaacccaaacgcaaacccaaacgcaaauccaaaugcaaaccccaacgcaaaccccaaugcaaacccaaacgccaauccaaaugcaaacccaaacgcaaauccaaacgccaauccaaacgcaaaccccaacgcaaaucccaacgcaaacccaaaugcaaacccaaacgcaaacccaaacgcaaauccaaacgcaaauccaaacgcaaacccaaacgcaaauccaaacgcaaacccaaacgcaaacccaaacgcaaaccccaacgcaaacccaaacgcaaauccaaacgcaaacccaaacgcaaacccaaacgcaaacccaaacgcaaacccaaacgcaaauccaaacaaaaauaaccaaggaaacggacaaggacauaacaugcccaacgacccaaacagaaacguagacgaaaacgcuaacgcaaauaacgcagucaaaaacaacaauaacgaagaaccaucagacaaacacauagaacaauaccuaaaaaaaauacaaaacucacuuucaacagaauggucaccaugcagcgucaccugcggaaacggaauacaaguaagaauaaaaccagguucagccaacaaaccaaaagacgaacucgacuacgaaaacgacauagaaaaaaaaauaugcaaaauggaaaaaugcagcucagucuucaacguaguaaauagcucaauaggccucaucaugguacuaucauucuuauuccuaaacuaa

SEQ ID NO: 5347 - RNA, 1299 nt, Artificial Sequence
  derived and/or modified CDS sequence (opt6) from Pf(834a)__AAA29571.1__CSP
augaugaggaaacuugcaauacuaucuguaucaucauuucuauucgucgaagcucuauuccaagaauaccaaugcuauggaaguucaucaaacacaagaguccuaaacgaacuaaacuacgauaacgcaggaaucaacuuauauaacgaacuagaaaugaacuacuauggaaaacaagaaaacugguauucccuaaaaaaaaauucacgaucacuaggagaaaacgaugacgguaauaauaacaacggagacaacggaagagaaggaaaagacgaagauaaaagagacggaaacaacgaagacaacgaaaaauuaagaaaaccaaaacacaaaaaacuaaaacaaccaggcgauggaaacccagauccaaacgcaaacccaaacguagacccaaacgcaaauccaaaugucgauccaaacgcaaaccccaacguagauccaaacgcaaacccaaacguagacccaaacgcaaauccaaacgcaaacccaaacgcaaacccaaacgcaaaccccaaugccaacccaaacgcaaacccaaacgcaaacccaaacgcaaauccaaacgcaaaccccaacgcaaacccaaacgcaaauccaaacgccaacccaaacgcaaauccaaacgcaaacccaaacgcaaacccaaaugcgaacccaaaugcaaaccccaaugcaaacccaaacgcaaacccaaacgcaaacccaaaugcaaauccaaacgcaaacccaaacgccaauccaaacgcaaacccaaacgcaaauccaaacgcaaaccccaaugcaaacccaaacgcaaauccaaacgcaaauccaaacgcaaacccuaaugcaaauccaaacgcuaacccaaacgcaaacccaaacgcaaauccaaaugcaaacccaaacgcaaacccaaacgcaaauccaaaugcaaacccaaauaaaaacaaccaaggcaacggacaaggacacaauaugccaaaugauccaaacagaaacgucgaugaaaaugcaaacgcaaacaacgcaguaaaaaacaacaacaacgaagaaccauccgacaaacacauagaacaauauuuaaaaaaaauucaaaacucacuauccacagaauggucaccaugcuccguaacaugcggcaacggcauacaaguaagaauaaaaccaggcucagcuaacaaaccaaaagacgaauuagacuacgaaaaugacauagaaaaaaaaauaugcaaaauggaaaaaugcagcucaguauucaacguaguuaacuccucaauaggacuuauaaugguacucucauuccuauuccuaaacuaa

SEQ ID NO: 5348 - RNA, 1299 nt, Artificial Sequence
  derived and/or modified CDS sequence (opt6) from Pf(India)__AAN87622.1__CSP
augaugagaaaacuagccauauuaucagucucauccuuccuauucguagaagcacucuuccaagaauaccaaugcuacggaaguucaucaaacacaagaguauuaaaugaauuaaacuacgauaacgcagguacaaaccuauauaacgaauuagaaaugaacuauuacgguaaacaagaaaacugguacucacucaaaaaaaauucacgcucacuaggagaaaacgacgacggaaauaauaacaacggagauaauggcagagaaggaaaagaugaagauaaacgcgacggaaauaacgaagacaacgaaaaacuacgaaaaccaaaacauaaaaaacuaaaacaacccgcagauggaaacccagacccaaaugcaaauccaaacgucgacccaaacgcaaacccaaacgcaaacccuaacgcaaacccaaacgcaaacccaaacgcuaaccccaacgcaaacccaaacgcaaacccaaacgcaaauccaaacgcaaacccaaacgcaaacccaaacgcaaacccaaacgcaaacccaaacguagaccccaacgccaacccuaacgcaaauccaaaugcaaacccaaacgcaaacccaaaugcaaacccaaaugccaauccuaacgcaaauccaaacgcaaaucccaacgcaaacccaaacgcaaacccaaacgcaaauccaaacgcaaacccaaaugcuaacccaaacgcaaacccaaacgccaauccaaacgcaaauccaaacgcaaacccaaacgcaaacccaaacgcaaauccaaacgcaaaccccaacgcaaauccaaacgcaaacccaaacgcaaaucccaacgcaaacccaaacgcaaacccaaaugcaaacccaaacgcaaaccccaacgcaaacccaaaugcaaacccaaacgcaaacccaaacgcaaacccaaacaaaaacaaucaaggaaacggccaaggacacaacaugccaaacgacccaaaccgaaauguagacgaaaaugccaacgccaauaacgcaguaaaaaacaacaacaacgaagaaccaucugacaaacacauagaacaauacuuaaaaaaaauacaaaacucacuauccacagaauggucccccugcagcguaacaugcggcaacggcauacaaguacgaaucaaaccaggcuccgcaaauaaaccaaaagaugaauuagauuacgaaaacgacauagaaaaaaaaauaugcaaaauggaaaaaugcucaucaguauucaaugucgucaauucaucaauaggauuaauaaugguauuaucauucuuauucuuaaauuaa

SEQ ID NO: 5349 - RNA, 1299 nt, Artificial Sequence
  derived and/or modified CDS sequence (opt6) from Pf(PFS31)__BAN59407.1__CSP
augaugcgaaaauuagcaauacuaucaguaucaucauucuuauucguagaagcccuauuccaagaauaccaaugcuacggcucaucaucuaauaccagaguacuaaacgaacuaaauuacgacaacgcaggaacuaaccuuuauaacgaacuugaaaugaacuauuauggaaaacaagaaaacugguacucacucaaaaaaaacucaagaucccuuggagaaaaugacgacggaaacaacaacaacggcgacaacgguagagaaggaaaagaugaagacaaaagagacggaaauaaugaagacaacgaaaaauuaagaaaaccaaaacauaaaaaauuaaaacaaccuggagauggaaauccagaccccaacgcaaaccccaacguagacccaaacgcaaauccaaacguagacccaaaugcaaaucccaauguagacccaaacgcaaacccaaacgcuaacccaaacgcaaacccaaacgcaaacccaaaugcaaacccaaacgccaauccaaacgcaaauccaaacgcaaacccaaacgcaaacccaaacgcaaacccaaacgcaaacccaaacgcaaauccuaacgcuaacccaaacgcuaaccccaacgcaaacccaaacgcaaacccaaacgcaaacccaaacgccaauccaaacgcaaauccaaacgcaaacccaaacgcaaacccaaaugcaaaccccaacgcaaaccccaacgcaaaccccaacgccaacccaaacgccaacccaaaugcaaacccaaacgcaaacccaaacgcaaacccaaacgcaaacccaaacgcaaauccaaacgcaaacccaaacgcaaauccaaacgcaaacccaaacgcaaacccaaacgcaaacccaaaugcgaacccaaacgcaaacccaaacgcaaacccaaaugccaacccaaacaaaaacaaucaaggaaacggccaaggacacaacaugccaaacgacccaaaccgaaacgucgacgaaaacgccaacgcaaacaaugacguaaaaaacaacaacaacgaagaaccaucagacaaacacauagaagaauaccucaaaaaaauccaaaacucacuaucaacagaauggucaccaugcuccguaacaugcggaaacggaauacaaguacgaauaaaaccaggaucagcaaacaaaccaaaagacgaacuaaacuacgaaaacgacauagaaaaaaaaauaugcaaaauggaaaaaugcagcucaguauucaacguaguaaacuccucaaucggacuaauaaugguacuaucauuccuauuucuaaacuaa

SEQ ID NO: 5350 - RNA, 1299 nt, Artificial Sequence
  derived and/or modified CDS sequence (opt6) from Pf(PNG912-070)__BAM85010.1__CSP
augaugagaaaacuagcaauacuaucaguaucuucauuuuuauuuguagaagcauuauuccaagaauaccaaugcuacggaaguucuuccaacacaagaguccucaacgaacucaacuacgacaacgcaggaaccaaccucuacaacgaacuagaaaugaacuacuauggaaaacaagaaaacugguacagccuaaaaaaaaacucacgaucacuaggcgaaaaugaugacggcaacaacaacaacggugacaacggccgagaaggcaaagacgaagacaaacgagacggaaauaaugaagacaacgaaaaacuacgcaaaccaaaacacaaaaaauuaaaacaaccaguagacggaaacccugacccaaacgcaaacccaaauguagacccaaacgcaaacccaaacguagacccaaacgcaaacccaaacguagacccaaacgcuaauccaaaugcaaacccaaacgcaaacccaaaugcaaacccaaacgcaaacccaaacgcaaacccaaacgcaaacccaaacgcaaauccuaacgcaaauccaaacgcaaacccaaaugcaaacccaaacgcaaacccaaacgccaaccccaacgcaaacccaaacgcaaacccaaacgcaaauccuaacgcuaacccaaacgccaaccccaacgcaaacccaaacgcaaaccccaaugcaaacccaaaugcaaaccccaacgcaaaucccaacgcaaaucccaacgccaauccaaaugcaaacccuaacgcaaacccaaacgccaacccaaacgcaaacccaaacgcaaacccgaacgcaaacccaaacgcaaacccaaacgcaaauccaaacgcaaacccaaaugcaaauccaaaugcaaauccaaaugcaaacccaaacgcaaacccaaaugcaaacccaaaugcaaacccaaacaaaaacaaucaaggaaacggacaaggacacaacaugccaaacgacccaaacagaaacgucgacgaaaaugcaaacgcaaacaacgcaguaaaaaacaauaacaacgaagaaccaucagauaaacauauagaacaauacuuaaaaaaaauacaaaacucgcuaucaacagaauggucaccaugcuccguaacaugcggaaacggcauacaaguacgaauaaaaccaggaucagcagacaaaccaaaagaucaacuagauuaugaaaacgauauagaaaaaaaaauauguaaaauggaaaaauguagcucaguauucaacguaguaaacagcucaauaggacuuauaaugguacuaucauuccucuuccuaaacuaa

SEQ ID NO: 5351 - RNA, 1299 nt, Artificial Sequence
  derived and/or modified CDS sequence (opt6) from Pf(PVS20)__BAN59429.1__CSP
augaugaggaaauuagcaauucucucaguaucaaguuuccuauucguagaagcacuauuucaagaauaccaaugcuacggaucaucaucaaacacaagaguauuaaacgaacucaacuaugacaacgccggaacaaaccuauacaacgaacuagaaaugaacuacuauggaaaacaagaaaacugguacagucuaaaaaaaaacucacgaucacuuggagaaaacgaugacggaaacaacaacaauggagauaacggaagagaaggaaaagacgaagauaaaagagacggaaacaacgaagacaacgaaaaacuaagaaaacccaaacacaaaaaacuuaaacaaccaggagacggaaacccagauccaaaugcaaacccaaauguagacccaaacgcaaauccaaacguagauccaaacgcaaauccaaacguagauccaaacgcaaacccaaacgcaaauccaaacgcaaauccaaacgccaauccaaaugcaaacccaaacgcaaaccccaacgcgaauccaaaugcaaacccaaacgcuaauccaaaugcaaacccaaacgcaaacccaaaugccaacccaaaugcuaaccccaacgcaaacccaaacgcaaacccuaaugcaaauccaaacgccaacccaaacgcaaacccaaacgcaaauccaaacgcaaacccaaacgcaaaucccaacgcaaacccaaacgcaaacccaaacgcaaacccaaacgcaaacccaaacgccaacccgaacgcuaauccaaaugcaaacccaaacgccaacccaaacgccaacccaaacgcaaacccaaaugcaaacccaaaugcaaacccuaacgcaaauccaaacgccaauccaaacgccaacccaaacgcuaacccaaaugcaaacccaaacgcaaacccaaacgcaaauccaaacaaaaacaaccaagguaacggacaaggccacaacaugccaaaugacccaaacagaaacguagacgaaaacgcaaacgcaaacaacgcaguaaaaaacaacaacaaugaagaaccaucagauaaacacauagaacaauaccuaaaaaaaauccaaaacucacuaucaacugaauggucaccaugcucaguaacaugcggaaacggcauacaaguuagaauaaaaccaggaucggcaaacaaaccaaaagacgaacuagacuacgaaaacgacauagaaaaaaaaauaugcaaaauggaaaaauguucaucaguuuucaacguaguaaacagcucaauaggauuaauaaugguacuaucauuccuuuucuuaaacuaa

SEQ ID NO: 5352 - RNA, 1299 nt, Artificial Sequence
  derived and/or modified CDS sequence (opt6) from Pf(Sol95-241)__BAM85085.1__CSP
augaugcggaaauuagcaauacuauccguauccucauucuuauucguugaagccuuauuccaagaauaccaaugcuacggaagcucaagcaauacaagaguauuaaacgaauuaaauuacgacaacgcaggaacaaaccuauacaacgaacuagaaaugaacuacuacggaaaacaagaaaauugguacagccuaaaaaaaaacucgagaucgcuaggcgaaaaugacgacggaaacaacaacaacggagacaauggaagagaaggaaaagaugaagauaaacgagauggaaacaacgaagacaaugaaaaauuacgaaaaccaaaacauaaaaaauuaaaacaaccuggagacggaaacccagacccaaacgcaaauccaaauguagacccaaaugcaaacccaaacguagacccaaacgcaaacccaaacgucgacccgaacgcaaaccccaacguagauccaaacgcaaauccaaacgcaaauccaaacgcaaacccaaacgcaaacccaaaugccaacccgaacgcaaaccccaacgcaaacccaaacgcaaauccaaacgcaaacccaaacgcaaacccaaacgcaaacccaaacgcgaacccaaacgccaacccaaacgcgaacccaaaugcaaacccaaacgcaaauccaaacgcaaacccaaacgcaaacccaaacgcaaauccaaacgcaaacccaaacgcaaacccaaacgcaaaccccaacgcuaacccaaacgcuaacccaaaugcaaacccaaacgcaaacccaaacgcaaacccaaacgcaaacccaaacgcaaacccaaacgcaaacccaaacgcaaacccaaacgcaaacccaaacgcgaacccaaacgcaaacccaaacgcaaacccaaacgcaaacccaaacgcaaauccaaacgcaaacccaaacaaaaauaaccaaggaaacggccaaggucacaacaugccaaacgacccaaaccgaaacguagacgaaaaugcaaaugccaacaaugcaguaaaaaacaacaacaaugaagaaccaucagacaaacacauagaacaauacuuaaaaaaaauacaaaauucacucucaacagaauggucaccaugcucaguaaccugcggaaacggcauacaaguaagaauaaaacccggaucugcaaacaaaccaaaagacgaacuugacuacgaaaaugacauagaaaaaaaaauauguaaaauggaaaaaugcagcucagucuucaacguaguaaacaguucuauaggccuaauaaugguauuaucauucuuauuucuuaacuaa

SEQ ID NO: 5353 - RNA, 1299 nt, Artificial Sequence
  derived and/or modified CDS sequence (opt6) from Pf(TiMS95-198)__BAM84895.1__CSP
augaugagaaaacuggcuauacuauccguaucaagcuuccuauucguagaagcccuauuucaagaauaccaaugcuauggaucaucaucaaacacaagaguacuaaacgaacuuaacuacgacaacgcaggaacaaaccuauacaacgaauuagaaaugaacuacuacggaaaacaagaaaacugguacucauuaaaaaaaaacucgagaucacuaggcgaaaacgaugauggaaacaacaacaacggagacaacggaagagaaggaaaagacgaagacaaacgagacggaaacaaugaagacaaugaaaaacuacgaaaaccaaaacauaaaaaacucaaacaaccaggagacggaaauccagaccccaacgccaauccaaacguagacccaaacgcaaacccaaacguagaccccaacgcaaaccccaauguagauccaaacgcgaacccaaaugcaaacccaaacgcaaacccaaacgccaauccaaacgcaaaccccaaugcaaauccaaacgcaaacccaaacgcaaauccaaacgcaaacccaaacgcaaacccaaacgcuaacccaaacgcaaacccaaacgcaaacccaaacgcaaacccaaacgcaaacccaaacgcaaauccuaacgcaaacccaaacgcaaacccaaacgcaaacccaaacgcaaacccaaaugcaaacccaaacgcaaacccuaacgcaaaucccaaugccaacccaaacgcaaacccaaacgcaaauccaaacgcaaacccuaaugcaaacccuaacgccaacccaaacgcaaacccaaacgcaaacccaaacgcaaacccaaaugcaaaccccaacgcaaacccaaacgcaaacccaaacgccaacccaaacgcaaacccaaacgcaaauccaaacgccaaccccaacgcaaaccccaacaaaaacaaucaaggcaacggccaaggacacaauaugccaaacgacccaaaccgaaacguugacgaaaaugcaaacgcaaacaacgcaguaaaaaauaacaauaacgaagaaccaucagacaaacacauagaacaauaucuaaaaaacauacaaaacucccuaucaaccgaauggucaccauguaguguaacaugcggaaacgguauacaaguaagaauaaaaccaggaucggcaaacaaaccaaaagacgaacuagacuacgaaaacgacauagaaaaaaaaauaugcaaaauggaaaaauguuccucuguauucaauguaguaaacagcucaauaggacuaauaaugguauuaucauuucuauucuuaaauuaa

SEQ ID NO: 5354 - RNA, 1296 nt, Artificial Sequence
  derived and/or modified CDS sequence (opt6) from Pf(D164)__ACO49368.1__CSP
augagaaaacuagcuauccucucaguauccuccuuccuauucguagaagcacuauuccaggaauaccaaugcuacggaucaucuagcaauaccagaguccuaaacgaacuaaacuaugauaacgcaggaaccaaucuauacaacgaacuagaaaugaauuacuacggaaaacaagaaaauugguacucacuaaaaaaaaacucaagaucauuaggagaaaacgacgauggcaacaacaacaacggagacaacggaagagaaggaaaagacgaagauaaaagagacggaaacaacgaagacaacgaaaaacuucgaaaaccaaaacacaaaaaauuaaaacaaccaggagauggaaacccagacccaaacgcaaauccaaacguagaccccaacgcaaacccaaauguagacccaaaugcaaacccaaauguagauccaaaugcaaacccaaacguagacccaaacgcaaacccaaacgcaaacccaaaugcaaauccaaacgccaacccaaacgccaacccaaaugccaauccaaacgccaauccaaacgcaaacccaaacgcaaauccaaaugcaaaucccaacgcaaauccaaacgcaaacccaaacgcaaacccaaacgcaaacccaaacgcaaaccccaaugcaaauccaaacgcaaacccaaacgcaaauccaaacgcaaauccaaacgcaaauccaaacgcaaacccaaacgcaaacccaaacgccaauccaaacgcaaacccuaaugcaaaccccaacgcaaacccaaacgcaaaccccaaugcaaacccaaaugcaaacccaaacgcaaauccaaacgccaaucccaacgcaaacccaaacgccaauccaaacgcaaacccaaacgcaaaccccaacgcaaacccaaacgcaaauccaaacgccaacccaaacaaaaauaaccaaggaaacggccaaggacacaacaugccaaacgacccaaacagaaacgucgacgaaaacgcaaaugcaaacaacgcaguaaaaaacaacaacaacgaagaaccaucagacaaacacauagaacaauaccuaaaaaaaauacaaaacucacuaucaacagaauggucaccaugcucaguaaccugcggaaacggcauacaagucagaauaaaaccaggaucagcuaacaaaccaaaagaugaauuagacuacgaaaacgacauagaaaaaaaaaucugcaaaauggaaaaaugcucaucagucuuuaacgucgucaacagcucaauaggccuaauaauggugcuaucauucuuauuuuuaaacuaa

SEQ ID NO: 5355 - RNA, 1296 nt, Artificial Sequence
  derived and/or modified CDS sequence (opt6) from Pf(E28)__ACO49378.1__CSP
augagaaaacuagcaauacuuucaguauccagcuuccuauucguagaagcccuauuccaagaauaccaaugcuacggcucuucaagcaauacaaggguccuaaacgaacuaaacuacgacaacgcagguacaaaccuauauaaugaacuagaaaugaauuauuacggaaaacaagaaaauugguauagcuuaaaaaaaaauucaagaucacuaggagaaaacgacgacggaaacaacaacaacggagacaacggacgagaaggaaaagaugaagacaaaagagacggaaacaacgaagacaacgaaaaacuaagaaaaccaaaacacaaaaaacuaaaacaaccaggugacggaaaccccgaccccaaugcaaacccuaauguagacccaaacgcaaacccaaacgucgacccaaaugccaacccaaauguagauccaaacgccaacccaaacgccaauccaaacgcaaacccaaaugccaacccaaacgcgaauccaaacgcaaauccaaacgccaauccaaacgcuaauccaaaugcaaaccccaacgcaaacccaaacgcaaacccaaacgcaaacccaaacgcaaauccaaacgcaaacccaaacgcaaacccaaacgcaaacccaaacgcaaaccccaaugcaaaccccaaugcaaacccaaacgcuaacccaaacgccaacccaaacgcaaauccaaacgcaaacccaaacgcaaacccaaacgcaaacccaaacgcaaacccaaacgcaaacccuaacgcaaauccaaaugcaaaccccaacgcaaacccaaacgcaaacccuaaugcaaauccaaacgcaaacccaaacgcaaacccaaacgcuaauccaaaugcaaacccaaacgcaaauccaaacgcaaacccaaacgcaaauccaaacgcaaacccaaacaaaaacaaccaaggaaauggacaaggccauaacaugccaaaugacccaaaccguaacguugacgaaaacgcaaacgccaacaaugccguaaaaaauaacaacaaugaagaaccaucagacaaacacauagaacaauaccuaaaaaacauacaaaacucacuaucaacugaauggucaccaugcucaguaaccugcggaaacggaauccaaguacgcaucaaaccaggaucagccaacaaaccaaaagaugaacuagacuacgaaaacgauauagaaaaaaaaauaugcaaaauggaaaaaugcuccucaguauucaacguaguaaacagcucaauaggccucauaaugguauuaucauuuuuauucuuaaacuaa

SEQ ID NO: 5356 - RNA, 1296 nt, Artificial Sequence
  derived and/or modified CDS sequence (opt6) from Pf(TM121)__ACO49457.1__CSP
augagaaaacucgcaauacuaucaguaucauccuuccucuuuguagaagcauuauuccaagaauaccaauguuacggaaguucaucaaacaccagaguauuaaaugaacuuaacuaugacaaugcaggaacaaacuuauacaacgaauuagaaaugaauuacuacggaaaacaagaaaauugguauucauuaaaaaaaaacucacgaucacuaggagaaaacgacgacggaaacaauaacaacggagacaacggaagagaaggaaaagacgaagacaaaagagauggcaacaacgaagauaacgaaaaacuaagaaaacccaaacauaaaaaauuaaaacaacccggagacggaaauccagacccaaacgcaaacccaaauguagacccaaaugcaaauccaaacguagacccaaaugcaaacccaaauguagacccaaacgcaaacccaaacgccaacccaaacgcaaacccaaacgcgaacccaaacgcaaauccaaaugcaaacccaaacgcaaacccaaacgcaaacccaaacgcgaacccaaacgcaaacccgaacgcaaauccaaacgcaaacccaaacgcaaauccaaacgcgaacccaaacgcaaaccccaacgcaaauccaaacgcaaaccccaacgcaaacccaaaugcaaacccaaacgcaaacccaaaugcaaauccaaaugccaacccaaaugcaaacccaaacgcaaacccaaacgccaaccccaacgcaaacccaaacgcaaacccaaacgcaaacccaaacgcaaacccaaacgcaaacccaaacgcaaacccaaacgcaaacccaaacgcaaacccaaaugcaaaccccaacgcaaauccaaacgcaaacccaaacgcaaacccaaaugcaaacccaaacgcaaacccaaaugcaaacccaaacaaaaauaaccaaggaaacggacaaggacauaacaugccaaacgauccaaacagaaacgucgaugaaaacgcuaacgcaaacaaugacguaaaaaacaacaauaaugaagaacccucagacaaacacauagaacaauacuuaaaaaaaauacaauacucauuauccacagaguggucaccaugcucaguaacaugcggcaacggaauacaaguccgaauuaaaccaggaucagcaaacaaaccaaaagacgaacuagacuaugaaaacgacauagaaaaaaaaauaugcaaaauggaaaaaugcuccucagucuucaacguagucaacucaucuauaggacuaauuaugguacuaucauucuuauuucuaaacuaa

SEQ ID NO: 5357 - RNA, 1296 nt, Artificial Sequence
  derived and/or modified CDS sequence (opt6) from Pf(TM176)__ACO49467.1__CSP
augagaaaauuagccauacuaucaguaucaucauuccuauucguugaagcacuauuccaagaauaccaaugcuauggaucauccaguaacaccagaguauuaaacgaacuaaacuaugacaacgcaggaaccaacuuauacaacgaauuagaaaugaacuacuacggaaaacaagaaaacugguauucccuaaaaaaaaacucaagaucccuaggagaaaacgacgacggcaauaacaacaacggagacaacggaagagaaggaaaagaugaagacaaaagagauggaaacaacgaagacaacgaaaaacuacgaaaaccaaaacacaaaaaacucaaacaaccaggagacggaaacccagauccaaacgcaaaucccaacguagauccaaacgcaaacccaaauguugaccccaaugcaaauccaaauguagacccaaacgccaacccaaacgcaaacccaaacgcaaaccccaacgcaaacccaaacgcaaaccccaaugcaaacccaaacgccaacccaaaugcaaacccaaacgccaacccaaacgcaaacccaaacgcaaacccaaacgcaaaccccaacgccaauccaaaugcaaauccaaacgcaaacccaaacgcaaacccaaacgcaaacccaaacgcaaacccaaacgcaaacccaaacgccaacccaaacgcaaacccuaaugcaaauccaaacgcaaacccaaacgcaaacccaaacgcaaacccaaaugcaaaccccaacgcaaaccccaacgcaaaccccaacgcaaaccccaacgcaaaccccaacgcaaacccaaaugcaaacccaaacgcaaacccaaacgcaaauccaaacgcaaauccaaaugcaaaccccaaugcaaaccccaacgcaaacccaaacgccaacccuaacgcaaacccaaacaaaaacaaccaaggaaacggacaaggacauaacaugccaaaugacccaaaccgcaacguagaugaaaacgccaacgcaaacaacgauguaaaaaacaacaacaacgaagaaccaucagauaaacacauugaacaguaccuaaaaaaaauacaauacucacuaagcacagaauggucacccugcaguguuacuuguggaaacggaauacaaguacguauaaaaccaggauccgcagacaaaccaaaagaccaacuagacuacgaaaacgacaucgaaaaaaaaauaugcaaaauggaaaaaugcucaucagucuucaaugucguaaacucaucaauaggacuuauaaugguacuaucauuucuauucuuaaacuaa

SEQ ID NO: 5358 - RNA, 1296 nt, Artificial Sequence
  derived and/or modified CDS sequence (opt6) from Pf(TSY650)__ACO49541.1__CSP
augagaaaacucgcaauacuuucagucucaucauuccucuucguagaagcacuauuucaagaauaccaaugcuaugggucaucaaguaacacaagaguauuaaacgaacuuaacuaugacaaugccggaacaaaucuauacaacgaauuagaaaugaacuacuacggaaaacaagaaaacugguauucccuaaaaaaaaacucacgaucacuuggggaaaacgacgacggaaauaacaacaacggagacaacggaagagaaggaaaagacgaagacaaaagagacggaaauaacgaagacaacgaaaaacuaagaaaaccaaaacacaaaaaacuaaaacaaccaggagacgguaauccagacccaaacgcaaacccaaauguagacccaaacgcaaacccaaacguagacccaaacgcaaacccaaauguagacccaaacgcaaacccaaacgcaaacccaaaugcaaauccaaaugcaaacccaaaugcaaacccaaacgccaacccaaaugcaaacccaaacgcaaaccccaaugcuaacccuaaugcaaacccaaaugcaaacccaaacgcaaacccaaacgcaaauccaaacgccaacccaaacgcaaacccaaacgcuaacccaaacgcaaacccaaacgcaaacccaaacgcaaauccaaaugcaaacccaaacgcuaacccaaacgcgaacccaaacgcaaacccaaaugcaaaucccaacgcaaaccccaacgcaaauccaaacgcaaauccaaacgcaaauccaaacgcaaauccaaaugcaaacccaaaugcaaauccaaacgcaaacccaaacgcaaacccaaacgcaaacccaaaugcaaacccaaacgccaacccaaacgcaaacccaaacgcaaacccaaacgcaaacccuaacgcaaacccaaauaaaaacaaccaaggaaacggacaaggacacaacaugcccaaugacccaaaccgaaaugucgacgaaaacgcaaacgcaaacaacgcaguuaaaaacaacaacaaugaagaaccaucagacaaacacauagaacaauaccuaaaaaaaauacaaaacucauuauccacagaauggucaccaugcucaguaacaugcggaaacggaauacaaguaagaauaaaaccuggcucagcaaacaaaccaaaagacgaacuagauuacgaaaacgacauagaaaaaaaaauaugcaaaauggaaaaauguucauccguauuuaacguaguuaacaguucaauaggacuaauaauggugcuauccuuccuauuuuuaaacuaa

SEQ ID NO: 5359 - RNA, 1296 nt, Artificial Sequence
  derived and/or modified CDS sequence (opt6) from Pf(TSY682)__ACO49544.1__CSP
augagaaaacuagccauacuaagcguaucaucauuccuauucguagaagcacuauuccaagaauaccaaugcuacggcagcuccaguaacacacgaguauuaaacgaacuaaacuaugacaacgcaggaacaaaccuuuauaacgaacuagaaaugaauuacuacggaaaacaagaaaacugguauagccuaaaaaaaaauucacgaucacucggagaaaacgacgacggaaacaacaacaacggagacaacgguagagaaggaaaagacgaagacaaaagagacggaaauaacgaagacaacgaaaaacuccgaaaaccaaaacacaaaaaacuaaaacaaccaggagacggaaacccugauccaaacgcaaacccaaacguagacccaaaugcuaacccaaacguagacccaaaugcaaacccaaacguagacccaaacgcaaauccaaacgcaaacccaaacgcaaacccaaaugcaaacccaaacgcgaauccgaacgcaaacccaaaugcaaauccaaacgcaaauccaaaugcaaacccaaacgcaaacccaaacgccaacccaaacgcaaauccaaacgcaaauccaaacgcaaacccaaacgcaaacccaaacgccaauccaaacgcaaacccaaacgccaacccaaacgcaaacccaaacgcuaacccaaaugcaaacccaaacgcaaacccaaaugcaaacccaaacgccaacccaaacgcaaacccgaacgccaacccaaacgcaaacccgaacgcaaacccaaacgcaaaccccaacgcaaacccaaacgcaaacccaaacgcaaauccaaacgcaaaccccaaugccaacccaaacgcaaauccaaacgcaaacccaaacgcaaauccuaacgcaaauccaaacgcaaacccaaacgcaaacccaaauaaaaacaaucaaggaaacggacaaggacacaacaugcccaacgacccaaaccgaaauguagaugaaaacgcaaacgcaaauaacgacguaaaaaacaacaauaacgaagaaccauccgauaaacacauagaagaauacuuaaaaaaaauucaaaacucccuuucaacugaauggucaccaugcagcguaacaugcggcaauggaauacaaguaagaauaaaaccgggaucagccaacaaaccaaaagacgaacucaacuacgaaaaugacauagaaaaaaaaauauguaaaauggaaaaaugcucaucagucuuuaacguaguaaauucaucaauaggacucauaaugguacuaucauuccuauuccuaaacuaa

SEQ ID NO: 5360 - RNA, 1287 nt, Artificial Sequence
  derived and/or modified CDS sequence (opt6) from Pf(India)__AAN87575.1__CSP
augaugcgaaaacuagcaauauuaucaguuucaucauucuuauucguagaagcccuauuccaagaauaccaaugcuauggcucaucaagcaacaccagaguccuaaaugaacuaaacuacgacaaugcaggaaccaacuuauacaaugaacuagaaaugaacuauuacggaaaacaggaaaacugguauaguuuaaaaaaaaacucaagaucacucggagaaaaugacgacggaaacaacaacaacggagauaacgguagagaaggaaaagacgaagacaaaagagacggcaacaacgaagacaacgaaaaacuccguaaaccaaaacacaaaaaacuaaaacaaccaggagauggaaacccagacccaaaugcuaacccaaacguagauccaaacgcaaacccaaacguagacccaaacgcuaaccccaacgcaaacccaaacgccaaccccaaugccaacccaaacgcaaacccaaacgcuaacccaaacgcaaauccaaacgcaaaccccaacgcaaacccaaacgcaaaccccaacgcaaacccaaacgcaaacccaaacgcaaauccaaacgcgaacccaaacgcaaauccaaacgcaaacccaaacgcaaacccaaacgcaaacccaaacgcaaacccaaacgcaaauccaaacgcaaacccaaaugcaaauccaaacgcaaauccaaaugcgaaccccaacgcaaacccaaacgccaacccaaaugcaaacccaaacgcaaacccaaacgcaaauccaaacgcaaacccaaaugcaaacccaaacgcaaacccuaaugcaaacccaaaugcaaacccaaacgcaaacccaaacgcaaacccaaacgcaaacccaaacgcaaacccaaacgcaaacccaaaugcaaacccaaacgccaauccaaauaaaaacaaccaaggaaacggacgaggucacaacaugccaaacgaccccaacagaaaugucgacgaaaacgcaaacgccaacaacgauguaaaaaacaacaacaacgaagaaccaucagauaaacacauagaagaauaucuaaaaaaaauacaaaauucccuauccacagaauggucacccugcagcguaacauguggaaacggcauacaaguaagaauaaaaccaggaucagcaaacaaaccaaaagacgaacuaaacuacgaaaaugacauagaaaaaaaaauauguaaaauggaaaaauguuccucaguauuuaacguaguuaauucaucaauaggacucauuaugguacuaucauuccucuuccuaaacuaa

SEQ ID NO: 5361 - RNA, 1287 nt, Artificial Sequence
  derived and/or modified CDS sequence (opt6) from Pf(Pal97-082)__BAM84946.1__CSP
augaugagaaaacucgcaauacucucaguaucaucauucuuauucguagaagcauuauuccaagaauaccaaugcuacggaucaucaucaaacacaagaguccuaaacgaacuaaauuacgacaacgcaggcacaaacuuauacaacgaacuagaaaugaacuacuacggaaaacaagaaaacugguauucacuaaaaaaaaauucaagaucacuaggagaaaacgacgacggaaauaacaacaauggagacaacggccgagaaggaaaagaugaagacaaaagagacggaaacaacgaagacaacgaaaaacuaagaaaaccaaaacacaaaaaauuaaaacaaccaggagacgggaaccccgacccaaacgcaaacccaaacgucgaccccaaugcaaacccaaacguagacccaaaugcaaauccaaacguagacccaaacgcaaaccccaacgcaaacccaaacgcaaauccaaaugcaaacccaaacgcaaacccaaacgcaaacccaaacgcuaacccaaacgcaaacccaaacgcaaacccaaacgcaaacccuaaugcaaauccaaacgcaaauccaaaugcaaauccaaacgcaaacccaaacgcaaauccaaacgcaaacccaaacgccaacccaaacgcaaacccaaacgcaaauccaaacgucgacccaaaugcaaaccccaacgcaaaccccaacgcaaaccccaacgcaaauccaaaugcuaacccaaacgcaaacccaaacgcaaauccaaacgcaaauccaaacgcaaacccaaacgcaaacccaaacgcaaacccaaacgcaaacccaaacgcaaacccaaaugcaaacccaaaugcaaaccccaacgccaauccaaacgcaaauccaaacgcaaauccaaaugcaaacccaaacaaaaacaaccaaggaaacggacaaggacauaacaugccaaaugacccaaacagaaaugucgacgaaaacgcaaacgcaaacaaugccgucaaaaacaacaacaacgaagaaccaucagauaaacauauagaacaauaccuaaaaaaaauacaaaacucacucucaacagaauggucaccaugcucugucaccugcggaaauggaauacaaguaagaauaaaaccaggaucagcaggcaaaucaaaagaugaacuagacuacgaaaaugacauagaaaaaaaaauauguaaaauggaaaaaugcucaagcgucuucaauguaguuaacucaucaauaggacuaauaaugguauuauccuuucuauuucuaaacuaa

SEQ ID NO: 5362 - RNA, 1287 nt, Artificial Sequence
  derived and/or modified CDS sequence (opt6) from Pf(Pal97-084)__BAM84947.1__CSP
augaugagaaaauuagcaauacuauccgucucaucauuccucuucgucgaagcccuauuccaagaauaccaauguuacggaagcucaagcaacacacgcguccuaaacgaacuaaacuacgauaacgcaggaacgaaccuauauaacgaauuagaaaugaauuacuauggaaaacaagaaaacugguacagucuaaaaaaaaacucaagaucacuaggcgaaaacgaugacggcaacaauaacaacggagauaacggaagagaaggaaaagacgaagacaaaagagacggaaacaacgaagauaaugaaaaacuaagaaaaccaaaacacaaaaaacuaaaacaaccaggagacggaaacccagacccaaaugcaaauccgaacguagacccaaacgccaacccaaacguagacccaaacgcaaacccaaacguagauccaaacgcaaacccaaacgcaaacccaaacgcuaaucccaacgcaaacccaaaugcaaacccaaaugcaaacccaaaugcaaauccaaacgcaaacccaaacgcaaacccaaacgcaaacccaaaugcaaauccaaacgcgaaccccaacgcaaauccaaacgcaaacccaaacgccaacccaaacgcaaaccccaacgcaaauccaaacgcaaacccaaacgcaaacccaaacgcaaaucccaacgcaaacccaaacgcaaaccccaacgcaaauccaaacgcaaaccccaacgcaaauccaaaugcaaacccaaaugcaaaucccaacgcaaacccaaacgcaaauccaaaugcaaaccccaacgcaaacccaaacgcaaaccccaacgccaauccaaacgcaaaccccaacgccaacccaaaugcaaacccaaacgccaauccuaacgcaaacccaaacgcaaauccaaacaaaaacaaccaaggcaacggacaaggacauaacaugccaaaugacccaaauagaaacgucgacgaaaacgcaaaugccaacaacgcaguaaaaaauaacaacaacgaagaaccauccgaccaacacauagaaaaauaccuaaaaauaauucaaaacucacuaucaacagaauggucaccaugcagcguaacaugcggaaacggcauacaaguacgaauaaaaccaggcucagccgacaaacccaaagaucaacucgacuaugccaacgauauagaaaaaaaaaucugcaaaauggaaaaaugcucuucaguauucaauguuguaaacuccucgauaggacucauaaugguauuaucauuucucuuccuaaauuaa

SEQ ID NO: 5363 - RNA, 1287 nt, Artificial Sequence
  derived and/or modified CDS sequence (opt6) from Pf(PFS54)__BAN59412.1__CSP
augaugagaaaacuagcuauacucucaguaucauccuuuuuauucgucgaagcucuauuccaagaauaccaaugcuauggaucaucaagcaacaccagaguacuaaaugaacuaaacuacgacaacgcaggaacaaacuuauacaacgaacuagaaaugaacuacuaugguaaacaagaaaacugguacagcuuaaaaaaaaauucacguucacuaggagaaaacgacgacggaaacaacaacaacggagacaacggacgagaaggaaaagacgaagacaaaagagauggaaauaacgaagacaacgaaaaacuaagaaaaccaaaacacaaaaaacuaaaacaacccggagacgacaacccagacccaaacgcaaacccaaauguagauccaaacgcaaacccaaacguagauccaaacgcaaacccaaacgcaaacccaaaugcaaaccccaacgcaaacccaaacgcaaacccaaacgcaaaccccaacgcaaauccaaacgcaaauccaaacgcaaacccaaacgcaaauccaaaugcaaacccaaacgcaaacccaaacgcaaacccaaacgcaaaccccaacguagacccaaacgcaaacccaaacgccaacccaaaugcaaacccaaacgcaaauccaaacgcaaauccaaacgcaaaccccaacgcaaacccaaacgcaaacccaaaugcaaacccaaacgcaaacccaaaugcaaacccaaacgcaaacccaaacgcaaacccaaaugcaaauccaaacgccaacccaaacgccaaucccaacgcaaacccaaaugccaacccaaacgcaaacccaaacgcaaacccaaacgcaaaccccaacgcaaauccaaacgccaauccaaaugcaaacccaaaugcaaacccaaacgcaaacccaaacaaaaauaaccaaggaaacggccaaggucacaacaugccaaacgacccaaacagaaacguagacgaaaacgcaaaugcaaacaacgcaguuaaaaacaacaacaacgaagaaccaucagacaaacacauagaacaauaccuaaaaaaaauacaauacucacuuucaacagaauggucacccugcucaguaacaugcggcaauggaauccaaguccgaauaaaaccaggauccgccgacaaaccaaaagaccaacuagacuaugaaaaugacauagaaaaaaaaauaugcaaaauggaaaaauguucaucaguauucaacguaguaaacagcucgaucggcuuaauaaugguacucucuuucuuauucuuaaacuaa

SEQ ID NO: 5364 - RNA, 1287 nt, Artificial Sequence
  derived and/or modified CDS sequence (opt6) from Pf(PFS79)__BAN59422.1__CSP
augaugagaaaacuagcaauauuaucaguaucaagcuuccuauucgucgaagcauuauuucaagaauaccaauguuacggcagcucaucaaacacaagaguauuaaaugaacuaaacuacgacaacgcaggaacaaacuuauauaacgaacuagaaaugaacuacuacggaaaacaagaaaacugguacucccuaaaaaaaaauucaagaucauuaggagaaaacgacgacggaaauaacaauaacggggacaauggaagagaaggaaaagacgaagacaaaagagacggcaacaacgaagacaacgaaaaauuacgaaaaccaaaacauaaaaaacuaaaacaaccaggagauggaaacccagacccaaacgcaaaucccaacguagacccaaacgcaaauccaaacguagauccaaacgcaaacccaaacguagacccuaacgcaaauccaaacgcaaacccaaacgcaaacccaaaugcgaacccaaacgcaaacccuaacgcaaaccccaacgccaacccaaaugccaaccccaacgcaaacccaaacgcaaacccuaacgcaaacccaaacgcaaacccaaacgcaaacccgaacgcaaacccaaacgcaaauccaaacgcaaacccaaaugccaauccaaacgcaaacccaaacgcaaauccaaacgcaaacccaaacgcaaacccaaaugcaaauccaaacgcaaaucccaaugcaaacccaaacgccaaccccaacgccaacccaaacgcaaacccaaacgcaaacccaaacgcaaacccaaacgcgaacccaaacgcaaauccaaacgcaaacccaaacgcaaacccaaaugcaaauccaaacgcaaaccccaacgccaacccaaacgcaaacccaaacgcaaacccuaacgccaacccaaacaagaacaaccaaggaaacggacaaggacauaacaugccaaacgacccaaacagaaacguagacgaaaaugccaaugcaaacaaugcaguaaaaaacaauaacaacgaagaacccucagacaaacacauagaacaauaccuaaaaaaaauucaaaacucauuaucaacagaauggucaccaugcucaguaaccugcggaaacggaauacaaguaagaauuaaaccaggaucagccaacaaaccaaaagacgaauuagauuacgaaaaugauauagaaaaaaaaauaugcaaaauggaaaaauguaguucaguauucaacguaguaaacaguucaaucggccuaauaaugguacuauccuuccuauuccugaacuaa

SEQ ID NO: 5365 - RNA, 1287 nt, Artificial Sequence
  derived and/or modified CDS sequence (opt6) from Pf(PFS83)__BAN59424.1__CSP
augaugagaaaacucgcuauauuaucaguaucaagcuucuuauucguagaagcccucuuucaggaauaccaauguuacggaucaucaucuaacaccagaguauuaaacgaauuaaacuacgacaacgcaggcacaaauuuauauaacgaacuagaaaugaauuauuacggaaaacaagaaaauugguacaguuuaaaaaaaaacucacgaucuuuaggagaaaacgacgacggcaacaacaacaacggagacaacggcagagaaggaaaagacgaagacaaaagagacggcaacaacgaagauaacgaaaaacuaagaaaaccaaaacacaaaaaacuaaaacaaccaggagacggaaauccugaccccaacgcaaacccaaacguagacccaaacgcaaacccaaacgucgauccaaaugcaaaccccaacguagacccaaacgcaaacccaaacguagacccaaacgcaaacccaaacgcaaacccaaacgcaaacccaaacgcaaauccaaacgcaaauccaaaugcaaacccaaacgcaaacccaaacgccaauccaaacgcaaacccaaacgcaaaucccaacgccaaccccaacgcaaauccaaacgcaaauccaaacgcaaacccaaaugcaaacccaaacgcaaacccaaacgcaaacccaaacgcaaauccaaaugcaaacccaaacgcaaacccaaaugcuaacccaaaugcaaaccccaacgcaaacccaaaugcaaacccaaacgcaaacccaaacgcaaacccaaaugcaaacccaaaugcaaacccaaaugcaaacccaaaugcaaaccccaacgccaacccaaacgccaaccccaacgcaaacccaaacgcaaaccccaacgcaaacccaaacgccaacccaaacgcaaauccaaauaaaaacaaccaaggaaauggacaaggacauaacaugccaaacgacccaaauagaaacguagacgaaaacgccaacgcuaacaaugcaguaaaaaacaauaacaacgaagaaccaucagacaaacacaucgaacaauaucuaaaaaaaauacaaaacucacuuucaacagaauggucacccuguucaguaaccugcggcaauggcauccaaguacgcauaaaaccaggcucagccaauaaaccaaaagacgaacucgacuacgaaaacgacauagaaaaaaaaauauguaaaauggaaaaaugcucauccguauucaacguagucaauucaucaauaggauuaauaaugguacuuucauucuuauuccuaaacuaa

SEQ ID NO: 5366 - RNA, 1287 nt, Artificial Sequence
  derived and/or modified CDS sequence (opt6) from Pf(TiMS95-112)__BAM84878.1__CSP
augaugagaaaacuagcaauacuaucaguaucuuccuuccuauucguagaagcauuauuccaagaauaccaaugcuacggaagcucaucaaacacucgaguccuaaaugaauuaaacuacgacaacgcagguacaaaucuauacaacgaauuagaaaugaacuauuacggcaaacaagaaaacugguacagccuaaaaaaaaacucaagaucacucggagaaaaugacgacggaaauaacaacaacggagacaacggaagagaagguaaagaugaagacaaaagagacggaaacaacgaagacaaugaaaaacuaagaaaaccaaaacacaaaaaauuaaaacaaccaggcgacggaaaccccgacccaaacgccaacccaaacgucgaccccaaugcaaacccaaacguagacccaaacgccaacccaaauguagacccaaacgcaaauccgaacgcaaacccaaacgcuaacccaaacgcaaacccaaacgcaaacccaaacgcaaacccaaacgcaaacccaaacgcaaaccccaaugccaacccaaacgcaaacccaaacgcaaacccaaacgcgaacccaaacgcaaacccaaaugcaaauccaaacgcgaacccaaacgcaaauccaaacgcaaauccaaacgcaaacccaaacgcaaacccaaaugcaaauccaaacgcaaacccaaacgcaaacccaaacgcaaacccaaaugcaaacccaaaugcaaacccaaacgcuaacccaaaugcaaaccccaaugcaaauccaaacgcaaacccuaaugcaaacccaaacgcaaaccccaacgcaaacccaaacgcgaacccaaaugcaaacccaaacgcaaacccaaacgcaaaccccaaugcaaaccccaacgcgaacccaaacgccaauccgaauaaaaacaaccaaggaaacggacaaggacacaacaugccaaacgacccaaaccgaaacgucgacgaaaacgcaaaugcaaacaacgauguuaaaaacaacaacaacgaagaaccuucugacaaacacauagaacaauauuuaaaaaaaauacaauacucacuaucaaccgaauggucacccuguagcguaacauguggaaacggaauacaaguaagaauaaaaccaggcucagcagauaaaccaaaagaccaauuagacuacgaaaaugacauugaaaaaaaaauaugcaaaauggaaaaaugcagcucaguauucaacguagucaacagcucaauaggacucauaaugguauuaucauuucuguuccugaacuaa

SEQ ID NO: 5367 - RNA, 1284 nt, Artificial Sequence
  derived and/or modified CDS sequence (opt6) from Pf(E103)__ACO49384.1__CSP
augagaaaacuagcaauacuaucaguaucaagcuuccucuucguagaagcauuauuucaagaauaucaauguuacggaagcuccucaaauacaagaguacucaacgaacuaaacuaugacaacgcaggaacaaaccuauacaacgaacuagaaaugaacuacuacggaaaacaagaaaauugguauagccuaaaaaaaaacucgcgaucacuaggagaaaacgacgacggaaacaacaacaauggagacaauggcagagaaggaaaagacgaagacaaaagagacggaaauaaugaagacaacgaaaaacuaagaaaaccaaaacacaaaaaacuaaaacaaccaggagauggaaacccagacccaaacgcaaacccaaacgucgauccaaacgcaaacccaaacguagaccccaacgcaaauccaaacguagacccaaacgcaaacccaaacgcaaacccuaacgcaaacccaaacgcaaauccaaacgcaaacccaaaugcaaacccaaacgccaacccaaacgcaaacccuaacgccaauccaaacgcgaacccaaaugcaaauccuaacgcaaacccaaacgcaaacccaaacgccaauccaaacgccaaucccaacgcaaacccaaacgcaaaucccaacgcaaauccaaacgcaaacccaaacgccaaucccaacgcaaacccaaacgcgaauccaaacgcaaacccaaaugcaaacccaaaugcaaaccccaacgcaaauccaaacgcaaaucccaaugcaaacccaaaugcaaacccaaacgcaaaccccaaugcaaacccaaacgcaaacccaaacgccaacccaaacgccaauccaaacgcaaauccaaacgcaaauccaaacgcaaauccaaacgcaaauccaaacgcaaacccaaacaaaaacaaccaaggcaacggacaaggacacaacaugccaaacgacccuaacagaaacguagacgaaaaugcaaacgcuaacaacgcaguaaaaaacaacaacaacgaagaacccucagacaaacacauagaacaauaucuaaaaaacauccaaaacucacuuucaacagaauggucaccaugcucaguaaccugcggcaacggaauacaaguaagaauaaaaccaggaucagccaacaaaccaaaagacgaacuagacuacgaaaacgacauagaaaaaaaaauaugcaaaauggaaaaaugcucauccguauucaacguaguaaauucaucaaucggacucauaaugguauuauccuuccuauuccuaaacuaa

SEQ ID NO: 5368 - RNA, 1284 nt, Artificial Sequence
  derived and/or modified CDS sequence (opt6) from Pf(TMS75)__ACO49490.1__CSP
augagaaaacucgcaauacuuucuguaucaucauucuuauucguagaagcacuuuuccaagaauaccaaugcuacggaucaucaucuaauaccagaguucuaaacgaacucaacuacgacaacgcaggaacaaaccuguacaacgaacuagaaaugaacuauuacggcaaacaagaaaauugguauucuuuaaaaaaaaacucaagaucacuaggagaaaacgacgacggaaacaacaacaacggcgacaacggucgagaaggaaaagacgaagacaaaagagacggaaacaacgaagacaacgaaaaacuacgcaaaccaaaacauaaaaaauuaaaacaaccaggagacgguaauccagauccaaacgcaaacccaaacguagauccaaacgcaaacccaaacguagacccaaacgcaaacccaaacguagacccaaacgcaaacccaaacgucgacccaaacgcaaauccuaacgcaaacccaaacgcaaaccccaacgcaaauccaaacgccaaccccaacgcaaacccaaaugcaaauccaaacgcaaacccaaacgccaaccccaacgcaaaccccaacgccaauccaaacgcaaaccccaaugccaauccaaacgcaaacccaaacgccaauccaaacgcaaacccaaaugcaaauccaaacgcaaacccaaacgcaaacccaaacgcaaauccaaacgcaaauccaaacgcaaacccaaacgcaaacccaaaugcaaauccaaacgcaaacccaaacgccaacccaaacgccaacccaaacgcaaacccaaaugcaaacccaaaugcuaauccaaacgcaaauccaaacgcaaauccaaacgcaaacccaaacgcaaacccaaacgcaaacccaaaugcaaacccaaaugcaaacccaaacaaaaacaaccaaggaaauggacaaggacacaacaugccaaaugaccccaacagaaacguagacgaaaacgcaaacgcaaacaacgcaguuaaaaacaacaauaaugaagagccaucagauaaacacaucgaacaauaccuaaaaaaaauacaaaacucacuaucaacagaauggucaccauguucagucaccugcggaaacggaauacaaguaagaauaaaaccaggcucagcaaacaaaccaaaagaugaacuugacuacgaaaacgacauagaaaaaaaaauaugcaaaauggaaaaaugcaguucaguauucaacguaguuaacagcucaauaggacuaauaaugguacuaucguuccucuuccuaaacuaa

SEQ ID NO: 5369 - RNA, 1284 nt, Artificial Sequence
  derived and/or modified CDS sequence (opt6) from Pf(TSY621)__ACO49538.1__CSP
augagaaaacuagcaauacuauccguaucaagcuuucuauucgucgaagccuuauuccaagaauaccaaugcuacggaucaucaaguaacacaagaguacucaacgaacucaacuacgacaacgcaggaacaaaccuauacaacgaauuagaaaugaacuacuauggaaaacaagaaaauugguacagccuaaaaaaaaauucaagaucauuaggagaaaacgaugacggaaacaacaacaacggagacaacggacgagaaggaaaagacgaagacaaaagagacggaaauaacgaagacaaugaaaaacuucguaaacccaaacacaaaaaacuaaaacaaccaggagacggaaaucccgacccaaaugcaaacccaaauguagacccgaacgcaaacccaaauguagacccaaacgcaaacccaaacguagacccaaacgcaaacccaaaugcuaacccaaacgcaaacccaaacgcaaauccaaaugcaaacccaaacgcaaacccaaacgcaaaccccaacgcaaacccaaacgcaaacccaaacgcaaacccaaaugcaaacccaaacgcaaaccccaacgcaaaccccaacgcaaacccaaacgcaaauccaaacgcaaacccaaaugcaaacccaaacgcaaacccaaaugcaaacccaaacgcaaauccaaaugcaaacccaaaugcuaacccaaacgcaaauccaaacgcaaacccuaacgcaaacccaaacgcaaauccaaacgcaaauccaaacgcaaacccaaacgcaaacccaaaugcaaacccaaacgcaaauccaaacgcaaacccaaacgcaaacccaaacgcaaacccaaaugcaaacccaaacgcaaauccaaaugcaaacccaaacgcaaaccccaacgcaaacccaaacaaaaacaaccaaggaaacggacaaggacacaauaugcccaacgacccaaacagaaacguagacgaaaacgccaacgccaauaaugacgucaagaauaacaacaacgaagaacccuccgacaaacacauagaacaauaccucaaaaaaauacaauacucacuuucaacagaaugguccccaugcucaguaacaugcggaaauggaauacaaguaagaauaaaaccaggauccgcagacaaaccaaaagaccaacuagacuacgaaaacgauauagaaaaaaaaauaugcaaaauggaaaaaugcagcagcguuuucaacguuguaaauagcucaauuggauuaauaaugguauuaucauuccucuuccuaaacuaa

SEQ ID NO: 5370 - RNA, 1284 nt, Artificial Sequence
  derived and/or modified CDS sequence (opt6) from Pf(TSY646)__ACO49540.1__CSP
augagaaaacuagcaauacuaucgguaucaucauuccuauucguagaagcacuauuucaagaauaccaauguuacggaagcucuucaaacacaagaguauuaaacgaacuaaacuacgacaacgcaggcacaaaccuauacaaugaacuagaaaugaacuacuauggcaaacaagaaaacugguacucccuaaaaaaaaauucaagaucacuaggggaaaacgaugacggaaacaauaacaacggagacaacggaagagaaggaaaagacgaagauaaaagagacggaaauaacgaagauaacgaaaaacucagaaaaccaaaacacaaaaaacuuaaacaaccaggagacggaaaucccgacccaaacgcuaacccaaacguagacccaaacgcaaacccaaacguagacccaaacgcaaacccaaacguagacccaaacgccaacccaaaugcaaacccaaacgccaacccaaacgcaaacccaaacgcaaauccaaacgcaaauccaaacgcaaacccaaacgcaaacccaaacgcaaacccaaacgcaaacccaaaugcaaacccaaaugcaaacccaaacgcaaauccaaacgcaaacccgaacgcaaaccccaacgcaaacccaaacgcaaacccaaacgcaaaucccaacgcaaacccuaacgccaacccaaacgcaaacccaaacgcaaacccaaacgcaaauccaaaugcaaauccaaacgcaaacccaaacgcgaacccaaaugcaaacccaaacgcaaacccaaacgcgaaccccaacgcaaacccaaaugcaaacccaaacgccaaccccaacgcaaacccaaacgcgaacccuaacgcaaacccaaaugcaaaccccaacgcaaacccaaacgcaaacccgaacgcaaacccaaacaaaaacaaucaagggaacggacaaggacacaacaugccaaaugacccaaaccgaaacgucgacgaaaacgcaaacgcaaacaacgcaguaaaaaacaacaacaaugaagaacccuccgacaaacacaucgaacaauaucuaaaaaaaauacaaaauucacuaucaacagaauggucaccaugcagcguaacaugugguaacggaauacaaguacgaauaaaaccaggaucagcaaacaaaccaaaagacgaacuagacuacgaaaacgauauagaaaaaaaaauaugcaaaauggaaaaauguuccucaguauucaauguaguaaacucaucaaucggauuaauaaugguacuaucauuccuauuccuaaacuaa

SEQ ID NO: 5371 - RNA, 1275 nt, Artificial Sequence
  derived and/or modified CDS sequence (opt6) from Pf(806)__AAA29562.1__CSP
augaugcgaaaacuagcaauccucucaguaucaucauuccuauuuguagaagcacuauuccaagaauaccaaugcuacggcucauccucaaacacaagaguacuaaacgaauuaaacuacgacaacgcaggcauaaaccuauacaacgaacuagaaaugaacuacuacggaaaacaagaaaauugguacucauuaaaaaagaacucaagaucacuaggagaaaacgacgacggaaacaacaacaacggagacaacggaagagaaggaaaagacgaagauaaacgagacggaaacaaugaagacaacgaaaaacuaagaaaaccaaaacauaaaaaacuaaaacaaccaggagacggaaacccagaccccaacgcaaaucccaauguagacccaaacgcaaauccaaacguagacccaaacgcaaauccaaacguagacccaaaugccaauccaaacgcaaacccaaacgcaaauccaaacgcaaacccaaacgcaaacccaaacgcuaacccaaacgcaaacccaaaugcaaauccaaaugccaacccaaacgcaaauccaaacgcaaacccaaacgcaaauccaaacgcaaacccaaacgccaacccaaacgcaaacccaaacgcgaacccaaacgcaaauccaaaugcaaacccaaacgccaauccaaaugcuaacccaaacgcaaauccaaacgcaaacccaaacgcaaaucccaaugcaaacccaaaugcaaacccaaacgcaaacccaaacgcaaacccaaacgccaaccccaaugcaaacccaaaugcaaacccaaacgcaaacccaaaugccaacccaaacgcaaacccaaaugcaaauccaaaugcaaauccuaacgccaauccaaacgcaaacccaaacgcaaaucccaacaaaaacaaccaaggcaacggacaaggacacaauaugccaaaugacccaaaccguaauguagacgaaaacgcaaacgcaaacaacgccgucaaaaacaacaacaacgaagaaccaucagacaaacacauagaacaauaccuaaaaaaaauacaaaauucccuaucaaccgaauggucaccaugcagcguaacuugcgguaacgguauccaaguacgaauaaaaccaggaucagcaaauaaaccaaaagacgaacuagacuacgaaaaugacauagaaaaaaaaauauguaaaauggaaaaauguaguucaguauucaacguaguaaacucaucuauaggccuaauaaugguacuaucauucuuauuuuuaaacuaa

SEQ ID NO: 5372 - RNA, 1275 nt, Artificial Sequence
  derived and/or modified CDS sequence (opt6) from Pf(Pal97-100)__BAM84952.1__CSP
augaugagaaaacuagcaauauuaucagucucuuccuuccuauucguagaagcacuauuucaagaauaccaauguuacggcucaucaucaaacacaagaguacuaaaugaacuaaacuacgacaaugcaggaacaaauuuauacaacgaauuagaaaugaauuacuacggaaaacaagaaaacugguacucacuaaaaaagaacucacguucacuaggagaaaacgacgacggaaacaacaacaacggagacaacggaagagaaggaaaagacgaagacaaacgugacggaaacaacgaagauaacgaaaaauuacgcaaacccaaacacaaaaaacuaaaacaaccaggagacggcaacccagacccaaacgcaaauccaaacgucgacccaaacgcaaauccaaauguagacccaaaugcaaacccaaacguugacccaaacgccaacccaaacgcaaacccaaaugcaaacccuaaugcaaaccccaacgccaacccaaacgcaaauccaaacgcaaacccaaaugcaaaucccaacgcaaauccaaaugcaaacccaaacgcaaacccaaacguagauccaaacgcaaauccaaacgcaaaccccaaugcaaaccccaaugcaaacccaaaugcaaauccaaacgcaaauccaaacgcaaacccaaacgcaaauccaaacgcaaacccaaaugcaaacccaaacgcaaauccaaacgccaacccaaacgcaaacccaaacgcaaacccaaacgcaaacccaaaugcuaacccaaacgcaaacccaaacgcaaacccaaacgcaaacccaaacgcaaacccaaacgcaaauccaaacgcaaacccaaacgcaaacccaaacgcaaacccaaacgcaaacccaaacgcaaacccaaacaaaaauaaccaaggaaacggacaaggacauaacaugccaaacgacccaaacagaaacguagacgaaaacgcuaacgcaaacaacgcaguaaaaaacaauaacaacgaagaaccaucagacaaacauauaacagaauauuuaaaaaaaauccaaaacucucuaucaacagaauggucacccugcucaguaacaugugguaacggaauccaaguacgaauaaaaccaggcucugcagggaaauccaaagacgaacuagacuacgaaaacgacauagaaaaaaaaauaugcaaaauggaaaaaugcuccucaguauuuaauguaguaaacagcucaauaggacuaauaaugguacuauccuuccuauuucuaaauuaa

SEQ ID NO: 5373 - RNA, 1275 nt, Artificial Sequence
  derived and/or modified CDS sequence (opt6) from Pf(PFS89)__BAN59425.1__CSP
augaugagaaaacuagcaauacucuccguaucaucauuccucuucguugaagcacuauuccaagaauaucaaugcuacggaucaucaagcaacacaagaguacuaaacgaauuaaacuacgauaacgcaggaacuaaucuauacaacgaacuagaaaugaacuacuacggaaaacaagaaaacugguacuccuuaaaaaaaaauucaagaucauuaggggaaaacgacgacggaaacaacaacaauggagauaauggucgagaaggaaaagaugaagauaaacgagacggaaauaacgaagacaaugaaaaacuacgcaaaccaaaacacaaaaaauuaaaacaaccaggagacggcaaccccgacccaaaugcaaacccgaacguagacccaaacgcaaacccaaacguagaucccaacgcaaaccccaacguagacccgaaugccaaccccaaugcaaacccaaacgcaaacccaaacgcaaacccaaacgcaaauccaaacgcaaauccaaacgcaaacccaaaugcaaacccaaacgcaaauccaaacgcaaacccaaacgccaaccccaacgcaaacccaaaugcaaauccaaacgcaaacccaaacgcaaauccuaacgcaaacccaaaugcaaacccaaacgccaacccaaacgcaaaccccaacgcaaacccaaacgcaaacccgaaugccaacccaaaugcaaacccaaacgcaaaccccaacgcaaacccaaacgcaaacccaaaugcaaacccaaaugcaaaccccaacgcaaacccaaaugcaaacccaaacgcaaaccccaacgcaaauccaaaugcaaacccaaacgcaaacccaaaugcaaacccaaacgcaaacccaaacgcaaauccaaacgcaaacccaaacaaaaacaaccaaggaaacggacaaggacacaacaugccaaacgaucccaauagaaauguagacgaaaacgcaaacgcaaacaacgcaguaaaaaauaauaacaacgaagaaccuucagacaaacacauagaacaauaucuaaaaaaaauacaaaacucacuaucaaccgaaugguccccaugcucaguaaccugcggcaacggaauacaaguaagaauaaaaccaggaucugccaacaaaccaaaagacgaacuagacuacgaaaacgacauagaaaaaaaaauaugcaaaauggaaaaaugcucaucagucuucaacgucguaaacucaucaauaggacucauaaugguacuuuccuuccuauucuuaaacuaa

SEQ ID NO: 5374 - RNA, 1275 nt, Artificial Sequence
  derived and/or modified CDS sequence (opt6) from Pf(PNG912-035)__BAM85007.1__CSP
augaugagaaaacuagcaauacuuucaguaucauccuuccuauucgucgaagcccuauuccaagaauaccaauguuacggaucaucaaguaauacaagaguacucaacgaacucaacuacgacaacgcaggaaccaauuuauauaacgaacuagaaaugaacuacuacgggaaacaagaaaacugguacucacuaaaaaaaaacucaagaucccuaggagaaaacgacgauggaaacaacaacaacggagauaauggaagagaaggaaaagacgaagacaaaagagauggaaacaacgaagacaacgaaaaacuaagaaaaccaaaacacaaaaaacuaaaacaaccuggagacggaaauccagauccaaaugcaaacccaaacgucgacccaaaugccaaccccaacguagacccuaaugcaaacccaaacguagaucccaacgcaaauccaaacgcaaacccaaacgcaaacccaaacgcaaauccaaacgcaaacccaaacgcaaauccaaacgccaacccaaaugcaaacccaaacgcaaacccaaacgcaaacccaaacgcaaacccaaacgcaaacccaaaugcaaauccaaacgcaaacccuaacgcaaaccccaacgcaaacccaaacgcaaauccaaacgcaaacccaaauguugacccuaacgcaaacccgaaugcuaaccccaacgccaacccaaacgcaaacccaaacgccaacccaaacgcaaaccccaacgcaaacccaaacgcaaacccaaacgcaaacccaaaugcaaacccaaacgcaaauccaaaugcaaacccaaacgcaaacccaaaugcaaacccaaacgcaaaccccaacgcaaacccaaaugcaaacccaaacgcaaauccgaaugcaaacccaaauaaaaacaaccaaggaaacggucaaggacacaacaugccaaacgaucccaacagaaacguagacgaaaacgcaaacgcaaacaaugcaguaaaaaacaacaacaaugaagaaccaucugauaaacacauagaacaauaccuaaaaaaaauccaaaacucacuauccacagaaugguccccuugcucaguaacauguggcaauggaauacaaguaagaauaaaacccggaucugcagacaaaccaaaagaccaacuagacuacgaaaacgacauagaaaaaaaaaucugcaaaauggaaaaaugcucaucaguauucaacguaguaaacagcuccaucggccucauaauggugcuuucauucuuauuccuaaacuaa

SEQ ID NO: 5375 - RNA, 1275 nt, Artificial Sequence
  derived and/or modified CDS sequence (opt6) from Pf(Sol95-308)__BAM85089.1__CSP
augaugagaaaacuagcuauauuaucagucucuucauuccuauucguagaagcacuauuccaagaauaucaauguuacggaagcucaucuaacacaagaguacuaaaugaacucaacuacgauaacgcaggaacaaaccuauacaacgaauuagaaaugaauuacuauggaaaacaagaaaacugguacucacucaaaaaaaauucaagaucauuaggagaaaacgacgacggcaacaacaauaacggagacaacggaagggaaggaaaagaugaagacaaaagagauggaaacaacgaagacaacgaaaaacuacgcaaaccaaaacacaaaaaacuaaaacaaccaggagauggaaacccagaccccaaugcaaacccaaacguagacccaaacgcaaacccaaacguagauccaaacgcaaacccaaacguagacccaaacgcaaauccaaacgucgacccaaacgccaacccaaaugccaacccaaacgcaaauccaaaugcaaacccuaacgcaaacccaaaugcaaacccaaaugcaaaccccaacgcaaacccaaacgcaaacccaaaugcaaacccaaaugcaaacccaaacgcaaaccccaacgcaaacccaaacgcaaauccaaacgcaaacccaaacgcgaauccaaacgcaaaccccaacgcaaacccaaacgcaaacccaaacgcaaacccaaacgccaacccaaaugcaaacccaaacgcaaauccaaacgcaaaccccaacgcaaacccaaacgcgaauccaaacgcaaacccaaacgcaaacccuaacgcaaaccccaaugcaaacccaaacgcaaacccuaacgcaaaccccaacgcaaacccaaacgcaaacccaaaugcaaacccaaacgccaauccaaacaaaaacaaccaaggaaacggccaaggacacaauaugccaaacgacccaaaucgaaacguagacgaaaaugcaaacgcuaauaacgcaguaaaaaacaacaacaacgaagaaccaucagacaaacacauagaacaauacuuaaaaaaaauacaaaacucucucucaacagaauggucaccaugcucagugacaugcgguaacggaauacaaguaagaauaaaaccaggaucagcaaacaaaccaaaagacgaauuagacuaugaaaaugacaucgaaaaaaaaauauguaaaauggaaaaaugcaguucuguauuuaacguaguaaacuccuccauaggauuaauaaugguacuaucauucuuauuccugaauuaa

SEQ ID NO: 5376 - RNA, 1275 nt, Artificial Sequence
  derived and/or modified CDS sequence (opt6) from Pf(Sol95-346)__BAM85102.1__CSP
augaugagaaaauuagcaauacuaucaguauccaguuuccuauucgucgaagcacuauuccaagaauaucaaugcuauggaagcucaucaaacacaagaguauuaaacgaacuaaacuaugacaaugccggaacaaacuuauauaacgaacuagaaaugaacuauuacggaaaacaagaaaacugguacucacuaaaaaaaaacucaagaucauuaggagaaaacgacgauggcaacaacaacaacggagauaacggacgagaaggaaaagacgaagacaaaagagacggcaacaacgaagacaaugaaaaauuaagaaaaccaaaacacaaaaaauuaaaacaaccaggcgacggcaaccccgaucccaacgccaacccgaacgucgacccaaacgcaaaucccaacguagacccaaaugcaaacccaaacguggacccaaaugcaaaccccaacgcaaacccaaaugcuaacccaaaugccaacccaaacgcuaacccaaaugcaaacccaaaugcaaacccaaaugccaacccaaacgcaaacccaaaugcaaacccuaaugcaaaccccaacgcaaacccaaacgcaaacccaaacgcaaacccaaaugccaacccaaacgcaaaucccaacgccaacccaaacgcaaacccaaacguagaccccaacgcaaacccaaacgcaaacccaaacgcaaaccccaacgcaaacccaaacgccaacccaaaugcaaacccgaacgcaaacccaaacgccaacccaaacgcaaacccaaacgcaaauccaaacgcaaauccaaacgcaaacccaaacgccaacccaaacgcaaacccaaacgcaaacccaaacgcaaacccaaaugcaaacccaaaugcaaaccccaacgcuaacccaaacaaaaacaaucaaggaaacggacaaggacacaauaugccaaacgacccaaacagaaacguagacgaaaacgcaaacgcaaacaacgcaguaaaaaauaacaacaaugaagaaccuucagacaaacacauagaacaauaccucaaaaaaauccaaaacucacuauccacagaauggucuccaugcagcguaacaugcggaaacggaauacaaguaagaauaaaaccgggaucugcaggaaaaucuaaagacgaacuagacuacgaaaacgauaucgaaaaaaaaauaugcaaaauggaaaaauguagcucaguauucaacguaguuaauuccucaauaggacuaauaaugguuuuauccuuccuauucuuaaacuaa

SEQ ID NO: 5377 - RNA, 1275 nt, Artificial Sequence
  derived and/or modified CDS sequence (opt6) from Pf(T4 Thailand)__AAA29555.1__CSP
augaugagaaaacuagcaauacuaucaguauccuccuuccucuucgucgaagcucuauuccaagaauaccaaugcuacggauccuccuccaacacaagaguacuaaacgaacuaaacuaugacaaugccggaacaaaccuauacaacgaacuagaaaugaacuacuauggaaaacaagaaaacugguacucauuaaaaaaaaacucacgaucauuaggcgaaaacgacgacggcaacaauaacaacggcgauaacaaccgagaaggaaaagacgaagacaaaagagauggcaacaacgaagacaacgaaaccuuacguaaaccuaaacauaaaaaacuaaaacaaccaggagacggaaaccccgacccaaacgcaaacccaaacgucgacccaaaugcaaacccaaacguagauccaaacgcaaacccaaacguagacccaaacgccaacccaaacgcaaacccaaacgcaaaccccaacgcaaauccaaacgcaaacccaaacgcaaaccccaaugcaaacccaaaugccaaccccaacgcaaaccccaacgcaaacccaaacgcaaauccaaacgcaaacccaaaugcaaauccaaacgcaaacccaaacgccaaccccaaugcaaacccaaacgcaaacccaaacgccaaccccaacgcaaauccaaacgcaaacccaaacgcaaacccaaacgcaaacccaaacgcaaacccaaacgcaaacccaaacgcaaacccaaacgcaaaccccaacgcaaacccaaacgcaaacccaaaugcaaacccuaacgccaacccaaacgcaaauccaaaugcaaauccaaacgcaaacccaaacgcaaaucccaacgccaaccccaacgcaaaccccaaugcaaacccaaaugcaaacccaaauaaaaacaaccaaggaaacggacaaggacacaacaugcccaacgaccccaauagaaacguagacgaaaacgccaacgcaaacaacgccguaaaaaacaauaauaacgaagaaccaucagacaaacacauagaacaauaucuaaaaaaaauccaaaacucacuaucaaccgaauggucaccaugcucuguaacaugcggaaauggaauacaagucagaauaaaaccaggaucagcaaacaaaccaaaagacgaacuagacuaugaaaaugacaucgaaaaaaaaauauguaaaauggaaaaauguucaucagucuucaacguagucaacucauccauaggccuaaucaugguauuaucauuuuuauucuuaaacuaa

SEQ ID NO: 5378 - RNA, 1275 nt, Artificial Sequence
  derived and/or modified CDS sequence (opt6) from Pf(Tz03-025)__BAM84798.1__CSP
augaugcgaaaacuagcaauccucucaguaucaucauuuuuauucguagaagcacucuuccaagaauaccaaugcuacgguuccucaagcaacacaagaguccuaaacgaacuaaauuaugacaacgcaggcacaaacuuauacaacgaacuugaaaugaacuauuacggaaaacaagaaaacugguacucacuaaaaaaaaacucacgcucacuaggagaaaacgacgacggaaacaacaacaauggagacaacggaagagaaggaaaagacgaagauaaaagagacggcaacaacgaagacaacgaaaaacuccgaaaaccuaaacacaaaaaauuaaaacaaccagcagacggaaauccagaccccaacgcaaacccaaacguagacccaaaugcaaacccaaacguagacccaaacgcaaaccccaacguagacccaaacgccaaucccaaugcaaacccaaacgcaaacccaaacgccaauccaaacgcaaacccaaacgcaaacccaaacgcuaauccaaacgccaauccgaacgcaaacccaaacgcaaacccaaacgcaaacccaaacgcaaacccaaacgcaaacccaaaugcaaacccaaaugcaaacccaaacgcaaacccaaacgcaaacccaaacgcaaauccaaacguagacccaaacgccaacccaaaugcaaauccaaaugcaaacccaaacgcaaacccaaacgcaaacccaaacgcaaauccuaacgcaaacccaaaugcaaacccuaacgcaaauccaaacgcaaacccaaaugcaaauccaaacgcaaaccccaacgcaaauccaaaugcaaacccaaacgcaaaucccaacgccaacccaaacgccaacccaaacgcaaauccaaacgcaaacccaaacaaaaauaaucaaggcaauggacaagggcacaacaugccaaacgauccaaaccgaaacgucgacgaaaaugcaaacgcaaacaacgcaguuaaaaauaacaacaaugaagaaccauccgaccaacacauagaaaaauaccucaaaacaauaaaaaauucacuaucaaccgaauggucacccuguagcguaacauguggaaacggcauacaaguaagaauaaaaccagguuccgcaaacaaaccaaaagaucaauuagacuacgcuaacgauauagaaaaaaaaauaugcaaaauggaaaaauguucauccguauucaacguuguaaacucaucaauagguuuaauaaugguacuaucauuccuauuccuaaauuaa

SEQ ID NO: 5379 - RNA, 1272 nt, Artificial Sequence
  derived and/or modified CDS sequence (opt6) from Pf(NR62)__ADF48375.1__CSP
augagaaaauuagcaauacuaucaguaucaucauuccuauucguagaagccuuauuccaagaauaccaauguuacggaucaucaucaaacacuagaguacuaaacgaauuaaacuacgauaacgcaggcacaaauuuauauaacgaacuagaaaugaacuauuacggaaaacaagaaaacugguacucacucaaaaagaauucaagaucccuaggagaaaaugacgacggcaacaacaacaacggagacaacgguagagaaggaaaagacgaagauaaacgagacggaaacaaugaagauaaugaaaaacuacgaaaacccaaacacaaaaaacucaaacaaccaggagacggaaauccagauccaaacgcaaauccaaacgucgacccaaacgcaaauccaaacguagaccccaaugcaaacccaaacguagacccaaacgcuaacccaaacgucgaccccaacgccaacccaaacgcaaauccaaacgcaaacccaaacgcaaacccaaacgcaaauccaaacgcaaacccaaaugcaaacccuaacgcaaacccaaacgcaaacccaaaugcaaauccaaacgcaaauccaaacgcuaauccaaacgcaaacccaaacgcaaacccaaacgcaaauccaaacgcaaaccccaacgcaaacccaaacgcaaaccccaacgcaaaucccaaugcaaacccaaacgcaaauccuaacgccaacccaaacgcaaacccaaacgcaaauccaaaugcaaauccaaaugcaaaccccaacgcaaacccaaaugcaaacccuaacgcaaauccuaacgccaacccaaaugcaaacccaaacgcgaacccaaacgcaaacccaaaugcaaacccaaacgcaaacccaaacgcaaacccaaacaaaaauaaccaagggaacggacaaggacacaacaugccaaacgacccaaaccgcaacgucgacgaaaacgcaaacgcaaacaacgcaguaaaaaacaacaacaacgaagaaccaucagacaaacacaucgaacaauaccuaaaaaaaauacaaaacucacuaucaacugaauggucaccaugcucaguaacaugcggcaauggaauccaaguacgcauaaaaccaggauccgcaaacaaaccaaaagaugaacuagauuacgaaaaugauauagaaaaaaaaauaugcaaaauggaaaaaugcagcucgguauucaacguaguaaacucaucaauaggacuaauaaugguauuaucauucuuauuccucaacuaa

SEQ ID NO: 5380 - RNA, 1272 nt, Artificial Sequence
  derived and/or modified CDS sequence (opt6) from Pf(TSY673)__ACO49542.1__CSP
augagaaaacuagcaauauuaucaguaucaagcuuccucuuuguagaagcucuauuccaagaauaccaaugcuacggaagcucuucaaacaccagagucuuaaacgaacuaaauuaugacaacgcaggaacaaaucuauacaaugaauuagaaaugaacuacuacggaaaacaagaaaacugguacucccuaaaaaaaaauucaagaucgcuaggagaaaacgacgacggaaauaacaacaacggagacaacggcagagaaggaaaagacgaagacaaaagagacggaaauaacgaagauaacgaaaaacucagaaaaccaaaacacaaaaaauuaaaacaacccggcgacggcaaucccgacccaaaugcaaauccaaauguagacccaaacgcaaauccaaacgucgacccaaacgcaaacccaaauguagacccaaacgccaacccaaacgcuaacccaaacgcaaauccaaacgcaaacccaaacgcaaacccaaacgcaaaccccaacgcaaacccaaacgcaaaccccaacgcaaacccaaacgcaaacccaaacgccaacccaaacguagacccaaacgcaaacccaaacgcaaacccaaacgcaaaccccaaugcaaauccaaaugcgaacccaaacgccaacccaaacgcaaacccaaacgcaaacccaaacgccaaccccaaugccaacccaaaugcaaacccaaacgcaaacccaaacgcaaaccccaacgcaaacccaaaugcaaacccaaacgccaacccaaacgcaaacccaaacgcaaacccgaacgcaaacccaaacgcaaacccaaacgcaaacccaaacgccaauccaaacgcgaacccaaacgccaauccaaacgcaaaccccaacgcaaauccaaacaaaaacaaccaaggaaacggacaaggacacaacaugccaaaugacccaaacagaaacguagacgaaaaugcaaacgcuaacaacgcuguaaaaaacaacaacaacgaagaaccaucagacaaacacauaaccgaauaucuaaaaaaaauacaaaacucacuaucuaccgaauggucacccugcucaguaaccugcggaaacggaauacaaguaagaauaaaaccaggcucagcaggaaaaucaaaagacgaacuagacuacgaaaaugacaucgaaaaaaaaaucugcaaaauggaaaaaugcagcuccgucuuuaacguaguaaacuccuccauaggauuaauaaugguacuaucauuccuauucuuaaacuag

SEQ ID NO: 5381 - RNA, 1272 nt, Artificial Sequence
  derived and/or modified CDS sequence (opt6) from Pf(TSY688)__ACO49545.1__CSP
augagaaaacuagcaauauuaucaguauccucauuuuuauucguagaagccuuauuccaagaauaucaaugcuacggaagcucaagcaacaccagaguacugaacgaauuaaacuaugacaacgcaggcacaaaccuauacaacgaacucgaaaugaacuacuacggaaaacaagaaaacugguauucauuaaaaaaaaacucacgaucacucggagaaaacgacgacggaaacaacaacaacggagacaacggaagagaaggaaaagacgaagacaaaagagacggaaauaacgaagacaacgaaaaauuaagaaaaccaaaacauaaaaaauuaaaacaacccggagacggaaacccagacccaaacgccaauccaaacgucgaccccaacgcaaacccaaacguagaucccaaugcaaaccccaacguagacccaaaugcaaacccaaacgcaaaccccaaugcaaacccaaacgcaaacccaaacgcaaauccaaacgcaaacccaaacgcaaacccaaacgcaaacccaaacgcaaauccaaacgcaaacccaaacgcaaauccaaacgcaaacccaaaugcaaauccaaacgcaaaccccaacgcaaaccccaacgcaaaccccaacgcaaacccaaacgcaaacccaaacgcaaacccaaacgcaaacccaaacgcaaacccaaacgcaaacccaaaugcaaaccccaacgcaaacccaaaugccaacccaaacgcaaacccuaaugcgaacccaaaugcaaacccaaaugcuaaucccaacgcaaauccaaacgcaaaucccaacgcaaacccaaacgcaaacccaaaugcaaacccaaacgccaacccaaacgcaaacccaaacgccaauccaaaugcaaacccaaacaaaaacaaccaaggaaacggacaaggacacaacaugccaaacgacccaaacagaaacguagacgaaaacgccaacgcaaauaacgcaguaaaaaauaacaacaacgaagaaccauccgauaaacacauagaacaauaccucaaaaaaauucaaaacucacuuucaaccgaaugguccccaugcagcguaacaugcggcaacggaauacaaguaagaauaaaaccaggaucagcaaauaaaccaaaagacgaacuagacuacgaaaaugacauagaaaaaaaaauaugcaaaauggaaaaaugcucaucaguauucaacguaguaaacucaucaauaggacuaauaaugguacuaucauucuuauuccuaaauuaa

SEQ ID NO: 5382 - RNA, 1263 nt, Artificial Sequence
  derived and/or modified CDS sequence (opt6) from Pf(835b)__AAA29574.1__CSP
augaugcgaaaacuagccauacuaucaguaucaagcuuuuuauucguagaagcacucuuccaagaauaccaauguuacggaagcucgagcaacacacgaguacucaacgaauuaaacuacgacaacgcaggaauaaaccuauacaacgaacuagaaaugaacuacuacggaaaacaagaaaacugguacagucuaaaaaaaaacucaagaucacuaggcgaaaacgaugauggcaacaauaacaacggagacaacggaagagaaggaaaagacgaagauaaaagagacggaaacaacgaagacaacgaaaaacuaagaaaacccaaacacaaaaaacucaaacaaccaggagacggaaaccccgacccaaacgccaacccaaauguagacccaaacgcaaacccgaacguagacccaaacgcaaacccaaacguagacccuaacgcaaaccccaacgcaaacccaaacgcaaacccaaaugcaaacccaaacgcgaacccaaacgcaaacccaaaugcaaacccaaacgcaaacccaaaugccaacccaaacgcaaacccaaacgcaaacccaaacgcaaacccaaacgcgaacccaaaugcaaauccaaaugcaaacccaaacgcuaacccaaacgcaaacccaaacgccaacccaaaugcaaacccaaacguagacccaaacgcaaacccaaacgccaacccaaacgcaaacccaaacgcaaacccaaacgcaaacccaaacgcaaauccaaacgcaaacccaaacgcaaaccccaacgcaaacccaaacgcaaacccuaaugcaaauccaaacgcaaauccaaacgcaaacccaaacgcaaacccaaaugcuaacccuaaugcaaacccaaacgcaaacccaaacaaaaacaaccaaggaaauggacaaggacacaacaugcccaacgaccccaaucgcaacgucgacgaaaacgcaaacgcaaacaaugcaguuaaaaacaacaauaacgaagaacccucagacaaacacauaaaagaauaccuaacaaaaauacaaaacucaauuucaacagaauggucacccugcuccguaacuugcggaaacggcauacaaguaagaauaaaaccagguucagccggaaaaccaaaagacgaacuagaauacgaaaacgacauagaaaaaaaaauauguaaaauggaaaaaugcucauccguauucaacguaguaaacucaucaauaggacuaauaaugguacuuucauuuuuauuccuaaacuaa

SEQ ID NO: 5383 - RNA, 1263 nt, Artificial Sequence
  derived and/or modified CDS sequence (opt6) from Pf(FCC1/HN)__AAW59565.1__CSP
augaugagaaaacuagcaauacucucaguaucuagcuuccucuucguagaagcccuauuccaagaauaccaaugcuacggcucauccuccaacaccaggguauuaaacgaacucaacuacgacaacgcaggaacaaaucuauacaacgaacucgaaaugaauuacuauggaaaacaagaaaauugguacagcuuaaaaaaaaacucaagaucauuaggagaaaacgacgacggaaacaacaauaacggagacaauggaagagaaggaaaagacgaagacaaaagagacggaaacaacgaagacaacgaaaaacuucgaaaacccaaacacaaaaaacuaaaacaaccaggugacggaaacccagacccaaacgcaaacccuaauguagacccaaacgcaaacccaaacguagaucccaacgcaaacccaaacguagacccaaaugccaacccaaaugcaaacccaaacgcgaacccaaacgcaaacccaaacgcaaacccaaacgcaaauccaaacgcaaacccaaacgcaaacccaaacgcaaaccccaacgcaaauccaaaugcaaacccaaaugccaacccaaacgcaaacccaaaugcaaacccaaacgcuaauccaaacgcaaacccaaacgcaaauccaaacgcaaacccaaaugcaaaccccaacgcaaacccaaaugcaaacccuaaugcaaacccaaacgcaaacccaaacgcaaauccaaacgcaaacccaaacgcaaacccaaaugcuaauccaaacgcaaauccaaacgcaaacccaaacgcaaacccaaacgcaaacccaaacgcaaaccccaacgcaaacccaaacgcaaauccaaaugcaaacccaaacgcaaacccaaacgcaaacccaaacaaaaauaaucaaggaaacggccaaggacauaauaugccaaaugacccaaacagaaacguugaugaaaaugcaaaugcaaacaacgccgucaaaaacaacaacaacgaagaaccaucagauaaacacauagaacaauaccuaaaaaaaauacaaaacucacuauccacagaauggucacccugcucagucaccugcggaaacggaauacaagccagaauaaaaccaggaucagcaaacaaaccaaaagacgaacuagacuacgaaaacgauauagaaaaaaaaaucugcaaaauggaaaaaugcagcucaguauucaacgugguaaacaguucaaucggauuaauaaugguacucucauucuuauucuuaaacuaa

SEQ ID NO: 5384 - RNA, 1263 nt, Artificial Sequence
  derived and/or modified CDS sequence (opt6) from Pf(K1)__AAA29552.1__CSP
augaugagaaaacucgccauacuuucagucucaagcuuccuauucgucgaagcuuuauuucaagaauaccaaugcuacggauccucaagcaauacaagagucuuaaacgaacuaaacuaugacaacgccgguauaaacuuauacaaugaacuagaaaugaacuacuacggaaaacaagaaaacugguacagccuaaaaaaaaacucaagaucauuaggcgaaaaugacgacggaaacaacaacaacggagacaacggaagagaaggaaaagacgaagacaaacgagacggaaacaacgaagacaacgaaaaacuaagaaaaccaaaacacaaaaaacuaaaacaacccggagacggaaacccagacccaaacgcaaauccaaacguagacccaaacgcaaacccaaacguagauccaaacgcaaacccaaacguagauccuaaugcaaacccaaacgcaaacccaaaugcaaacccaaaugcaaauccaaacgcaaauccaaaugcaaauccaaacgccaacccaaaugcaaacccaaacgcaaacccaaacgcuaacccaaacguagaucccaacgcuaacccaaaugcaaacccaaacgcuaauccaaaugccaacccaaacgcaaauccaaacgcaaacccuaacgcaaauccaaacgcaaacccaaacgcaaacccaaacgcaaacccaaacgcaaacccaaacgcaaacccaaaugcaaacccaaacgcaaacccaaacgcaaaucccaacgcuaacccaaacgcaaacccaaacgcaaacccaaacgcaaaccccaacgcaaacccaaacgcaaacccaaacgcaaacccaaacgcaaacccaaacgccaaucccaacgcaaaucccaaugcaaacccaaacaaaaacaaccaaggaaacggacaaggacacaacaugccaaacgacccaaaccgaaacguagacgaaaacgcaaacgcaaauaacgacguaaaaaacaacaacaacgaagaacccucagacaaacauauagaacaauacuuaaaaaaaauacaauacucauuauccacagaauggucacccuguucaguaacaugcggaaacggcauacaaguaagaauaaaaccaggaucagcagacaaacccaaagaccaauuagacuacgaaaacgauauagaaaaaaaaauauguaaaauggaaaaaugcuccucaguauucaacguaguaaacuccucaauuggacucauaaugguacuaucauuccuauuccucaacuaa

SEQ ID NO: 5385 - RNA, 1263 nt, Artificial Sequence
  derived and/or modified CDS sequence (opt6) from Pf(K1)__BAD73952.1__CSP
augaugagaaaacuagcaauauuaucaguaucaucauuucuauucguagaagcauuguuccaagaauaccaaugcuauggaagcucaucaaacaccaggguacuaaacgaacuaaacuacgauaacgcaggaacaaaccuauauaacgaacuagaaaugaauuauuauggcaaacaagaaaacugguauagccuaaaaaaaaacucaagaucauuaggagaaaacgacgacgguaacaauaacaacggagauaauggaagagaaggaaaagacgaagacaaaagagauggaaacaacgaagacaacgaaaaacuacgaaaaccaaaacauaaaaaauuaaaacaaccaggcgauggaaacccagacccaaaugcaaaccccaaugucgacccaaacgcaaacccaaacguagaccccaacgccaacccaaauguagacccaaacgcaaacccaaacgcaaacccaaacgcaaacccaaacgcaaacccaaacgcaaacccaaacgcaaacccaaacgcaaacccaaaugcaaacccaaacgcaaacccaaaugcaaauccaaacguagaccccaacgcaaaccccaacgcaaacccaaacgcaaaccccaaugcaaauccaaacgcaaacccaaacgcaaaucccaacgcaaacccaaacgcaaacccaaacgcaaacccaaacgcuaacccaaacgcaaacccaaacgcaaacccaaacgcaaauccaaaugcaaacccuaacgcaaacccaaaugcaaauccaaacgcuaaccccaacgcaaacccaaacgcaaacccaaacgcaaauccaaacgcaaacccaaacgccaacccaaacgcaaacccaaacgcaaacccaaacgcaaauccaaaugcaaauccaaacaaaaacaaccaaggcaacggacaaggucacaacaugccaaaugacccaaaccgaaacguagacgaaaacgccaaugcaaacaaugacguaaaaaauaacaauaacgaagaacccucagacaaacacauagaacaauaccuaaaaaaaauccaauacucauuaucaacagaauggucaccuugcucaguaaccugcggcaacggaauacaaguccgaauaaaaccaggaucagcagacaaaccgaaagaucaacuagauuacgaaaacgacauagaaaaaaaaauaugcaaaauggaaaaaugcuccucaguauucaacguaguaaacagcucaauuggacucauaaugguccuaucauucuuauuccuuaacuaa

SEQ ID NO: 5386 - RNA, 1263 nt, Artificial Sequence
  derived and/or modified CDS sequence (opt6) from Pf(Pal97-074)__BAM84944.1__CSP
augaugagaaaacuggcaauauuauccguauccagcuuccucuucguagaagcauuauuccaagaauaccaauguuacggaucaucaagcaauaccagaguauuaaacgaacuaaacuacgacaacgcaggaacaaauuuauacaacgaacuagaaaugaacuacuacggaaaacaagaaaacugguauagcuuaaaaaaaaacuccagaagucuaggcgaaaacgacgacggaaacaacaacaacggagacaacggaagagaaggaaaagacgaagauaaaagagacggaaacaacgaagacaacgaaaaauuacgcaaaccuaaacauaaaaaacuaaaacaaccaguagacggaaacccagauccaaacgcaaaccccaacgucgauccaaacgcgaauccaaacgucgacccaaaugcaaacccaaauguagacccaaacgcaaacccaaacgcaaacccuaacgcaaacccaaacgcaaacccaaacgcaaacccuaacgcaaacccuaaugcaaacccaaacgccaacccaaaugccaacccaaacgcaaaccccaacgcaaacccaaaugcaaauccaaacgcaaaccccaaugcaaacccaaaugcaaaccccaacgcaaauccaaaugcaaacccaaacgcaaacccaaacgccaacccaaacgcaaaccccaacgccaacccaaaugcaaacccaaacgcaaauccaaacgcaaacccuaacgccaacccaaacgccaacccaaacgccaauccaaacgccaacccaaacgcuaaccccaacgcaaacccaaacgcaaacccaaacgcaaacccaaacgcaaacccaaacgcaaaccccaacgcaaacccaaacgcaaacccaaacgccaauccaaacaaaaacaaccaaggaaauggacaaggacacaacaugccaaacgaucccaaucgaaacgucgacgaaaaugcuaacgcuaauaaugcaguaaaaaauaauaauaacgaagaaccaucagaucaacauaucgaaaaauauuuaaaaauaauacaaaacuccuuaucuaccgaauggucaccaugcucaguaaccugcggaaacgguauacaaguaagaauaaaaccaggaucagcagacaaaccaaaagaccaauuagacuacgcaaacgacauagaaaaaaaaauaugcaaaauggaaaaaugcucaucaguauucaacguagucaacucaucaauaggacuaauaaugguacuaucauucuuauuccuaaacuaa

SEQ ID NO: 5387 - RNA, 1263 nt, Artificial Sequence
  derived and/or modified CDS sequence (opt6) from Pf(Pal97-108)__BAM84957.1__CSP
augaugagaaaacuagcaauucuaucgguaucaucauuccucuucgucgaagcacuauuccaagaauaccaaugcuauggaagcucuucaaauacacgaguacuaaacgaauuaaacuacgacaacgcaggaacgaaccuauauaacgaacuagaaaugaacuacuacggaaaacaagaaaacugguacucauuaaaaaaaaacucaagaucacucggagaaaacgacgacggaaacaacaauaacggcgacaauggcagagaaggaaaagaugaagauaaaagagacggaaauaaugaagauaacgaaaaacuacgaaaaccaaaacacaaaaaacuuaaacaacccggagacggaaacccagauccgaacgcaaaccccaacgucgacccaaacgccaacccaaacguagacccaaacgcaaacccaaacguagacccaaaugcaaacccuaacgcaaacccaaacgcaaacccaaacgcaaauccuaacgcaaacccuaacgcgaauccuaacgcaaacccaaacgcaaacccaaacgcaaacccaaaugccaacccaaacgcaaauccaaacgcuaaccccaacgcaaacccaaacgcaaacccaaacgcaaacccaaaugcaaacccaaaugcaaauccaaacgcaaacccaaaugcaaauccaaacgccaacccaaaugcaaacccaaacgcaaauccaaaugccaaccccaacgcaaacccaaaugcaaacccaaacgcuaacccaaacgcaaauccaaaugcaaacccaaacgcaaacccaaacgcaaaccccaaugcaaauccaaacgcaaacccaaacgcaaacccaaacgccaaccccaacgcaaacccaaaugcaaacccaaacgcaaacccuaacaaaaauaaccaaggaaacggucaaggacacaauaugccaaacgacccaaaccgaaauguagacgaaaacgcaaacgcaaacaacgcagucaaaaacaacaacaaugaagaaccaucagacaaacacaucaaagaauaccuaacaaaaauacaaaacucaaucuccacagaauggucaccaugcuccguaacauguggaaacggaauacaaguaagaauaaaaccaggaagugcuggcaaaccaaaagaugaauuaaauuacgaaaacgacauagaaaaaaaaaucugcaaaauggaaaaaugcagcucaguauucaacguaguuaacucaucaauaggauuaauaaugguacuuucauuucuauuccuaaacuaa

SEQ ID NO: 5388 - RNA, 1263 nt, Artificial Sequence
  derived and/or modified CDS sequence (opt6) from Pf(PNG225-053)__BAM85032.1__CSP
augaugagaaaacuagccauacuaucaguaucauccuuccuauucguagaagcacuuuuccaagaauaccaaugcuacggaucaucaucaaacacaagaguauuaaacgaauuaaacuacgacaacgcaggaacaaacuuauacaacgaacucgaaaugaacuacuacggcaaacaagaaaacugguacucauuaaaaaaaaacucacgcuccuuaggcgaaaaugacgacggaaacaauaacaacggagacaacggaagagaaggaaaagacgaagacaaaagagauggaaacaacgaagacaaugaaaaacuaagaaaacccaaacauaaaaaacuaaaacaaccaggagacggaaacccagaccccaaugcaaacccaaacguagacccaaacgcaaacccaaacguagacccuaacgcaaauccaaauguagacccaaacgcaaacccaaacgcaaacccaaacgcaaacccaaacgccaacccaaacgcaaacccaaacgcaaacccaaacgcaaauccaaacgcaaacccaaacgcaaauccaaacgcaaacccaaacgcaaauccaaacgcaaaccccaacgcaaaccccaacgcaaacccaaaugcaaauccaaacgccaacccaaacgcaaauccaaaugcaaacccaaacgcaaacccaaacgcaaacccaaacgcaaaccccaacgcaaaccccaaugcaaacccaaaugcaaacccaaacgcaaacccaaacgccaauccaaaugcaaacccaaacgcaaacccaaacgccaacccaaacgcaaacccaaacgcaaauccaaacgcaaacccaaacgcaaauccaaacgcaaaccccaacgccaacccaaacgcaaauccaaacgcaaacccaaacaaaaacaaccaaggaaacggacaaggacacaacaugccaaacgacccaaacagaaacguagacgaaaacgcaaacgccaacaacgcaguaaaaaacaacaauaacgaagaaccaucagauaaacacauagaacaauaccuaaaaaaaauucaaaauucauuaagcacagaauggucaccaugcucaguaaccugcggaaacggaauacaaguaagaauaaaaccagguucagccaacaaaccaaaagacgaacuagacuacgaaaacgacauagaaaaaaaaauaugcaaaauggaaaaaugcagcucaguauucaacguaguaaacucaucaauaggccucauuaugguauuaucauucuuauuccuaaacuaa

SEQ ID NO: 5389 - RNA, 1263 nt, Artificial Sequence
  derived and/or modified CDS sequence (opt6) from Pf(Sol95-113)__BAM85062.1__CSP
augaugagaaaacuagcaauacuaucagucucaucauuccuauucguagaagcacuauuucaagaauaucaauguuacggaucauccucuaacaccagaguccuaaacgaacuaaauuaugacaaugcaggaacaaacuuauauaacgaacuagaaaugaacuacuacggcaaacaagaaaauugguacuccuuaaaaaaaaauucaagaucacuaggagaaaacgacgacggcaauaacaacaacggagauaacggaagagaaggaaaagacgaagacaaaagggacggaaacaaugaagacaacgaaaaacuaagaaaacccaaacacaaaaaauuaaaacaaccaggagacggcaacccagacccaaacgcaaacccaaacguagacccuaacgcaaauccaaacgucgacccaaacgcaaacccaaacguagacccaaacgcaaauccaaacguagacccaaacgcaaacccaaaugcaaacccaaacgcaaacccaaacgccaacccuaacgcaaaccccaacgcaaacccaaacgcaaacccuaacgccaacccaaaugcaaauccaaaugcaaacccaaacgcaaacccaaacgcaaacccaaacgcaaacccaaacgcaaauccaaaugcaaacccaaacgcaaacccaaacgcaaacccaaaugccaacccaaaugcaaacccaaaugcaaacccaaacgcaaacccaaaugccaacccaaacgcaaacccaaaugccaaccccaacgccaacccaaacgcaaaccccaacgcaaacccaaacgcaaacccaaacgcaaacccaaaugcaaacccaaacgcaaaccccaacgcaaacccaaaugcaaacccaaacgcuaacccaaacgcaaacccaaacaaaaacaaccaaggcaacggacaaggacacaauaugccaaacgacccaaacagaaacgucgacgaaaacgccaacgccaacaaugcaguaaaaaacaauaauaacgaagaaccaucagacaaacacaucgaacaauaccuaaaaaaaauacaaaauucccuaucaacagaauggucaccaugcuccgucacaugcggaaacggaauacaaguacgaaucaaacccggcucagcaaacaaaccaaaagaugaacuagacuacgaaaacgacauagaaaaaaaaauauguaaaauggaaaaaugcagcucaguauucaacguaguaaauucuucaaucggccuaauaaugguccuaucauuccuauuccucaacuaa

SEQ ID NO: 5390 - RNA, 1263 nt, Artificial Sequence
  derived and/or modified CDS sequence (opt6) from Pf(Sol95-328)__BAM85093.1__CSP
augaugagaaaauuagcaauauuaagcgucucaucauuccucuucgucgaagcacuauuucaagaauaucaaugcuacggcagcucaucaaauacuagaguacuaaacgaacuaaacuacgacaacgcaggaacgaaccuguacaacgaacuagaaaugaauuauuacggaaaacaagaaaacugguacagucuaaaaaaaaacucaagaucauuaggcgaaaacgacgacggcaacaacaacaacggagauaacggaagagaaggaaaagacgaagauaaaagagacggaaacaacgaagacaacgaaaaacuaagaaaaccaaaacauaaaaaauuaaaacaaccaggagacggaaacccagacccaaacgcaaauccaaacguagacccaaacgccaacccaaauguagacccaaaugcaaacccaaacguagacccaaaugcaaacccaaacgccaacccaaacgcaaacccaaacgcaaacccgaacgcaaauccaaacgcaaacccaaaugcaaacccaaacgcaaauccaaacgcuaaccccaaugcaaacccaaacgccaauccaaaugcaaauccaaacgccaaccccaacgcaaacccaaacgcaaaccccaacgcaaacccaaacgcaaacccaaacguagauccaaacgcaaacccuaacgcaaacccaaacgcaaacccaaaugcaaacccaaacgcaaacccaaacgcaaauccaaaugcaaacccaaaugcaaacccaaaugcaaacccaaaugcaaacccaaaugcaaacccuaaugcaaaucccaacgcaaacccaaacgcaaacccaaacgcaaacccuaacgcaaacccaaacgcaaacccaaacgcaaacccaaacgcaaacccaaauaaaaacaaccaaggaaacggacaaggacacaacaugcccaaugacccaaaccguaacguagacgaaaacgccaacgcaaacaacgcaguaaaaaauaacaacaaugaagaaccauccgacaaacacauagaacaauaccucaaaaaaauacaaaacucccuaucaacagaauggagcccaugcagcguaacaugugguaacggaauccaaguaagaauaaaaccaggaucagcugacaaaccaaaagaccaacuagauuacgaaaacgacaucgaaaaaaaaaucugcaaaauggaaaaaugcaguucaguauucaacguaguaaacucaucuauaggacuaauaaugguacuuuccuuucuauuccucaacuga

SEQ ID NO: 5391 - RNA, 1263 nt, Artificial Sequence
  derived and/or modified CDS sequence (opt6) from Pf(TiMS95-208)__BAM84896.1__CSP
augaugagaaaauuagcaauacucucgguuucaucauuccucuucguagaagcauuauuccaagaauaucaaugcuacggaucaucauccaauacaagaguacuaaaugaacuaaauuaugacaacgccggaaccaaccuauacaacgaauuagaaaugaacuacuacggaaaacaagaaaauugguacucacuaaaaaaaaacuccagaucacucggagaaaacgacgacggaaacaacaacaacggcgauaacggaagagaaggaaaagacgaagacaaaagagacggaaacaacgaagacaacgaaaaacuacgaaaaccuaaacacaaaaaauuaaaacaaccaggagacggaaaccccgauccaaaugcaaacccaaacguagauccaaacgcaaacccaaaugucgacccgaaugcaaaccccaauguagacccaaacgcaaacccaaaugcaaacccaaacgcaaacccaaacgcaaauccaaacgcaaacccaaacgcaaacccaaaugcaaacccaaacgcaaauccaaacgcaaacccgaacgcgaacccuaacgcaaacccaaaugcaaacccaaacgcaaauccaaacgcaaauccgaacgccaacccaaacgcaaacccaaacgcaaauccaaacgcaaauccaaacgcaaauccaaacgcuaacccaaaugcaaauccaaacgccaacccaaacgcaaacccaaacgccaauccaaacgcaaacccaaacgcaaauccaaaugcaaacccaaaugcaaacccaaacgcaaauccaaacgcaaaccccaacgcaaacccaaacgcaaacccaaaugcaaauccaaacgcaaacccaaacgcaaacccaaacgcaaacccaaaugcaaaccccaacaaaaacaaccaaggaaauggacaaggccacaauaugccaaaugacccaaaccgaaauguagacgaaaacgcaaacgcaaacaacgacgucaaaaacaauaacaacgaagaaccaucagauaaacacauagaacaauaucuaaaaaaaauacaauacucuuuauccaccgaauggucaccaugcaguguaacaugcggaaacgguauacaagucagaauaaaaccaggaucagcagacaaaccaaaagaccaacuagacuacgaaaacgacauagaaaaaaaaauauguaaaauggaaaaaugcagcucaguauucaacguaguaaauagcuccauaggccuaauaaugguccuaucauuccuauucuuaaacuaa

SEQ ID NO: 5392 - RNA, 1263 nt, Artificial Sequence
  derived and/or modified CDS sequence (opt6) from Pf(TiMS95-260)__BAM84907.1__CSP
augaugagaaaauuagcuauauuaucaguaucguccuuuuuauucguagaagcauuauuucaagaauaucaaugcuacggaucaucauccaacacaagaguacucaacgaacuaaacuacgauaacgcaggaacaaaccuauacaacgaacuagaaaugaauuacuacggaaaacaagaaaacugguacagccuaaaaaaaaacucaagaucacuaggagaaaacgacgauggaaacaauaacaacggagacaacggcagagaagguaaagacgaagauaaaagagacggaaauaacgaagacaacgaaaaacuaagaaaaccaaaacacaaaaaacucaaacaacccggagacggaaaucccgacccaaacgcaaacccaaauguagauccaaacgcaaacccaaacguagacccaaacgcaaacccaaacguagaccccaacgccaacccaaacgcaaacccaaacgcaaacccaaacgccaacccaaacgccaauccaaacgcaaauccaaacgcaaaccccaacgcaaacccaaacgcaaauccgaaugcaaacccaaacgcaaauccaaacgcaaacccaaaugcaaauccaaacgcuaacccaaacgcaaacccaaacgcaaacccaaaugcaaacccaaacgcaaaccccaacgccaacccaaacguagacccaaacgcaaauccaaaugcaaauccaaacgcaaacccaaacgcaaaccccaacgcaaacccaaacgcaaacccaaacgcaaacccaaacgcaaacccaaacgcaaacccaaacgcaaauccaaaugccaauccaaacgcaaacccaaacgcgaacccaaacgccaacccaaaugcuaacccaaaugcaaacccaaacgcaaacccaaacaaaaacaaucaaggcaauggccaaggacacaacaugccaaacgaccccaacagaaacguagacgaaaacgcaaacgcaaacaaugcaguaaaaaacaacaauaacgaagaaccaucugacaaacacauaaaagaauaccuaacaaaaauacaaaauucaauaucgacagaauggucccccugcaguguaacaugcggaaacggaauacaaguccgaauaaaaccaggcucagcaggaaaaccaaaagaugaacuaaacuacgaaaacgacauagaaaaaaaaauaugcaaaauggaaaaaugcucauccguauucaacguaguaaacucaucaauaggacuaauaaugguacuaucauuccuauuccuaaauuaa

SEQ ID NO: 5393 - RNA, 1263 nt, Artificial Sequence
  derived and/or modified CDS sequence (opt6) from Pf(Tz93-030)__BAM84756.1__CSP
augaugagaaaauuagccaucuuauccguaucaucauuccucuucguagaagcacuauuccaagaauaccaaugcuacggaaguucaagcaacacaagaguauuaaaugaacuaaacuacgauaacgcaggaacaaaccucuacaacgaacuagaaaugaacuacuacggaaaacaagaaaacugguacucacuaaaaaaaaacucaagaucgcuaggagaaaacgaugacggaaacaauaacaacggagauaacggaagagaaggcaaagacgaagauaaaagagacggaaauaacgaagacaaugaaaaacuaagaaaaccaaaacacaaaaaauuaaaacaaccaggugacggaaacccagaccccaacgcaaacccaaacguagauccaaacgcaaauccaaauguggacccaaacgcaaauccaaacguagacccaaacgcaaauccaaacgcuaacccaaacgcaaacccaaacgcaaacccaaaugcaaacccaaacgcaaacccaaacgccaacccaaacgcaaacccaaacgcaaacccaaacgcaaacccaaaugccaacccaaacgcaaacccaaacgcaaacccaaaugccaacccaaacgcaaacccaaacgccaacccaaauguagauccaaacgcaaacccaaacgcaaacccaaacgcaaacccaaacgcaaauccaaacgcaaacccgaacgcaaacccaaacgcaaacccaaaugccaacccaaacgcaaauccgaacgcaaauccaaacgcaaacccuaaugcaaacccaaacgccaaccccaacgcaaacccaaacgcaaacccaaacgcaaacccaaacgcuaauccaaaugcaaauccaaacgcaaacccaaacgcaaacccaaacaaaaacaaccaaggaaacggacaaggccacaacaugccaaacgacccaaauagaaacguagacgaaaacgcaaacgcaaacaacgcaguaaaaaacaacaauaacgaagagccuucagacaaacacauaaaagaauacuuaaacaaaauacaaaacuccaucucaacagaauggucaccaugcagcguaaccugcggaaacggaauacaaguacgaauaaaaccaggauccgcagacaaaccaaaagaccaauuagacuacauaaaugacauagaaaaaaaaauauguaaaauggaaaaaugcucauccguauucaauguagucaacucaucaauaggacuaauuaugguacuaucauuccuauuccuaaacuaa

SEQ ID NO: 5394 - RNA, 1263 nt, Artificial Sequence
  derived and/or modified CDS sequence (opt6) from Pf(Tz93-038)__BAM84758.1__CSP
augaugcgaaaacuagcaauacuaucaguaucaucauuccuauucguagaagcucuauuccaagaauaccaaugcuacggaucaucaucaaacaccagaguacuaaacgaacuaaacuacgacaacgcaggaacaaaccuauacaacgaacuagaaaugaacuauuauggaaaacaagaaaacugguauagucuaaaaaaaaacucaagaucacuaggagaaaaugaugacggaaacaacaacaauggagauaacggacgugaaggcaaagaugaagacaaacgagauggaaauaacgaagacaacgaaaaacuaagaaaaccaaaacacaaaaaacuaaaacaaccaggcgacggaaacccagacccaaacgcaaacccaaacguggacccaaaugcaaauccaaacguagacccaaacgcaaacccaaauguagacccgaacgccaacccaaacgcaaacccuaacgcuaacccaaacgcaaauccaaacgcaaacccaaacgcuaaccccaacgccaacccaaacgcaaaucccaacgcaaacccaaaugcaaacccaaacgcaaacccuaacgcaaaccccaaugcaaauccaaaugcaaaccccaacgcaaacccaaacgcaaacccaaacgcaaacccaaacguagauccaaacgcaaaucccaaugcaaacccaaacgcaaacccaaacgccaaccccaacgcaaacccaaaugcaaacccaaacgcaaauccaaacgcaaacccaaacgcaaacccaaacgcgaacccaaacgcaaacccaaaugccaacccaaacgcaaaccccaaugccaauccaaacgcaaauccaaacgcaaauccaaacgcaaacccaaacgcaaacccaaacgccaaccccaacaaaaacaaccaaggcaauggacaaggucauaacaugccaaacgacccuaacagaaacguagacgaaaacgcaaacgcaaacaacgcaguaaaaaacaacaacaacgaagaaccaucagauaaacacauaaaagaauaucuaaacaaaauacaaaacucuauaucaacugaauggucacccugcucaguaacaugcgguaauggaauacaaguacgcauaaaaccaggcucagccgacaaaccaaaagaccaacuagacuacauaaacgacauagaaaaaaaaaucugcaaaauggaaaaaugcagcucgguauucaacguaguaaacagcuccauaggacuaauaaugguccuauccuucuuauuccuuaacuaa

SEQ ID NO: 5395 - RNA, 1260 nt, Artificial Sequence
  derived and/or modified CDS sequence (opt6) from Pf(TMS31)__ACO49480.1__CSP
augagaaaacucgcaauacuaucaguuucaucauucuuauucguagaagcacuauuccaagaauaucaaugcuacggaagcucaucuaacacacgaguacuaaacgaacuuaacuacgacaacgcuggaacaaacuuauacaacgaacuagaaaugaauuacuacggaaaacaagaaaauugguacagccuaaaaaaaaacagccgaucauuaggagaaaacgacgacggcaacaacaacaacggagauaauggaagagaaggaaaagacgaagacaaaagagacggaaacaacgaagacaacgaaaaacuaagaaaacccaaacacaaaaaacucaaacaaccaggagacggaaacccagacccaaaugccaacccaaacguggacccaaacgcaaauccaaacguagacccaaacgcaaacccaaacgucgauccaaacgcaaacccaaacgcaaaccccaaugcaaacccaaacgcaaacccaaacgcaaacccaaaugcaaacccaaacgcaaacccaaacgcaaaccccaacgcaaacccaaacgcaaacccaaacgcaaauccaaacgcaaacccaaacgcaaauccaaacgcaaaccccaaugcaaacccaaacgcaaauccaaacgcuaacccaaacgcaaacccaaacgcaaacccaaacgcaaacccaaaugcaaauccaaacgcaaacccaaacgcaaaccccaacgcaaacccaaacgcaaacccaaaugcaaacccaaaugcaaacccaaacgccaacccaaacgcaaaccccaacgccaacccaaacgcaaacccaaacgcaaauccaaacgcaaacccaaacgcaaauccaaacgcaaacccaaacgcaaauccaaaugcaaauccaaacaaaaauaaccaaggaaauggccaaggacacaacaugccaaaugauccaaauagaaacguugacgaaaacgcaaacgcaaauaacgccguaaaaaacaacaauaaugaagaaccaucugacaaacacauagaacaauacuuaaaaaaaaugcaaaacuccuuaucaacagaauggucaccauguagcguaacaugcggaaacggaauacaagucagaauaaaaccaggaucagccaacaaacccaaagacgaauuagacuacgaaaaugacauagaaaaaaaaauaugcaaaauggaaaaaugcucaucaguauucaauguaguaaacucaucuauaggacuaauaaugguacuaucauucuuauucuuaaauuaa

SEQ ID NO: 5396 - RNA, 1260 nt, Artificial Sequence
  derived and/or modified CDS sequence (opt6) from Pf(TSY172)__ACO49517.1__CSP
augagaaaauuagcaauacuauccguaucaucuuuccuauucguagaagcacuauuucaagaauaccaaugcuacggaagcucaucaaacacacgaguacuaaaugaacuaaacuacgacaacgcagguacaaacuuauacaacgaauuagaaaugaauuacuauggaaaacaagaaaacugguacucacuaaaaaaaaauuccagauccuuaggagaaaacgacgacggcaacaacaacaacggagauaacggacgagaaggaaaagacgaagacaaaagagacggaaacaacgaagacaaugaaaaacuacguaaacccaaacacaaaaaauuaaaacaacccggagacggaaaucccgauccaaaugcaaacccaaacgucgauccaaacgcaaacccaaacguugauccaaacgcaaaccccaacguagaccccaacgcaaacccaaaugcaaauccaaacgcaaaucccaacgcaaacccaaacgcaaauccaaacgcaaacccaaacgcaaauccaaacgcaaaccccaacgcaaauccaaaugcaaacccuaaugcuaauccaaaugcaaacccaaacgccaacccaaacgcaaacccaaacgcaaauccaaacgcaaauccaaacgcaaacccaaaugcaaacccaaacgcaaacccaaacgcaaauccaaacgcaaacccaaacgcaaauccaaaugcaaacccaaaugcuaacccaaacgcaaacccaaacgcaaacccaaaugcaaacccaaacgcaaacccaaacgcaaacccaaacgcaaaccccaacgcaaacccaaacgccaauccaaacgcaaacccgaacgcaaacccaaaugcaaacccaaacgcaaacccaaacgcaaacccaaacaaaaacaaccaaggaaacggacaaggacacaauaugccaaacgacccaaauagaaaugucgacgaaaacgccaacgcaaacaacgcaguaaaaaauaacaacaaugaagaaccauccgacaaacacauagaacaguaccuaaaaaaaauacaaaacucauuaucaacagaauggucaccaugcagcguaacaugcgguaacggcauacaaguaagaauaaaaccaggauccgcaaacaaaccaaaagacgaacuagauuacgaaaacgacauagaaaaaaaaaucuguaaaauggaaaaaugcuccucagucuucaauguagucaacucaucaauaggauuaauaaugguacucucauuccuauuccuaaacuaa

SEQ ID NO: 5397 - RNA, 1251 nt, Artificial Sequence
  derived and/or modified CDS sequence (opt6) from Pf(Asembo Bay)__AAN87591.1__CSP
augaugagaaaauuagccauacuuucagucucaagcuuccucuucguagaagcauuauuccaagaauaccaaugcuacggcucauccagcaacacaagaguauuaaacgaauuaaauuacgacaacgcaggaacaaacuuauauaacgaacuagaaaugaacuacuacggaaaacaagaaaacugguauagccuaaaaaaaaacucaagaucacuaggagaaaacgaugauggcaacaacaacaacggagacaacggcagagaaggcaaagacgaagacaaaagagacggaaacaacgaagacaacgaaaaauuaagaaaaccaaaacauaaaaaacuaaaacaaccaggagacggaaaucccgacccaaaugcaaacccaaacguagacccaaacgcaaacccaaacguagacccaaacgcaaacccaaacguagacccaaacgcaaauccaaacgccaacccaaaugcaaacccaaacgcaaacccaaacgcaaacccaaacgcaaacccaaacgcaaacccaaaugcaaaccccaacgccaacccaaacgcaaaccccaacgcaaacccaaacgcaaacccaaacgcaaacccaaacgcaaacccaaacgcaaacccaaacgcaaacccaaacgcaaauccaaacguagaucccaacgccaacccaaacgcaaauccaaacgcaaacccaaacgcaaacccaaacgcaaacccaaacgcaaaucccaaugcaaacccaaaugcaaacccaaacgcaaacccaaacgcaaacccaaacgcaaacccaaaugcaaaccccaacgcaaacccaaaugcaaacccaaacgcaaacccaaacgcaaacccaaacgccaacccaaacgcaaauccaaacaaaaauaaccaaggaaacggacaaggacacaacaugccaaacgacccaaacagaaacgucgacgaaaacgccaaugcaaacaacgcaguaaaaaacaacaacaacgaagaaccaucagaccaacacauagaaaaauaccucaaaacaauacaaaauucauuauccacagaauggucacccugcaguguaacaugcggaaacggaauacaaguacgaauaaaacccggcucagccaauaaaccaaaagaccaacuagacuacgcaaacgacauagaaaaaaaaaucugcaaaauggaaaaaugcucauccguauucaacguaguaaacucauccauaggccucauaaugguccucucauuccucuuccuaaauuaa

SEQ ID NO: 5398 - RNA, 1251 nt, Artificial Sequence
  derived and/or modified CDS sequence (opt6) from Pf(Asembo Bay)__AAN87590.1__CSP
augaugagaaaacuagccauacuaucaguaucaucauucuuauucgucgaagccuuauuucaagaauaccaauguuacggaaguucaucaaacacaagaguacuaaaugaacuaaacuacgacaaugcaggaacaaacuuauacaacgaacuagaaaugaauuacuauggaaaacaagaaaacugguauucacuaaaaaaaaacuccagaucacuuggagaaaaugacgacggcaauaauaacaacggagacaacggaagagaaggaaaagacgaagacaaacgagacggaaacaaugaagacaaugaaaaacucagaaaaccaaaacacaaaaaacucaaacaacccggagauggaaacccagacccaaacgccaauccaaacguagaccccaaugcaaacccaaacguagacccaaaugcaaacccaaacguagacccaaacgcaaacccaaacgcaaauccaaacgccaauccaaacgcaaacccaaacgcaaauccaaacgccaauccgaaugcaaacccaaacgcaaaccccaaugcaaauccaaacgcaaauccaaaugcaaauccaaacgcaaacccaaacguagacccaaacgccaauccaaaugccaauccaaaugcaaacccaaacgcaaacccuaacgcaaauccaaaugcaaacccaaacgcaaaucccaacgcaaacccaaacgcaaacccaaacgccaacccaaaugcaaacccaaacgcaaauccaaacgcaaacccaaacgcaaauccaaaugcuaauccaaacgcaaacccaaacgcaaauccaaacgcaaacccaaaugcaaacccaaaugcuaacccaaacgcaaacccaaacgcaaacccaaacgcaaaccccaacaaaaacaaccaaggaaacggacaaggacacaacaugcccaacgaccccaacagaaacgucgacgaaaacgcaaaugcaaacaacgcaguaaaaaauaauaacaacgaagaaccauccgaccaacacaucgaaaaauaccucaaaacaauacaaaauucacuuagcacugaauggucacccugcagcguaaccugcgguaacggaauacaaguaagaauaaaaccaggcucagcaaacaaaccaaaagaucaacucgauuaugcaaaugacauagaaaaaaaaauaugcaaaauggaaaaaugcucaucaguauuuaacguagucaacucaucaauaggauuaauaaugguacuauccuuucuauucuuaaacuaa

SEQ ID NO: 5399 - RNA, 1251 nt, Artificial Sequence
  derived and/or modified CDS sequence (opt6) from Pf(Gha1108-097)__BAM84820.1__CSP
augaugagaaaacuagcaauacuaucaguaucaucauuuuuauuuguagaagcauuauuccaagaauaccaaugcuauggauccucuagcaacacaagaguauugaacgaacucaacuacgacaacgccggaacaaaucuauacaaugaauuagaaaugaacuacuacggaaaacaagaaaacugguauagucuaaaaaaaaacggacgcucacuaggagaaaacgacgaugguaacaacaauaacggagacaacggaagagaagggaaagacgaagacaaaagagacggaaauaacgaagacaacgaaaaacuaagaaaaccuaaacacaaaaaacuaaaacaaccagccgacgguaauccagacccaaacgccaacccaaacguagacccaaacgccaacccaaacguagacccaaacgcaaacccaaauguagauccaaacgcuaacccaaacgcaaauccaaacgccaauccuaacgcaaacccaaaugcaaauccaaaugccaacccaaacgcaaacccaaacgccaacccaaaugcaaaccccaacgcaaaccccaaugcaaacccaaacgcaaaucccaacgcaaauccaaacgcaaacccaaaugcgaacccaaacgcaaauccaaacguagacccaaacgcaaauccaaacgcaaacccaaacgcaaacccaaacgcaaaccccaacgcaaaccccaaugcaaacccaaaugcaaacccaaaugcaaauccaaacgcaaacccaaacgcaaauccaaacgcaaacccaaacgcaaacccaaacgccaacccaaacgcaaacccaaacgcaaacccaaacgcaaacccaaacgcaaacccaaacgcaaauccaaacgccaacccaaacaaaaacaaucaaggaaacggacaaggccauaauaugccaaaugaccccaaccgcaacgucgaugaaaacgcuaaugcaaacaacggaguaaaaaacaacaauaacgaagaacccucagacaaacacauagaacaauaccuaaaaagaauucaaaacucccuaucaacagaauggucaccaugcagcguaacaugcggaaacggaauacaaguacgaauaaaaccaggaucagcaaacaaaccaaaagacgaacuaaacuacgaaaacgacauagaaaaaaaaauaugcaaaauggaaaaaugcucaucaguauuuaauguaguaaauagcucaaucggacuuauaaugguacuaaguuuucucuuccuaaacuaa

SEQ ID NO: 5400 - RNA, 1251 nt, Artificial Sequence
  derived and/or modified CDS sequence (opt6) from Pf(MAD20)__AAA29550.1__CSP
augaugagaaaauuagcaauacuaucaguaucaucauuccuauucguagaagcacuauuccaagaauaccaaugcuacggaagcucaaguaacaccagaguauuaaacgaauuaaacuacgacaaugcaggaauaaaccuauacaacgaacuagaaaugaacuacuacggaaaacaagaaaacugguacagccuaaaaaaaaauucaagaucauuaggagaaaaugacgacggaaacaacaauaauggagacaacggaagagaaggaaaagaugaagacaaacgagacggaaacaacgaagacaacgaaaaauuacgaaaaccaaaacacaaaaaacuaaaacaaccaggagacggaaacccagacccaaacgcaaauccaaacgucgaccccaacgccaacccuaacgucgacccaaacgcaaacccaaacguagacccaaaugccaacccaaacgcaaauccuaaugcaaaccccaacgcaaacccaaacgcgaacccaaacgcaaacccaaacgcaaacccgaacgccaacccaaacgcaaauccaaaugcaaacccaaacgcaaacccaaacgcaaaccccaacgcaaacccaaacgcaaacccaaacgcaaacccaaaugccaacccaaacguagacccaaaugcaaaccccaaugccaacccaaacgcaaacccgaacgcaaaccccaacgcaaacccaaacgcaaaccccaacgcaaauccaaaugcaaacccuaacgcaaauccgaacgcaaaccccaaugcaaacccaaacgcaaacccaaacgcaaacccaaacgcaaacccaaacgcaaauccaaacgccaaccccaacgcaaacccaaaugcaaacccaaacgcaaacccuaacaaaaacaaccaaggaaauggacaaggccacaacaugccaaacgauccaaaucguaacguagaugaaaaugcaaacgcaaacaacgcaguaaaaaauaauaacaacgaagaaccaucagauaaacacauagaacaauacuuaaaaaaaauacaaaauucacuaucaacagaauggucaccuugcagcguaacaugcggcaacggcauacaaguacgaauaaaaccaggauccgcagacaaaccaaaagaccaacuagacuaugaaaacgacauagaaaaaaaaauaugcaaaauggaaaaaugcucauccguauuuaaugugguaaauucaucaauuggauuaauaaugguacuaucauuccuauuccucaacuaa

SEQ ID NO: 5401 - RNA, 1251 nt, Artificial Sequence
  derived and/or modified CDS sequence (opt6) from Pf(Pal97-002)__BAM84917.1__CSP
augaugagaaaacucgcaauauuaucaguauccucauuccuauuuguagaagcacuauuccaagaauaucaaugcuacggaagcuccucaaacacacgaguacuaaacgaacuaaacuacgacaacgccggaacaaaccuauacaacgaacuugaaaugaacuauuacggaaaacaagaaaauugguauucauuaaaaaaaaauucaagaucgcuaggagaaaaugacgacggcaacaacaacaacggugacaacggaagagaaggaaaagacgaagauaaacgagacggaaauaacgaagacaacgaaaaacuaagaaaaccuaaacacaaaaaacuaaaacaaccaggagacggcaacccggacccuaacgcaaacccaaacguagauccaaacgcaaacccaaacgucgacccaaacgcaaacccaaauguagacccaaacgcaaauccaaacgcaaaucccaacgcaaauccaaacgccaacccaaaugcaaacccaaaugcaaacccaaaugcaaauccaaacgcaaaccccaacgccaaccccaaugcuaacccaaacgcaaacccaaacgcaaacccaaaugcaaacccaaacgcaaacccaaaugcaaauccaaacgcaaacccaaacguagacccaaacgcaaauccaaacgcaaacccaaacgcaaacccaaaugcaaauccaaacgcaaacccaaacgcaaacccaaacgccaacccaaacgcaaauccaaacgcaaacccaaacgccaacccaaacgccaacccaaaugcaaacccaaaugcaaaccccaacgcaaauccaaaugcaaacccaaacgcaaacccaaacgcaaacccaaaugccaacccaaaugcaaauccaaauaaaaacaaccaaggcaacggacaaggccacaauaugccaaacgaccccaaccgaaacguagacgaaaaugcaaacgcaaacaacgccguaaaaaauaacaacaacgaagaaccaucagaccaacacauagaaaaauacauaaaaaaaauucaaaacucauuaucaacagaauggucaccauguagcguaacaugcggaaacggaauacaaguaagaauaaaaccaggcucagccgacaaacccaaaaacgaacuagacuacgaaaacgacauagaaaaaaaaauaugcaaaauggaaaaaugcagcucaguauucaacguaguuaacucaucaauaggacuaauaaugguacuaucauuuuuauuccucaacuaa

SEQ ID NO: 5402 - RNA, 1251 nt, Artificial Sequence
  derived and/or modified CDS sequence (opt6) from Pf(Pal97-102)__BAM84954.1__CSP
augaugagaaaauuagccauauuaucaguuucaucauuccuuuucguagaagcacucuuucaagaauaucaaugcuacggcucuuccucaaacacaagaguuuuaaacgaacucaacuaugacaaugcaggaacaaaccucuacaaugaacuagaaaugaacuacuacggcaaacaagaaaacugguacagccuaaaaaaaaacucacgaaguuuaggcgaaaacgacgacgguaacaacaauaacggagacaacggaagagaaggaaaagacgaagacaaaagagacggcaacaacgaagacaacgaaaaacuaagaaaaccaaaacacaaaaaacuaaaacaaccaggagauggaaauccagauccaaaugcaaauccaaacguagacccaaacgcaaaccccaacguagauccaaacgcaaacccaaacguagauccaaacgcaaaccccaacgcaaacccaaacgcaaacccaaacgcaaaccccaacgcaaauccaaaugcaaacccaaaugcaaaccccaacgcaaacccuaacgcaaacccaaacgccaaccccaaugcaaauccaaacgcaaacccaaacgccaacccaaaugccaacccaaaugcaaaccccaacgcaaaucccaacgcaaauccaaacgcaaacccaaacgcaaauccaaacgcaaacccuaacgcaaauccaaacgcaaauccaaacgcaaauccaaacgcaaauccaaacgcaaacccuaacgcaaacccaaacgcaaauccaaacgcaaacccuaacgcaaacccaaacgcaaacccaaacgcaaauccaaaugcaaauccaaacgcaaaccccaacgcaaacccaaacgcaaacccaaacgcaaacccaaacaaaaacaaccaaggaaacggacaaggacacaacaugccaaacgauccaaacagaaauguagacgaaaacgcaaacgcaaacaacgcaguaaaaaacaacaacaacgaagaaccaucagacaaacacauaaaagaauacuuaacaaaaauacaaaacuccauaucaacagaauggucacccugcaguguaacaugcggaaacggaauacaaguuagaauaaaaccaggaucagccggaaaaccaaaagacgaauuaaauuacgaaaacgauauagaaaaaaaaauaugcaaaauggaaaaaugcaguucagucuucaauguaguaaauucaucaauaggauuaauaaugguauuaucauuccuauuucuuaauuaa

SEQ ID NO: 5403 - RNA, 1251 nt, Artificial Sequence
  derived and/or modified CDS sequence (opt6) from Pf(PNG227-255)__BAM85044.1__CSP
augaugagaaaacuagcaauacucucaguaucauccuuccuuuucguagaagcauuauuccaagaauaccaaugcuacggauccucuucaaacacccgaguacuaaaugaacuaaauuaugacaacgcaggaacaaaucucuacaacgaauuagaaaugaacuacuacggaaaacaagaaaacugguacucauuaaaaaaaaacucaagaucccuaggagaaaaugacgacggaaauaacaacaacggugacaacggaagagaaggaaaagacgaagacaaaagagauggaaacaacgaagacaaugaaaaacuaagaaagccaaaacauaaaaaacuaaaacaacccggagauggaaacccugaccccaacgcaaacccaaauguagacccaaacgcaaacccaaacguagacccaaacgcaaacccaaauguagaccccaacgccaacccaaacguagacccaaacgcaaacccaaaugcaaauccaaaugcaaacccaaacgcaaacccaaacgcaaauccaaacgcaaauccaaacgcaaacccaaacgccaacccaaacgcaaaccccaacgcaaauccgaaugcaaauccaaacgcgaacccaaacgccaacccaaacgcaaacccaaauguagaccccaacgccaauccaaacgccaacccgaacgcaaauccaaacgcaaacccaaacgcaaauccaaaugcaaacccaaacgcaaaccccaacgcaaaccccaacgcaaacccaaaugcaaacccaaacgcaaacccaaacgcaaauccaaaugcaaacccaaaugcaaacccaaacgcaaaucccaacgcaaacccaaacgcaaacccaaacgcaaacccaaacgcaaacccaaacaaaaacaaucaaggaaacggucaaggacacaacaugccaaacgacccaaaccgaaacguagacgaaaacgccaacgccaauaacgcaguaaaaaacaacaauaacgaagaaccuucagacaaacauauagaacaauaccuaaaaaaaauccaaaacucacucucaacagaauggucaccaugcucagucacaugugguaacggcauacaaguaagaauaaaaccaggaucagcugacaaaccaaaagaccaauuagacuaugaaaacgacauagaaaaaaaaauaugcaaaauggagaaaugcagcucaguauuuaacguaguaaacucaucaauaggauuaauaaugguacucuccuuccuauucuuaaacuaa

SEQ ID NO: 5404 - RNA, 1251 nt, Artificial Sequence
  derived and/or modified CDS sequence (opt6) from Pf(PNG228-063)__BAM85045.1__CSP
augaugagaaaauuagccauacuaucaguuucguccuuucuauucgucgaagcacuauuccaagaauaucaauguuacggaagcucaagcaacacaagaguccuaaacgaacuaaauuacgacaacgcaggcacaaaccuauauaacgaacuagaaaugaacuacuauggaaaacaagaaaacugguacagucuaaaaaaaaacucaagaucauuaggagaaaacgacgacggcaauaacaacaacggagacaacggaagagaaggaaaagacgaagacaaaagagacggcaauaacgaagacaacgaaaaauuacguaaaccaaaacacaaaaaacugaaacaacccggagacggaaacccagacccaaaugcaaaccccaauguagacccaaacgcaaacccaaauguagauccaaacgcaaacccaaauguagacccaaacgcaaacccaaacgcaaacccaaaugcaaaccccaacgcaaacccaaaugcaaauccaaacgcaaauccaaacgcaaacccaaacgcaaacccgaacgcaaacccaaacgcaaacccaaacgcaaacccaaaugcaaacccaaaugcaaauccaaaugcaaacccaaaugcgaacccaaacgcaaacccaaacguagacccaaaugcaaacccaaaugcaaacccaaacgcaaacccaaaugcaaacccaaacgcaaacccaaacgcaaacccaaaugcaaaccccaaugcaaauccaaacgccaacccaaacgcaaacccaaacgccaacccaaacgcaaacccaaacgcaaacccaaaugcaaacccaaacgcaaacccaaacgcaaacccaaacgccaacccaaacgcaaacccuaacgcaaacccgaacaaaaauaaccaaggaaacggacaaggacacaacaugccaaaugaucccaacagaaauguagaugaaaacgcaaacgcaaacaacgcagucaaaaauaacaauaaugaagaaccaucagauaaacauauagaacaauaccuaaaaaaaauacaaaacucauuaucgaccgaauggucaccuuguucaguaacaugcggaaacggaauacaaguaagaauaaaaccaggaucagccggaaaauccaaagacgaacucgacuacgaaaacgacauagaaaaaaaaauaugcaaaauggaaaaauguagcucaguauucaacguaguaaacagcucaaucggacuaauaaugguauuauccuuccuauuccugaauuaa

SEQ ID NO: 5405 - RNA, 1251 nt, Artificial Sequence
  derived and/or modified CDS sequence (opt6) from Pf(PNG830-058)__BAM84987.1__CSP
augaugagaaaacuagccauauuaucaguaucaaguuuucucuuugucgaagcauuauuccaagaauaccaaugcuacggaagcucgagcaauacuagaguacucaaugaacuaaacuacgacaacgcaggcacaaacuuauauaacgaacuagaaaugaacuacuacggaaaacaagaaaauugguacagccuaaaaaaaaauucgagaucacuaggagaaaacgacgauggaaacaauaacaacggagacaacggcagagaaggaaaagaugaagacaaaagggacggaaauaacgaagacaacgaaaaacuacgcaaaccaaaacacaaaaaacuaaaacaacccggagacggaaacccagauccaaacgccaacccaaacguagacccgaacgcaaacccaaauguagacccaaacgcaaacccaaacguagaccccaacgcaaacccaaacgucgacccaaacgcaaacccaaaugcaaacccaaaugcaaacccaaaugcaaacccaaacgcaaacccaaaugcaaacccaaacgcgaacccaaacgcaaacccgaacgcaaacccaaacgcaaacccaaacgcaaauccaaaugcaaauccaaacgcaaauccaaacgcaaacccaaacgcaaauccaaacgcaaauccaaacgcaaauccuaaugcaaacccaaacgcaaacccgaaugcaaacccaaacgcaaacccaaacgcaaacccaaacgcaaaucccaaugcaaacccuaaugcaaaucccaaugcaaauccaaacgcaaauccaaacgcaaacccaaacgcaaaucccaacgcaaacccaaacgcaaacccaaacgcaaacccaaaugcaaacccaaaugcaaaccccaauaagaacaaccaaggaaacggacaaggucacaacaugccaaacgaucccaaucgaaacguagacgaaaaugccaacgcuaauaacgcagucaaaaacaacaacaacgaagaacccucagauaaacacauagaacaauaccuaaaaaaaauccaaaacucacucucaacagaauggucccccugcucaguaacauguggaaacggaauacaaguaagaauaaaaccaggaucagcaaacaaaccaaaagacgaacuagacuacgaaaaugacauagaaaaaaaaauauguaaaauggaaaaaugcagcucaguauuuaacguagucaacucaucaauaggacucauaaugguauuauccuuccuauucuuaaacuaa

SEQ ID NO: 5406 - RNA, 1251 nt, Artificial Sequence
  derived and/or modified CDS sequence (opt6) from Pf(PNG903-136)__BAM84993.1__CSP
augaugcgaaaacuagcaauucuaucaguaucaucauuccuauucguagaagcccuauuccaagaauaucaaugcuacggaagcagcucaaauacaagaguacuaaacgaacuaaauuacgacaacgcaggaacaaaucucuauaacgaauuagaaaugaacuacuacggaaaacaagaaaacugguacucacuaaaaaaaaacuccagaucacuaggagaaaacgacgacggaaacaauaacaacggcgacaacggucgagaaggaaaagacgaagacaaacgcgacggaaacaacgaagacaaugaaaaacucagaaaaccaaaacauaaaaaacuaaaacaaccaggagauggaaacccagacccgaaugcaaacccaaacguagacccaaaugcaaacccaaauguagacccgaaugcaaacccaaacguagacccaaaugcaaauccaaacgccaacccaaacgccaacccaaacgcaaaccccaacgcaaacccaaacgcaaaucccaacgcaaacccaaacgcaaacccaaacgcuaacccaaacgcaaacccaaacgcaaacccaaacgcaaacccaaaugcaaauccaaacgcaaacccgaacgcaaacccaaacgcaaacccaaauguagacccaaacgcaaacccaaacgcaaacccaaacgcaaacccaaaugccaaccccaacgcaaauccaaaugcaaacccaaacgccaaccccaacgcaaacccaaacgcuaaccccaaugccaacccaaaugcaaacccaaacgcaaauccaaacgccaacccaaacgcaaacccaaacgccaacccaaacgcaaacccaaacgcaaauccaaacgcaaacccaaacgcaaacccaaacaaaaacaaccaaggaaacggacaaggccauaacaugccaaacgacccaaacagaaacguagacgaaaacgcaaacgccaauaacgcaguaaaaaacaacaacaacgaagaaccaucagauaaacauauagaacaauacuuaaaaaaaauacaaaacucacuaucaacagaauggucaccaugcucaguaacaugcggaaacggaauacaaguaagaauaaaaccagguucagcaaacaaaccaaaagaugaacuagauuacgaaaacgauauagaaaaaaaaauaugcaaaauggaaaaauguucaucaguauuuaacgucgucaacucaucaauaggacucauaaugguacuaucauuccuauucuuaaauuaa

SEQ ID NO: 5407 - RNA, 1251 nt, Artificial Sequence
  derived and/or modified CDS sequence (opt6) from Pf(Tz03-086)__BAM84805.1__CSP
augaugaggaaacuagcaauauuaucagucucguccuuucuauucguagaagcucuauuucaagaauaccaaugcuacggaaguucaucaaacaccagaguauuaaacgaacuaaacuacgacaacgcaggcacgaacuuauacaacgaacuagaaaugaacuauuacggaaaacaagaaaacugguacagccuaaaaaaaaacucaagaucacuaggagaaaaugacgacggcaauaauaacaacggagacaacggaagagaaggaaaagacgaagacaaaagagacggaaacaacgaagacaacgaaaaacuacgcaagccuaaacacaaaaaacuaaaacaacccgcugacggaaacccagaccccaacgcaaauccaaauguagauccaaacgcaaacccaaacguagacccaaaugcaaauccaaauguagacccaaacgcaaacccaaacgcaaacccaaacgcaaacccaaacgccaacccaaacgccaacccaaacgcaaacccaaacgcaaacccaaacgcaaaccccaacgcgaaucccaacgcaaacccaaacgcaaacccaaacgcaaacccaaacgcaaacccaaacgccaacccaaacgccaacccaaaugcaaacccaaacgcaaauccaaacgcaaaccccaacguagacccgaacgcaaacccaaaugcaaauccaaaugcaaacccaaacgcaaacccaaacgcaaacccaaacgcaaacccaaacgcaaacccaaacgcaaaccccaacgcaaacccaaacgcaaacccaaaugcaaacccaaacgcaaaccccaacgcaaacccaaacgcaaacccaaacgcuaacccaaaugcaaacccaaacgcaaaccccaacaaaaacaaccaaggaaacggacaaggacacaauaugccaaaugacccaaaccgaaacguagaugaaaacgcaaacgcaaacaaugcaguaaaaaauaacaacaacgaagaaccaucagacaaacauauaaccgaauaucuaaaaaaaauucaaaauucccuaucaacagaauggucaccaugcucuguaacaugcggaaacggaauacaaguaagaauaaaaccaggaucugcaggaaaaucaaaaaacgaacuagauuaugaaaacgauauagaaaaaaaaauauguaaaauggaaaaaugcucaucaguuuucaacguagucaacaguuccauaggacuaauaaugguauuaucauucuuauucuuaaacuaa

SEQ ID NO: 5408 - RNA, 1251 nt, Artificial Sequence
  derived and/or modified CDS sequence (opt6) from Pf(Tz93-009)__BAM84750.1__CSP
augaugagaaaacuagcaauacuaucaguaucaucauuuuuauucguagaagcauuauuccaagaauaccaaugcuacggauccucaucaaacacaagaguauuaaacgaauuaaacuacgacaacgcuggaacaaaccucuacaaugaauuagaaaugaauuacuauggaaaacaagaaaacugguacucacuaaaaaaaaauucaagauccuuaggagaaaacgacgacggaaacaacaacaacggcgacaacggacgagaaggaaaagacgaagacaaacgagacggaaacaacgaagacaacgaaaaauuacgaaaaccaaaacacaaaaaacuuaaacaaccaggagacggaaauccagauccaaacgccaacccaaacguagacccaaacgcaaacccaaauguagaccccaaugcaaauccaaacgucgacccaaacgcaaaccccaacgcaaauccaaacgcaaacccaaacgccaacccaaacgcaaauccaaacgccaacccaaacgcaaaccccaacgcaaacccaaacgcaaaucccaacgcaaacccaaaugcgaaccccaacgcaaauccaaacgcaaacccaaacgcaaacccaaaugccaacccaaacgcaaacccgaauguagacccaaacgcaaacccaaacgccaacccaaacgcaaacccaaacgcaaacccaaaugcaaacccaaaugcaaacccaaacgcaaacccgaacgcaaacccaaaugcaaauccaaacgcaaacccaaacgcaaacccaaaugcuaacccaaacgcaaacccaaacgcaaaccccaacgcaaauccaaacgcaaaccccaacgcaaacccaaaugcaaauccaaacgcaaacccaaauaaaaacaaccaaggaaacggacaaggacacaacaugccaaacgacccaaauagaaacguugacgaaaacgcaaacgccaacaacgcaguaaaaaacaacaacaaugaagaaccauccgacaaacacauaaaagaauaccuaacaaaaauaaaaaacucaauaucaacagaauggucacccugcagcguaacuuguggcaacggaauacaaguaagaauaaaaccaggaucagccaacaaacccaaagacgaacuagacuacgaaaacgauauagaaaaaaaaauauguaaaauggaaaaaugcucaucagucuucaacguagucaacuccucaauaggccuaauaaugguacucucauuccuauucuuaaauuaa

SEQ ID NO: 5409 - RNA, 1251 nt, Artificial Sequence
  derived and/or modified CDS sequence (opt6) from Pf(Van98M305-147)__BAM85260.1__CSP
augaugagaaaacuagcaauauuaucaguuucaagcuuccucuucguugaagcacuauuccaagaauaccaaugcuacggcagcucaucaaacaccagaguucuaaacgaacucaacuacgacaaugcaggaacaaaccuauacaacgaauuagaaaugaacuacuacggaaaacaagaaaacugguacucacuuaaaaaaaauucacgaucauuaggagaaaacgacgacggaaacaauaacaacggagacaacggccgcgaaggaaaagacgaagacaaaagagacggaaacaacgaagacaacgaaaaacuaagaaaaccaaaacacaaaaaauuaaaacaacccggagacggaaaucccgacccaaacgcaaauccaaacguagaucccaacgcuaauccaaacguagacccaaacgcaaacccaaacguagacccaaacgcaaaccccaacgcaaacccaaacgcaaauccaaacgccaacccaaacgcaaacccaaacgcaaacccaaaugccaacccaaacgcaaauccaaaugcaaauccaaacgcaaaccccaaugcaaaccccaacgccaacccaaacgcaaacccuaaugccaacccaaacgcaaacccaaaugcaaacccaaacguagacccaaacgcaaaccccaacgcaaacccaaaugcaaaccccaaugcaaaccccaacgcaaauccaaaugcaaacccaaacgcaaacccaaacgcaaauccaaacgcaaauccaaacgccaaccccaacgcaaacccaaacgcaaacccaaacgcaaacccaaacgccaacccaaacgcaaacccaaacgcaaacccaaacgcaaacccaaacgcaaacccaaacgcaaacccaaacaaaaacaaccaaggcaauggacaaggacacaacaugccaaacgaccccaacagaaacguagacgaaaaugcaaacgccaacaaugccguaaaaaacaacaacaacgaagaaccaucagacaaacacauagaacaauaccucaaaaaaauacaaaacucauuaucaacagaauggucacccugcucaguaacaugcggaaacggaauccaaguaagaauaaaaccaggaucggccgacaaaccaaaagaucaacuagacuacgaaaacgacauagaaaagaaaauaugcaaaauggaaaaaugcagcuccguauucaacguaguaaauucaucaauaggacuaaucaugguccucucauuccuauuucuaaacuaa

SEQ ID NO: 5410 - RNA, 1251 nt, Artificial Sequence
  derived and/or modified CDS sequence (opt6) from Pf(Van98P226-97)__BAM85298.1__CSP
augaugagaaaacuagccauccuaucaguaucaucauuccuauucguagaagcacuauuccaagaauaccaaugcuacggaucauccucaaacacacgaguauuaaacgaacuaaacuacgacaacgcaggaacaaaccuauacaacgaacuagaaaugaacuacuauggaaaacaagaaaacugguacagcuuaaaaaaaaacucaagaucacuaggagaaaacgacgauggaaacaauaacaacggagacaacggcagagaaggaaaagaugaagacaaaagagacggaaacaacgaagauaaugaaaaacuaagaaaaccaaaacacaaaaaacuaaaacaacccggagacggaaaucccgaccccaaugcaaaccccaacguagacccaaaugcaaauccaaacguagacccaaaugcaaacccaaaugucgacccaaacgcaaacccaaacgcaaacccaaaugcaaacccaaaugcaaacccaaacgcaaacccaaacgccaaccccaaugcaaauccaaacgcaaauccaaaugcuaauccaaaugcaaauccaaaugcaaacccaaacgcaaauccaaaugcaaacccaaacgcaaacccaaacgcaaacccaaacgcaaacccaaacgccaacccaaacgcaaaccccaacgccaacccaaacgcaaaucccaacgcaaacccaaacgcaaacccaaacgcgaauccaaacgcaaacccaaaugccaacccaaaugcaaacccaaaugcaaacccaaaugcaaacccaaacgcaaacccaaaugccaacccaaacgcaaacccaaacgcaaaucccaaugccaacccaaaugccaacccaaacgcaaacccaaacgcaaacccaaauaaaaacaaccaagguaacggacaaggacauaacaugccaaacgauccaaacagaaacguagacgaaaacgcaaacgcaaacaacgccgucaaaaauaacaacaacgaagaaccaucagacaaacauauagagcaauaccucaaaaaaauacaaaacucacuauccacugaaugguccccuugcucagucacuugcggaaacggaauacaaguccguauaaaacccggauccgcaaacaaaccaaaagacgaauuagacuacgaaaacgacaucgaaaaaaaaauauguaaaauggaaaaaugcucaucagucuucaauguagucaacucauccauaggacuaauaaugguacuaucauuuuuauuuuuaaauuaa

SEQ ID NO: 5411 - RNA, 1251 nt, Artificial Sequence
  derived and/or modified CDS sequence (opt6) from Pf(Yaounde)__AAN87614.1__CSP
augaugagaaaacucgcaauacuuucaguaucaaguuuccuauuuguagaagccuuauuccaagaauaccaauguuauggaagcucaagcaacacacgaguauuaaacgaauuaaauuaugacaaugcaggcacaaaucuauacaacgaacuagaaaugaacuacuacggaaaacaagaaaacugguacucacuaaaaaaaaacucccgaucacuaggagaaaacgacgacggaaacaauaauaacggagacaacggacgugaaggaaaagacgaagacaaaagagacggaaacaacgaagauaaugaaaaacuuagaaaacccaaacacaaaaaacuaaaacaaccagcagacggaaauccagacccaaacgcaaauccaaacguagacccaaacgcaaauccaaacgucgacccaaacgcaaacccaaacguagacccaaaugcaaaccccaacgcaaacccaaacgccaacccaaacgcaaacccaaacgcaaaccccaacgcaaacccaaacgcaaacccgaacgcaaacccaaacgcaaacccaaaugccaacccaaaugcaaacccaaacgcaaacccaaaugcaaauccaaauguagacccaaaugcaaacccaaacgccaaccccaacgcaaacccaaacgcaaacccaaacgcaaaccccaacgcuaacccaaaugcaaacccaaacgcaaacccaaacgcuaauccaaaugcaaacccaaacgccaacccaaaugcaaacccaaacgccaacccaaacgcaaacccaaacgcaaacccaaaugcaaacccaaaugcuaacccaaaugcaaacccaaacgcaaacccaaacgcaaaccccaacgcaaacccaaaugcaaacccaaacaaaaacaaccaaggcaacggacaaggccacaacaugccaaacgacccaaacagaaacguagacgaaaacgccaacgcaaacaaugcaguaaaaaauaacaacaacgaagaacccucagaccaacacauagaaaaauaccuaaaaauaauaaaaaauaguuuaucaacagaauggucaccuugcucaguaaccugcggcaauggcauacaaguacgcauaaaaccggguucagcaaacaaaccaaaagaccaacuagacuacgcaaacgacauagaaaaaaaaauaugcaaaauggaaaaaugcagcucaguauuuaacguuguaaacuccucaauaggacucaucaugguacuaucauuccuauuccuaaacuaa

SEQ ID NO: 5412 - RNA, 1248 nt, Artificial Sequence
  derived and/or modified CDS sequence (opt6) from Pf(A98)__ACO49328.1__CSP
augcgaaaacuagccauacuaucagucucuucauuucuauucguagaggcccuauuccaagaauaccaaugcuacggaaguucauccaacacaagagucuuaaaugaacuaaauuacgacaacgcaggaacaaacuuauacaaugaacuagaaaugaacuacuacggaaaacaagaaaacugguacucccuaaaaaaaaacucacgaucauuaggugaaaacgacgacggaaacaacaacaauggagauaauggaagagaaggaaaagacgaagacaaaagagacggaaacaaugaagacaaugaaaaauuacgaaaaccaaaacacaaaaaacuaaaacaacccggagacggaaaucccgacccgaacgcaaacccaaacguagauccaaacgcaaacccaaacguagaccccaacgcaaacccaaauguagacccaaacgcaaacccuaacgccaacccaaacgcaaacccaaacgcaaaccccaacgcaaauccaaacgcaaaccccaacgcaaacccuaacgcaaacccaaaugcaaacccaaacgcaaacccaaaugcaaacccaaacgcaaaccccaacgccaacccaaaugcaaaccccaacgcaaacccaaacgcaaaccccaacgcaaacccaaacgcaaacccaaacgcaaacccaaacgcuaacccaaacgccaacccaaacgcaaauccaaacgcaaauccaaacgcuaaccccaacgcaaacccaaaugcaaaccccaacgcaaacccaaacgcaaauccaaacgcaaauccuaacgcaaacccaaaugcaaacccaaacgcuaacccuaacgccaauccaaacgcaaacccuaaugcaaacccaaacgcaaacccaaauaaaaacaaucaaggaaacggacaaggacacaacaugccaaacgacccaaacagaaacguagacgaaaacgcaaacgcaaacaaugcagucaaaaacaacaacaacgaagaacccucagacaaacacauagaacaauaucuaaaaaacauacaaaacucccuaucaacugaauggagcccaugcucaguaacaugcggaaacggcauacaaguaagaauaaaacccggaucagcaaacaaaccaaaagacgaacuagacuacgaaaacgacaucgaaaaaaaaauaugcaaaauggaaaaaugcagcucaguauucaacguaguaaacagcucaauaggacuaauaaugguauuaucauucuuauuucuaaacuaa

SEQ ID NO: 5413 - RNA, 1248 nt, Artificial Sequence
  derived and/or modified CDS sequence (opt6) from Pf(B60)__ACO49339.1__CSP
augcgaaaauuagcaauccuaucaguaucaaguuuucuauuugucgaagcacuauuccaagaauaccaaugcuacggaagcucaaguaacacaagaguacuaaacgaauuaaauuacgacaaugccggaacaaaccuauacaacgaacuagaaaugaacuacuacggaaaacaggaaaacugguacuccuuaaaaaaaaacucacgcucacuaggagaaaacgacgacggcaacaacaacaauggagacaauggaagagaaggaaaagaugaagacaaaagagacggaaacaacgaagacaacgaaaaacuaagaaaaccaaaacacaaaaaacucaaacaaccaggagacggaaacccagacccaaacgcaaauccaaacguugacccaaacgcaaacccaaacgucgacccaaaugcaaacccaaauguagauccaaaugcaaacccaaacguagaucccaacgccaacccaaacgcaaacccaaaugcaaauccaaacgcaaauccaaacgcaaaccccaacgcaaacccaaacgcaaacccaaacgcaaacccgaacgcaaacccaaacgcaaacccaaacgccaacccaaacgcaaacccaaaugcaaacccgaacgcaaauccaaacgcaaacccaaaugccaacccaaacgcaaauccaaaugcaaauccaaacgcaaacccaaacgccaacccaaacgcaaacccaaacgcaaacccaaacgccaauccaaaugcaaacccaaaugcaaacccaaacgcaaacccaaacgcaaauccaaaugcaaacccaaaugcaaacccaaaugcaaacccaaacgcaaaccccaacgcaaacccaaacgcaaacccaaacgcaaacccaaacaaaaauaaccaaggaaacggacaaggacacaacaugccaaacgaccccaacagaaacguagaugaaaacgccaacgccaacaacgcaguaaaaaauaauaauaaugaagaaccaucagacaaacacauagaacaauaccuaaaaaaaauacaaaauucacuaucaacagaauggucaccuugcucuguaacaugcggaaacggaauacaaguucgaauaaaaccaggcucagcaaauaaaccaaaagacgaacuagacuacgaaaacgacauugaaaaaaaaauaugcaaaauggaaaaaugcucaucagucuucaacguaguuaacaguucaaucggauuaauaaugguacucucauuccuauuucuaaacuaa

SEQ ID NO: 5414 - RNA, 1248 nt, Artificial Sequence
  derived and/or modified CDS sequence (opt6) from Pf(TM323)__ACO49493.1__CSP
augagaaaacuagccaucuuaucaguaucaagcuuccuauucguagaagcacuauuccaagaauaucaauguuauggaucaucaucuaacacuagaguacuaaacgaauuaaacuacgacaacgcaggaacaaaccuauacaaugaauuagaaaugaacuacuacggcaaacaagaaaacugguacagccucaaaaaaaacuccagaucacuaggagaaaacgacgacggaaauaacaacaacggagacaacggacgcgaaggcaaagacgaagauaaaagagacggaaacaaugaagacaacgaaaaacuuagaaaaccaaaacacaaaaaacuaaaacaacccggagauggaaaccccgacccaaacgcaaacccaaacgucgacccaaacgcaaacccaaacguagacccaaaugcaaauccuaacguagacccaaacgcuaacccaaacgcaaaccccaacgcuaacccaaacgcaaacccaaacgcaaacccaaacgcaaacccuaacgcaaacccaaaugcaaacccaaaugcaaacccaaaugcaaacccaaacgcaaauccuaacgccaacccaaacgcaaaccccaacgcaaacccaaaugcaaaccccaacgcaaacccaaacgcaaacccaaaugcaaauccaaacgcaaacccaaacgcaaauccaaacgccaacccaaacgcaaacccaaacgcaaacccaaaugcuaacccaaacgcaaacccaaacgcaaacccaaacgcaaauccaaacgccaaccccaaugccaauccaaaugccaauccaaacgcaaacccaaacgcuaauccaaacgcaaacccaaacgcaaacccaaacgccaaccccaacgcaaauccaaauaaaaacaaccaaggaaacggacaaggacacaacaugccaaacgacccaaacagaaaugucgaugaaaacgcaaacgcaaacaaugcaguaaaaaauaacaauaacgaagaacccucagacaaacacauagaaaaauaccuaaaagaaauccaaaacucacucucaacagaauggucaccauguaguguaaccugcggaaacggaauacaaguacgaauaaaaccaggaucagcaaauaaaccaaaagaccaauuagacuacgaaaacgacauagaaaaaaaaauaugcaaaauggaaaaaugcuccuccguauucaacguaguaaacucaucaauaggacuaauaaugguauuauccuuccuauuccuaaacuaa

SEQ ID NO: 5415 - RNA, 1239 nt, Artificial Sequence
  derived and/or modified CDS sequence (opt6) from Pf(22)__AGR53780.1__CSP
augaugagaaaacucgccauacuuucaguaucaucauuccuauucguagaagcacuauuucaagaauaccaaugcuacggcucacccagcaauacccgaguauuaaacgaauuaaacuacgacaacgcaggaacaaacuuauacaaugaauuagaaaugaauuauuacggaaaacaagaaaacugguacucacuaaaaaaaaacucaagaucacuaggagaaaacgacgacggaaacaacaauaacggagacaacggacgagaaggaaaagacgaagacaaacgagacggaaauaaugaagacaacgaaaaauuaagaaaaccaaaacacaaaaaacuaaaacaaccagccgacggaaacccggacccaaacgcuaacccaaacguagacccuaacgcaaaccccaauguagacccaaacgcaaaccccaacguagacccaaacgcaaacccaaacgcaaacccaaacgccaacccaaaugcaaacccaaacgcgaacccaaacgcaaacccaaacgcaaacccaaaugcaaacccaaacgcaaacccaaacgcaaauccaaacgcaaacccaaaugcaaauccaaacgcaaacccaaacgcaaauccaaacgccaacccaaacguagacccaaaugcaaacccaaacgcaaacccaaacgcaaaccccaacgcaaacccaaacgccaacccaaacgccaauccaaacgcaaacccaaaugccaauccaaacgcaaacccaaacgcaaacccaaaugcaaacccaaaugcaaacccaaacgcaaauccaaacgcaaacccaaacgcaaacccaaacgcaaacccaaacgcaaacccaaacgcaaacccaaacgcaaacccaaauaaaaauaaccaaggaaacggucaaggacauaacaugccaaacgacccaaacagaaacguagacgaaaacgcaaaugccaacaacgccguaaaaaacaacaacaacgaagaaccauccgauaaacacaucgaacaauacuuaaaaacaauuaaaaacucacuaucaacagaauggucaccaugcucaguaacaugcggaaacggcauccaaguaagaauaaaacccggaucagccaacaaaccaaaagacgaauuaaauuacgaaaacgauaucgaaaaaaaaauauguaaaauggaaaaaugcucaucaguauuuaacguaguaaacucaucaauagggcuaauaaugguacuuucuuuucucuuccuaaacuaa

SEQ ID NO: 5416 - RNA, 1239 nt, Artificial Sequence
  derived and/or modified CDS sequence (opt6) from Pf(Amazonas)__AAN87605.1__CSP
augaugagaaaacucgcaauacuaucggucucauccuuucuauucguagaagcccuauuccaagaauaccaaugcuacggaucaucaucaaacacaagaguacuaaacgaacuaaacuaugacaacgcaggaacaaauuuauacaacgaauuagaaaugaacuacuauggaaaacaagaaaacugguauagccuaaaaaaaaacucaagaucacuaggagaaaacgaugacggaaacaacaacaacggagacaacggaagagaaggaaaagacgaagacaaaagagacggcaacaacgaagauaacgaaaaacuacgaaaaccaaaacacaaaaaacuaaaacaaccugcagacggaaacccagacccaaacgcaaauccaaacguugaccccaacgcaaacccaaaugucgaccccaaugcaaauccaaacguagacccaaaugcaaacccaaacgcaaacccaaacgcaaacccaaacgcaaaccccaacgcuaauccaaacgcaaauccaaacgcuaacccaaacgccaaccccaacgcaaaccccaacgcaaacccaaacgccaacccaaacgcaaauccaaaugcaaacccaaacgcaaauccaaacgcaaaccccaacguagacccaaacgcaaauccaaacgcaaauccaaacgcaaacccaaacgcaaauccaaaugcaaacccaaacgcaaacccaaacgcaaacccaaacgccaacccaaaugcuaauccaaacgcaaaccccaaugcaaacccuaacgcaaauccaaacgccaacccaaacgcuaacccaaacgcaaacccaaacgcaaacccaaacgcaaacccaaacgcaaacccaaacgcaaacccaaacaaaaauaaccaaggaaacggacaaggacacaacaugccaaacgacccaaaccgaaacguagaugaaaaugcaaacgcaaacaacgcagucaaaaacaauaauaacgaagaaccaucagaccaacacauagaaaaauaccucaaaagaauacaaaacucgcucucaacagaauggucaccaugcaguguaaccugcggaaacggaauacaaguaagaauaaaaccaggcucagcuaacaaaccaaaagacgaacuagacuacgaaaacgacauagaaaaaaaaauauguaaaauggaaaaaugcucaucagucuucaacguaguaaauucauccaucggauuaauaaugguacuaucauucuuauucuuaaauuaa

SEQ ID NO: 5417 - RNA, 1239 nt, Artificial Sequence
  derived and/or modified CDS sequence (opt6) from Pf(Amazonas)__AAN87598.1__CSP
augaugagaaaauuagccauauuaucaguaucaagcuucuuauucguagaagcacuauuccaagaauaccaaugcuacggaucuucaucaaacacuagaguacuaaaugaacuaaacuacgacaacgcaggaacaaaccuauauaacgaacuagaaaugaacuacuacggaaaacaagaaaauugguacaguuuaaaaaaaaacucaagaucacucggagaaaacgacgacggaaacaacaacaacggagacaacggaagagaaggaaaagacgaagacaaaagagacggaaacaacgaagacaacgaaaaacuaagaaaaccaaaacauaaaaaacucaaacaaccagcagacggcaacccagauccuaaugcaaacccaaacguagaccccaacgccaauccaaacguagacccaaacgcaaacccaaacguagacccaaacgcaaacccaaacgcuaacccaaacgcaaacccaaacgcaaacccaaacgcaaauccaaacgcaaauccaaacgcaaacccaaacgcuaacccaaaugcaaacccaaacgcaaacccaaacgcaaacccaaacgcaaauccaaacgcaaacccaaacgccaauccaaacgcaaauccaaacguagacccaaacgcaaaucccaacgcaaacccaaacgcaaaccccaacgcaaacccuaaugcaaacccaaacgcaaauccaaacgcaaauccaaacgcaaacccaaacgccaacccaaacgcaaacccaaacgcaaacccaaacgcaaacccaaacgcaaacccaaacgcaaacccaaaugcaaaccccaaugcaaacccaaaugcaaauccaaacgcaaauccuaacgcaaacccaaacaaaaacaaccaaggaaacggacaaggacacaauaugccaaaugacccaaaucgaaauguagacgaaaacgcaaacgcaaacaacgcaguaaaaaacaacaacaacgaagaaccaucagacaaacacauaaaagaauaucuaaaaauaauccaaaacucccuaucaacagaauggucaccaugcagcguaaccugcgguaacggaauacaagucagaauaaaaccaggaucagcuggaaaaccgaaagacgaauuagacuacgcuaaugacauagaaaaaaaaauauguaaaauggaaaaaugcucuucagucuuuaacguaguaaacucauccauaggacucauaaugguacuaucauuccuauuucuuaacuaa

SEQ ID NO: 5418 - RNA, 1239 nt, Artificial Sequence
  derived and/or modified CDS sequence (opt6) from Pf(Asembo Bay)__AAN87611.1__CSP
augaugagaaaacuagccauauuaucaguaucauccuuucuauuuguagaagcacuauuucaagaauaucaaugcuacggcagcucauccaacacacgaguacuaaacgaauuaaacuacgacaacgccggaacaaaccuauauaacgaacuagaaaugaauuauuauggcaaacaagaaaacugguacagcuuaaaaaaaaacucacgcucccuaggagaaaacgacgacggcaacaacaacaacggagacaacgguagagaaggaaaagacgaagacaaaagagauggaaacaacgaagacaacgaaaaacuaagaaaacccaaacacaaaaaacuaaaacaaccagcagacggaaauccagacccaaacgccaacccaaacguagauccaaacgcaaacccaaacgucgaccccaacgcaaaucccaacguagacccaaaugcaaacccaaacgcaaacccaaacgcaaacccaaacgcaaacccaaacgcaaacccaaacgcaaacccaaaugcaaacccaaacgcaaauccaaaugcaaacccaaacgcaaacccuaacgcaaacccaaacgcuaacccaaacgccaacccaaacgcaaacccaaacgcaaacccaaaugcaaacccaaacgcaaacccaaauguagacccaaacgcaaacccaaacgcaaacccaaacgcaaacccaaacgcaaauccaaacgcaaauccaaaugcaaacccaaacgcaaacccaaacgcaaacccaaacgcaaacccaaacgcaaacccaaacgcaaacccaaaugcaaaccccaacgcaaacccuaacgcaaacccaaacgcaaauccaaacgcaaauccaaacgcaaacccaaauaaaaacaaccaaggcaacggccaaggacacaacaugccaaacgacccaaaccgaaacguagacgaaaacgcaaacgcaaacaaugcaguaaaaaacaacaauaacgaagaaccaucagacaaacacauagaacaguaccuaaaaauaaucaaaaacucacucuccacagaauggucacccuguucagucacaugcggcaacgguauacaaguccgaauaaaaccaggaucagcaaacaaaccaaaagacgaacuagacuacgcaaacgacauagaaaaaaaaauaugcaaaauggaaaaaugcucaucaguuuucaauguaguaaacuccagcauaggacucauaaugguccuaucauuccuauuccuaaacuaa

SEQ ID NO: 5419 - RNA, 1239 nt, Artificial Sequence
  derived and/or modified CDS sequence (opt6) from Pf(Asembo Bay)__AAN87589.1__CSP
augaugagaaaacuagcaauacuauccguaucaagcuuccuauucguagaagcacuauuccaagaauaccaaugcuacggaucaucaucaaauaccagaguccuaaacgaauuaaacuacgacaacgcaggaacaaaccuauacaacgaacuagaaaugaacuacuacggaaaacaagaaaacugguacucacucaaaaaaaacucacgaucucuaggcgaaaaugacgacggaaacaacaacaauggagacaacggccgagaaggaaaagacgaagacaaaagggacggaaacaacgaagacaacgaaaaauuaagaaaacccaaacacaaaaaacuaaaacaaccagcagacggaaauccagacccaaaugcaaacccaaacgucgacccaaacgcaaacccaaacguagacccaaacgcaaauccaaauguggacccaaacgcaaacccaaaugcaaacccaaacgcaaauccaaacgcaaauccaaacgcaaacccaaacgccaauccaaaugcaaacccaaaugcaaacccaaacgcaaacccaaacgcaaacccaaacgcaaaccccaauguagacccaaaugccaauccaaacgcaaauccaaaugcaaacccaaacgcaaacccaaacgcaaacccaaacgcaaacccaaacgcaaacccaaacgcaaacccuaacgcaaauccaaacgcuaaccccaacgcaaacccuaaugccaacccaaacgcaaacccaaaugcaaauccaaacgcaaacccaaaugcaaacccaaacgcaaaccccaacgcaaaccccaacgcaaacccaaaugcaaacccaaacgcaaacccaaaugcaaacccaaaugcaaacccaaauaaaaacaaccaaggaaauggccaaggacacaacaugccuaacgacccaaacagaaacgucgacgaaaacgcaaaugcaaacaacgcaguaaagaacaacaacaacgaagaaccaucagaucaacacauagaaaaauacuuaaaaaaaauacaaaauucauuaucaaccgaauggucaccaugcucaguaaccuguggaaauggaauacaaguaagaaucaaacccggaucagcaaacaaaccaaaagaucaacuagauuacgcaaaugacauagaaaaaaaaauauguaaaauggaaaaaugcucaucagucuucaauguaguaaacaguucaaucggauuaauaaugguccuaucauuccuauuccuaaacuaa

SEQ ID NO: 5420 - RNA, 1239 nt, Artificial Sequence
  derived and/or modified CDS sequence (opt6) from Pf(BrB1)__BAM85131.1__CSP
augaugcgaaaacuagcaauauuaucaguaucaagcuuccucuucguagaagcauuauuccaagaauaccaauguuacggaagcucaagcaauacaagaguacuaaacgaacucaacuacgacaacgcagguacaaauuuauacaacgaacuagaaaugaauuacuacggaaaacaagaaaacugguacucacuaaaaaaaaacucacgaagccuaggagaaaacgaugacggaaacaacaacaacggcgacaacgguagggaaggaaaagaugaagacaaaagagauggaaacaacgaagacaacgaaaaacuaagaaaaccuaaacauaaaaaacuaaaacaacccgcagacggaaacccagacccaaacgcaaaccccaacguagacccuaacgcaaauccaaacguagacccaaaugcaaacccaaauguagauccaaacgcaaacccaaacgcaaauccaaacgcaaaucccaacgcaaacccaaacgcaaacccaaaugcaaacccaaacgccaaccccaacgcaaacccaaacgcaaaccccaacgcaaacccaaacgcaaacccaaacgcaaauccaaaugcaaauccaaacgcaaaucccaacgcaaaucccaauguagacccaaaugcaaacccaaacgcgaacccaaacgcaaacccaaacgcaaacccaaacgcaaacccaaaugcuaacccaaacgcaaacccaaaugcaaacccaaacgcaaacccaaacgcaaacccaaacgcaaacccaaaugcaaacccaaacgcaaauccaaacgcaaacccaaacgcaaacccaaacgcaaacccaaacgcaaacccaaaugcaaauccaaacgcaaaccccaauaaaaacaaccaaggcaacggacaaggacacaacaugccaaaugacccaaaccgcaacgucgacgaaaacgcaaacgcaaauaaugcaguaaaaaacaauaauaaugaagaaccaucagauaaacacauagaacaauaccuaaaaaaaauaaaaaacuccauaucaacagaauggucacccugcagcgucacaugcggaaacggaauacaaguaagaauaaaaccaggaucagcaaacaaacccaaagacgaacuagacuacgaaaaugacauagaaaaaaaaauauguaaaauggaaaaauguuccucaguauucaacguaguaaauucaucaauaggacuaauaaugguauuaucauuccuauuccucaacuaa

SEQ ID NO: 5421 - RNA, 1239 nt, Artificial Sequence
  derived and/or modified CDS sequence (opt6) from Pf(BrP9)__BAM85145.1__CSP
augaugagaaaacuagcaauauuaucaguaucaucauucuuauuuguagaagcacuauuucaagaauaccaaugcuacggcagcuccagcaacacaagaguacuaaacgaauuaaacuacgacaacgcaggaacaaauuuguauaaugaacuagaaaugaacuauuauggaaaacaagaaaacugguauagccuaaaaaaaaacucucgaucacuaggagaaaacgacgacggaaacaacaacaacggagacaacggaagagaaggaaaagaugaagacaaaagagacggaaauaacgaagauaacgaaaaacucagaaaaccaaaacacaaaaaauuaaaacaaccaggagacggcaacccagauccaaacgcaaacccaaacgucgacccaaacgcaaacccaaacguagacccaaacgcaaacccaaacguagacccaaaugcuaacccaaacgcaaacccaaaugccaacccaaacgcaaauccaaacgcaaacccuaacgcaaacccaaacgcaaacccaaacgccaacccaaaugccaacccaaacgcaaaucccaaugccaacccaaacgcaaacccgaacgcaaacccaaacgcaaacccaaacgcuaacccaaauguagaccccaaugcgaacccaaacgcaaaccccaacgcaaaccccaaugcaaacccaaaugcuaauccaaacgcaaacccaaacgccaacccaaaugcaaauccaaacgcaaacccaaacgccaacccaaaugcaaacccaaacgcaaacccuaacgcaaacccaaacgcaaaccccaacgcaaacccaaacgcaaacccaaaugcuaacccaaacgcaaacccaaacgccaacccaaacaaaaacaaccaaggaaauggacaaggacacaacaugccaaacgacccaaacagaaacguagacgaaaacgcaaacgcaaauaacgcaguaaaaaacaauaauaacgaagaacccucagacaaacacauagaacaauaccuaaaaaaaaucaaaaacucaauaucuacagaauggucaccaugcagcguaacaugcggaaacggaauacaaguacgaauaaaaccaggcucagcaaacaaaccaaaagacgaacuagacuacgaaaacgacauagaaaaaaaaauuugcaaaauggaaaaaugcagcucaguauucaacguaguaaacuccucaauaggacuaauaaugguacuaaguuucuuauuccuaaacuaa

SEQ ID NO: 5422 - RNA, 1239 nt, Artificial Sequence
  derived and/or modified CDS sequence (opt6) from Pf(India)__AAN87606.1__CSP
augaugagaaaauuagcaaucuuaucagucucaucauuccucuucguagaggcauuguuccaagaauaccaauguuacggaucaucaucaaacacaagaguccuaaacgaacuuaacuacgacaacgcaggaacaaaccuuuacaacgaauuagaaaugaacuacuauggaaaacaagaaaacugguacuccuuaaaaaaaaacucaagaucacuaggagaaaacgacgauggaaacaacaacaacggagacaauggaagagaaggaaaagaugaagacaaaagagacggaaacaacgaagacaacgaaaaauuaagaaaacccaaacauaaaaaacuaaaacaaccaggagacggaaacccagacccaaaugcaaacccaaacguagacccgaaugcaaaccccaacgucgaccccaaugcaaacccuaauguagacccaaacgcaaacccaaacgcuaacccaaaugcaaauccaaacgcaaauccaaacgcaaauccaaacgccaacccaaacgcaaaccccaacgccaacccaaacgcaaauccaaaugcaaacccaaacgcaaacccaaaugcaaacccaaacgcaaacccaaacgcaaacccaaacgcaaauccaaauguagacccuaacgcaaacccaaacgcaaauccaaacgccaauccaaacgcaaacccaaacgcaaacccaaacgcaaauccaaacgcaaacccaaacgcaaacccaaacgcaaacccaaacgcaaaccccaaugccaauccaaacgccaacccaaacgcaaacccgaacgcaaauccaaaugcaaacccaaacgcaaauccaaacgcaaacccaaacgcaaacccaaacgcaaauccaaacaaaaacaaccaaggaaauggacaaggacacaacaugccaaacgacccuaaccgaaauguagacgaaaacgccaacgcaaacaacgcagucaaaaacaacaacaacgaagaacccucagauaaacauauagaaaaauacuuaaaaaaaauacaaaacucccuauccacagaauggucaccauguucaguaacaugcggaaacggaauacaaguacgaaucaaacccggcuccgcaaacaaaccaaaagaugaacuagacuacgaaaacgacauagaaaaaaaaauaugcaaaauggaaaaaugcucaucaguauuuaacguagucaacucaucuaucgggcuaauaaugguauuaucauuccuauucuuaaacuaa

SEQ ID NO: 5423 - RNA, 1239 nt, Artificial Sequence
  derived and/or modified CDS sequence (opt6) from Pf(Pal97-007)__BAM84921.1__CSP
augaugagaaaauuagcaauccuaucaguauccagcuuccuauucguagaagcacuauuccaagaauaucaaugcuacggcucaucaucaaacaccagaguacuaaacgaauuaaacuacgacaaugcaggaacaaaucucuacaacgaauuagaaaugaacuacuacggaaaacaagaaaauugguacuccuuaaaaaaaaauucaagaucacucggagaaaaugacgacggaaauaacaacaauggagacaauggaagagaaggaaaagacgaagacaaacgagauggaaacaacgaagacaacgaaaaacuaagaaaacccaaacacaaaaaauuaaaacaaccaggagacggaaacccagauccaaaugcuaacccaaaugucgaccccaacgccaacccaaacguagacccaaacgccaacccaaacguagauccaaacgcaaaccccaaugcaaacccaaaugcaaauccaaaugcaaacccaaacgcaaaccccaacgcaaacccaaacgcaaacccaaacgcaaacccaaacgcaaauccaaacgcaaacccaaacgcaaacccgaacgcaaacccaaacgcaaacccaaaugcaaaccccaacgcaaacccaaacguagacccaaaugcaaacccaaaugcaaacccaaacgcaaaccccaacgcaaauccaaacgcaaacccaaacgccaacccaaacgcaaacccaaacgcaaacccaaacgcaaacccaaacgcaaauccaaacgcgaacccaaacgcaaacccaaaugcaaacccaaacgccaacccaaacgcaaacccgaacgcaaacccaaaugcuaacccaaacgcgaacccaaacgcaaaccccaacaaaaacaaccaaggaaacggacaaggacacaacaugccaaacgacccuaacagaaacguagacgaaaaugcaaacgcaaacaacgcaguaaaaaacaacaacaaugaagaaccaucagacaaacacauaaaagaauaccuaaccaaaauaaaaaacaguauaucaacagaauggucaccaugcucaguaacaugcggaaauggcauacaaguaagaauaaaaccaggaucagcaaauaaaccaaaagacgaacuagacuacgaaaaugacauagaaaaaaaaauaugcaaaauggaaaaaugcucaucaguauucaauguaguaaacagcucaauaggacuaaucaugguacuaucauuccuauuccuaaacuaa

SEQ ID NO: 5424 - RNA, 1239 nt, Artificial Sequence
  derived and/or modified CDS sequence (opt6) from Pf(Pal97-037)__BAM84929.1__CSP
augaugagaaaauuagcaauccuaucagucucaucauuuuuauucguagaagcacuauuccaagaauaccaaugcuacggaucaucaucaaacacaagagucuuaaaugaacuaaauuacgacaacgcaggcacaaaccuauacaacgaacuagaaaugaacuauuacggaaaacaagaaaacugguacuccuuaaaaaaaaacucaagaucacuaggagaaaacgacgacggaaacaacaacaacggagacaauggaagagaaggaaaagacgaagacaaaagagacggaaacaacgaagacaacgaaaaauuaagaaaaccaaaacauaaaaagcuaaaacaacccggagacggaaauccagacccaaacgcaaacccaaacguagaccccaacgcaaacccaaacguggacccaaacgcaaauccaaacguagacccaaacgcaaaccccaacgcaaacccaaacgcuaacccaaacgcuaacccaaaugcaaacccaaaugcaaauccaaacgcaaauccaaacgcuaauccaaacgcaaacccaaacgcaaauccaaacgcaaaccccaacgcaaacccaaacgcaaaccccaacgcaaacccaaacgccaacccaaacguugaucccaacgcaaaucccaacgcaaauccaaacgcaaacccaaacgcaaauccaaacgcaaacccaaaugcaaacccaaacgcaaaccccaaugcaaacccaaacgcaaacccaaaugcaaauccaaacgcaaacccaaacgcaaacccaaacgcaaacccaaacgcaaacccaaacgcaaacccaaaugcaaauccaaaugcaaacccaaacgcaaauccaaacgcaaauccaaacaaaaauaaccaaggaaacggacaaggacacaacaugccaaacgacccaaacagaaacgucgacgaaaacgcaaacgcaaacaacgcaguaaaaaauaacaacaaugaagaaccauccgaccaacacaucgaaaaauauaucaaaaaaauacaaaacucacucuccacagaauggucaccaugcagugucacaugcggaaacggaauacaaguacgaauaaaaccaggcucagcagacaaaccaaaaaacgaacuagacuacgaaaacgacauagaaaaaaaaaucuguaaaauggaaaaauguucaucugucuucaacguaguaaacuccucaauaggacucauaaugguacucucauuccuauucuuaaacuaa

SEQ ID NO: 5425 - RNA, 1239 nt, Artificial Sequence
  derived and/or modified CDS sequence (opt6) from Pf(Pal97-052)__BAM84935.1__CSP
augaugagaaaacuagcaauacucucaguaucaucauuuuuauucguugaagcacuauuccaagaauaucaauguuacggaaguucauccaacacaagaguccuaaacgaacucaacuacgacaacgcaggcacaaacuuauacaacgaauuagaaaugaauuacuacggaaaacaagaaaacugguacucacuaaaaaaaaacucaagaucacuaggcgaaaacgacgacggaaacaacaauaacggagacaacggaagagaaggaaaagacgaagacaaaagagauggcaauaaugaagauaaugaaaaacuaagaaaacccaaacacaaaaaacuaaaacaaccaggagacggaaacccagacccaaaugcaaacccaaacguagaucccaacgcaaacccaaacguagacccuaaugcaaacccaaacguagacccaaacgcaaacccaaaugcaaauccaaacgcaaacccuaacgcaaacccaaacgcaaacccaaaugcaaacccaaacgcaaauccaaacgcaaacccaaacgcaaaccccaacgcaaacccaaacgcaaacccaaaugcaaacccuaacgcaaauccaaacgcaaauccaaacgcaaacccaaauguagauccaaacgcaaauccaaacgcaaacccaaaugcuaauccaaacgcaaauccaaaugcuaauccaaacgcaaauccaaacgcaaaccccaacgccaaucccaacgcaaaccccaacgcaaacccaaacgccaacccaaacgcaaacccaaaugcaaacccaaacgcaaauccaaacgcaaacccaaacgcaaacccaaaugcaaauccgaacgcaaacccaaacgcgaauccaaacaaaaauaaccaaggcaacggacaaggacacaacaugcccaacgacccaaaccgaaacguagacgaaaacgcaaacgcaaacaacgcaguaaaaaacaacaacaacgaagaaccaucagaucaacauauagaaaaauaccuaaaaauaauucaaaauucguuaucaacagaauggucaccaugcucaguaacaugcggcaacggaauacaaguacgcauaaaaccaggcuccgcagauaaacccaaagaccaacuagacuacgccaaugauauagaaaaaaaaauaugcaaaauggaaaaaugcagcucaguauucaacguaguaaacucuucaaucggauuaauaaugguacucuccuuucuauuucuaaacuaa

SEQ ID NO: 5426 - RNA, 1239 nt, Artificial Sequence
  derived and/or modified CDS sequence (opt6) from Pf(Sol95-351)__BAM85103.1__CSP
augaugagaaaauuagcaauacuuucaguaucaagcuucuuauuuguugaagcacuauuccaagaauaccaaugcuacggaagcuccucaaacacaagaguacucaacgaacucaacuacgacaacgcaggaacaaaccuauacaaugaacuagaaaugaauuacuauggaaaacaagaaaacugguacucccucaaaaaaaacuccagauccuuaggagaaaacgacgauggaaacaacaauaacggagauaauggaagagaaggaaaagacgaagacaaaagagacggaaacaacgaagacaacgaaaaacuaagaaaacccaaacacaaaaaacuaaaacaaccaggagacggaaacccagacccaaacgcaaacccaaauguagacccaaaugcaaacccaaauguagauccaaacgcaaacccaaacgucgacccaaaugcaaacccaaacgcaaacccaaaugccaauccaaacgcaaaccccaaugcaaaccccaacgcaaaccccaacgcaaacccaaacgccaauccaaacgcaaaccccaacgcaaacccaaacgcaaacccaaaugcaaauccaaaugcaaacccaaacgcaaacccuaacgcaaacccaaacguagacccaaacgcaaaccccaacgcaaacccaaacgcaaacccaaaugcaaacccaaacgcaaauccaaacgcaaacccaaacgcaaaccccaacgccaacccaaacgcaaacccaaacgcaaacccaaacgccaacccaaacgccaacccaaacgcaaacccaaacgcaaacccuaacgcaaacccaaacgcaaacccaaacgcaaacccaaacgcaaauccaaacgcaaacccaaauaaaaacaaccaaggaaacggacaaggccacaacaugccuaacgacccaaacagaaacguagacgaaaacgcaaacgccaauaaugcaguaaaaaauaacaauaacgaagaaccaucagacaaacacauagaacaauaccuaaaaaaaauacaaaacucacucucaaccgaauggucaccaugcucaguuaccugcggaaauggaauacaaguaagaauaaaaccaggaucagcagacaaaccaaaagaccaacucgacuacgaaaacgacauagaaaaaaaaauaugcaaaauggaaaaaugcagcucagucuucaauguagucaacagcuccaucggacuaauaauggugcuauccuuccuauuccuaaauuaa

SEQ ID NO: 5427 - RNA, 1239 nt, Artificial Sequence
  derived and/or modified CDS sequence (opt6) from Pf(Tz03-038)__BAM84801.1__CSP
augaugagaaaacuagcaauacuaucaguaucaucauuccucuucguagaagcccuauuccaagaauaccaaugcuauggaagcucaucaaacacaagaguuuuaaacgaauuaaacuaugacaacgcaggcacaaaucuauacaacgaauuagaaaugaauuacuacggaaaacaagaaaacugguauucacuaaaaaaaaacucaagaucauuaggagaaaacgaugacgguaacaacaacaacggagacaacggcagagaaggaaaagacgaagauaaacgagacggaaacaacgaagauaaugaaaaauuaagaaaaccaaaacacaaaaaacuaaaacaaccaggcgacggaaacccagacccaaacgcaaacccaaacguagacccaaacgcaaaccccaauguagauccaaacgcuaauccaaacguagauccuaacgcaaacccaaaugcaaaucccaacgcaaacccaaaugccaacccaaacgcaaauccgaacgcaaacccaaacgcaaauccaaacgccaacccaaacgcaaaccccaacgcaaacccgaaugcaaauccaaacguagacccaaaugcaaacccaaacgcuaauccaaacgcaaauccaaacgcaaacccaaaugcaaacccaaaugcaaacccaaaugcaaacccaaaugcaaaccccaacgcaaacccaaaugcaaacccaaacgcaaacccaaacgccaaccccaacgcaaauccaaacgcaaacccaaacgccaauccaaacgcaaacccaaacgccaacccaaacgcaaacccaaaugcaaacccaaacgcaaacccaaacgccaacccuaacgcaaacccaaaugcaaaccccaacaaaaacaaccaaggaaacggccaaggccacaacaugccaaacgauccuaacagaaauguagacgaaaacgcaaacgcaaacaacgcaguaaaaaacaacaacaaugaagaacccuccgacaaacacauagaacaauaccuaaauaaaauaaaaaacucaauaucaacagaauggagcccaugcucaguaacaugcggaaacggaauacaaguaagaauaaaaccaggaucagcaaacaaaccaaaagacgaacucaacuacgaaaaugacaucgaaaaaaaaauaugcaaaauggaaaaaugcucaucaguauucaauguaguaaacucaucaaucggacuaauaaugguacuaucauuucucuuccuaaacuaa

SEQ ID NO: 5428 - RNA, 1239 nt, Artificial Sequence
  derived and/or modified CDS sequence (opt6) from Pf(Tz03-076)__BAM84804.1__CSP
augaugagaaaacuagcaauacuaucaguaucaucauuccuauucguagaagcacuauuccaagaauaccaauguuacggcaguucaagcaacacacgaguacuaaacgaauuaaacuacgacaaugcaggaaccaaccuauauaacgaacuagaaaugaacuauuacggaaaacaagaaaacugguacucacucaaaaaaaacucacgaucgcuaggagaaaacgaugacggaaacaacaacaacggagacaauggaagggaaggaaaagacgaagacaaaagagacggaaauaacgaagacaaugaaaaacuaagaaaaccaaaacacaaaaaauuaaaacaaccaggagacggaaacccagacccaaaugccaauccaaacguagacccaaacgcaaacccaaacguagacccaaacgcuaacccaaauguagacccaaacgcaaauccaaacgcaaacccaaacgcaaacccaaacgccaaccccaacgcaaacccaaacgcaaacccaaacgcaaacccaaaugcaaacccuaacgcaaacccaaacgcaaacccaaacgcaaaccccaacgcaaacccaaaugcaaacccaaacgcaaacccaaaugcaaacccaaacguagacccaaacgccaacccaaacgcuaacccaaacgcaaacccaaacgcaaauccaaacgcaaacccaaacgcaaauccaaacgcaaacccaaacgcaaauccaaacgcaaaccccaacgccaacccaaacgcaaauccaaacgccaacccaaacgccaacccaaacgcaaacccaaacgcaaacccaaacgcaaacccaaacgcaaacccaaacgcaaacccaaacgcaaacccaaauaaaaacaaccaaggaaacggccaaggacacaacaugccaaacgaccccaacagaaacguagacgaaaacgcaaaugcaaacaaugcaguaaaaaacaacaacaacgaagaaccaucagacaaacauauagaacaauaucuaaaaacaauaaaaaauucucuaucaacagaauggucaccauguaguguaacaugcggaaacggaauacaaguaagaauaaaaccaggauccgccaacaaaccaaaagaugaauuaaauuacgaaaacgacauagaaaaaaaaauaugcaaaauggaaaaaugcagcucaguauucaauguagucaauucaucaauaggacuaauuaugguacucucauucuuauuuuuaaacuaa

SEQ ID NO: 5429 - RNA, 1239 nt, Artificial Sequence
  derived and/or modified CDS sequence (opt6) from Pf(Tz03-101)__BAM84806.1__CSP
augaugagaaaauuagcaauauuauccguaucaucauuccuauucguagaagcauuauuucaagaauaucaaugcuacggaucaucaagcaacacaagaguacuaaacgaacuaaacuacgacaaugccggcacaaauuuauauaacgaacuagaaaugaauuacuacggaaaacaagaaaacugguacagccuaaaaaaaaacucuagaucacuaggagaaaacgaugacggcaacaacaacaacggcgacaacggaagagaaggaaaagacgaagauaaaagagauggaaacaacgaagacaaugaaaaacuccgaaaaccaaaacacaaaaaacuaaaacaacccggagacggcaacccagacccaaacgcaaacccaaauguagacccaaacgcaaacccaaacguagacccaaacgcaaacccaaauguagauccaaacgccaaccccaacgcaaauccgaaugcaaacccaaacgcaaaccccaacgcaaaccccaacgcaaauccaaacgcaaauccaaacgcaaacccaaacgcuaacccaaacgccaacccaaacgcaaacccuaacgcaaauccaaacgcaaauccaaacgcaaacccaaacgcaaacccaaacguagacccaaacgcuaacccaaacgcaaacccaaacgcaaauccaaacgcaaauccaaacgcaaaccccaacgcaaacccgaacgcuaaccccaacgcaaacccaaaugcaaacccaaacgcaaacccaaacgcaaacccaaacgcaaauccaaacgccaacccaaacgcaaacccuaacgccaacccaaacgcaaaccccaacgcaaacccaaacgcaaauccaaacgcaaauccaaacaaaaacaaccaaggaaacggacaaggacauaacaugcccaacgauccaaaccgaaacguagacgaaaacgcaaacgcaaacaacgcagucaaaaacaacaacaacgaagaaccaucagacaaacauauaaaagaauaccuaaacaaaauacaaaacucaauaucuacagaauggagcccaugcucagucacaugcggaaacgguauacaaguacguauaaaaccaggaucagcagacaaacccaaagaccaauuagacuauauuaacgacauugaaaaaaaaauaugcaaaauggaaaaaugcucaucaguuuucaauguaguaaauaguucaauaggccuaaucaugguacuaucauuccuauuccugaacuaa

SEQ ID NO: 5430 - RNA, 1239 nt, Artificial Sequence
  derived and/or modified CDS sequence (opt6) from Pf(Tz93-022)__BAM84753.1__CSP
augaugagaaaacuagcaauacuuucagucucaagcuucuuauucguagaagccuuauuccaagaauaccaaugcuacggaucaucaucaaacaccagagucuuaaacgaacucaauuacgacaacgccggaacgaacuuauacaacgaacuagaaaugaacuauuacggcaaacaagaaaacugguacucauuaaaaaaaaacucaagaucacuaggagaaaacgacgacggaaacaacaacaacggagacaacggaagagaaggaaaagacgaagacaaaagagacggaaacaacgaagacaacgaaaaacuacgcaaacccaaacacaaaaaacuaaaacaaccaggagacggcaacccagacccaaacgcaaauccaaacguagacccaaacgcaaacccaaacguagacccaaacgcaaacccuaacguagacccaaacgcaaauccaaacgcaaacccaaaugcaaauccaaacgccaacccaaacgcaaaccccaaugcaaaccccaacgcaaaucccaacgccaauccaaacgcaaacccaaaugcaaaccccaaugcaaauccaaacgcaaacccaaacgcaaauccuaacgcaaacccuaacgcaaacccaaaugcaaacccaaacgcuaacccaaacgcaaauccaaacgcaaacccaaacgcaaacccaaacgcaaacccaaacgcaaacccaaacgcaaacccaaacgcaaauccaaaugcaaauccaaaugcaaacccaaacgcaaauccaaacgcaaauccaaacgcaaacccaaaugcaaacccaaaugcaaacccaaaugcaaacccaaacgcaaauccaaacgcaaacccaaacgcaaauccaaacaaaaacaaccaaggcaacggacaaggacacaacaugccaaacgauccaaacagaaacgucgacgaaaacgccaacgcaaacaacgcgguaaaaaacaacaacaacgaagaaccuucagacaaacacauagaaaaauaccuaaaagaaauacaaaacuccuuaucgacagaauggucaccaugcagcguaacauguggaaacggaauacaaguaagaauaaaaccaggaucagcaaacaaaccaaaagaccaauuagacuaugaaaaugacauagaaaaaaaaauaugcaaaauggagaaaugcagcucaguauucaacguaguaaacagcucaaucggguuaauaaugguccuauccuucuuauucuuaaacuag

SEQ ID NO: 5431 - RNA, 1239 nt, Artificial Sequence
  derived and/or modified CDS sequence (opt6) from Pf(Tz93-035)__BAM84757.1__CSP
augaugcgcaaauuagcaauacuaucaguauccucauuucuauucguagaagcacuauuccaagaauaccaauguuacggcagcucaagcaacacaagaguacuaaacgaauuaaacuaugacaacgcgggaaccaaccuauacaacgaauuagaaaugaauuacuacggaaaacaagaaaacugguacucucucaaaaaaaacucacguucacucggagaaaacgaugacggaaacaacaauaacggagacaauggaagagaaggaaaagaugaagauaaaagagacggaaacaacgaagauaacgaaaaacuaagaaaacccaaacauaaaaaacuaaaacaaccaggagacggcaacccagacccaaaugcaaacccaaaugucgacccaaacgcaaacccaaacguagacccaaacgcaaacccaaacguagacccaaacgcaaacccaaacgccaacccaaacgcaaacccaaacgcaaacccaaacgcaaacccaaacgccaacccaaacgcaaacccaaacgcaaauccaaacgcaaauccaaacgcaaaccccaacgcaaacccaaaugcaaacccaaacgcaaacccaaaugcuaacccaaacgcaaaucccaauguagacccaaacgcaaauccaaacgcaaacccaaacgcaaaccccaaugccaacccaaacgcaaacccgaaugcaaacccaaacgcaaacccaaaugcaaacccaaacgcaaacccaaacgcaaauccaaacgcaaacccaaaugcaaacccaaaugcaaauccaaacgccaaucccaacgcaaacccaaacgcaaauccaaacgcaaaccccaacgcaaacccaaacgcaaacccaaacaaaaacaaccaaggaaacggacaaggacacaacaugccaaacgacccaaauagaaaugucgacgaaaaugcaaacgcaaacaacgcaguaaaaaacaacaacaacgaagaaccauccgacaaacacauaacagaauaccugaaaaaaauaaaaaacucaauaucaacugaauggucaccauguagcguaacauguggaaauggaauacaaguaagaauaaaaccaggaucagcaaauaaacccaaagacgaacuagacuaugaaaacgacauagaaaaaaaaauauguaaaauggaaaaauguucaucaguauuuaacguaguaaacucaucaauaggacuaauaaugguauuaucauuccuauuccuaaacuaa

SEQ ID NO: 5432 - RNA, 1239 nt, Artificial Sequence
  derived and/or modified CDS sequence (opt6) from Pf(Tz93-041)__BAM84759.1__CSP
augaugagaaaacucgcuauccuaucaguaucaucauuccuauucguagaagcucuauuucaagaauaccaaugcuacggaagcucaucaaacacucgaguucuaaacgaacuaaacuacgacaacgcaggaacaaaucuauacaacgaauuagaaaugaacuacuacggcaaacaagaaaacugguacucacuaaaaaaaaacucccgaucacuuggagaaaacgaugacggcaacaacaacaacggagacaacggcagagaaggaaaagacgaagauaaaagagacggaaacaacgaagauaaugaaaaacuacgaaaaccaaaacacaaaaaauuaaaacaaccaggagacggaaacccagacccaaaugcaaacccaaacguagacccaaacgcaaacccaaacguagacccaaacgcaaacccuaauguagacccaaacgccaauccaaacgcaaacccaaacgcaaacccaaacgcuaaccccaacgcaaacccaaacgcaaacccaaacgcaaacccaaacgcaaacccaaaugcaaacccaaacgcaaacccaaacgcgaaccccaacgcaaacccaaaugccaacccaaacgcaaaccccaacgcaaacccaaauguagacccaaacgccaacccaaacgcaaacccaaacgcaaacccaaacgcaaacccaaaugcaaaccccaacgcaaacccaaacgcaaacccaaacgcaaacccaaacgcaaaccccaacgccaacccaaaugcaaacccaaaugcaaacccaaaugcaaacccaaacgcaaacccaaaugcaaauccaaaugccaacccaaacgcaaauccaaacgcaaacccaaacgcaaacccaaacaaaaacaaccaaggaaauggacaaggacacaacaugccaaaugacccaaacagaaacguagacgaaaacgcaaacgcaaacaacgccgucaaaaacaacaauaacgaagaaccauccgacaaacacauagaacaauaccuaaaacgaauccaaaacucccuaucaacugaauggucaccaugcuccguaacaugcggcaacgguauacaagucagaauaaaaccaggauccgccggaaaaccaaaagaugaacuagacuacgcaaacgacauagaaaaaaaaauaugcaaaauggaaaaaugcuccucaguauuuaacguaguaaacuccucaauaggacuuauaaugguccuauccuuucuauuucuaaauuag

SEQ ID NO: 5433 - RNA, 1239 nt, Artificial Sequence
  derived and/or modified CDS sequence (opt6) from Pf(Tz93-051)__BAM84763.1__CSP
augaugagaaaacuagcaauauuaucaguuucaucuuuccuauucguagaagcacuauuccaagaauaccaaugcuacggaucaucaagcaacaccagaguacuaaacgaacuaaacuacgacaacgcaggcacaaaccucuacaacgaauuagaaaugaacuacuauggaaaacaagaaaacugguacucuuuaaaaaaaaacucaagaucacuaggagaaaacgaugacggaaauaauaacaacggagacaacggacgagaaggcaaagacgaagacaaaagagacggaaauaacgaagacaacgaaaaacuaagaaaaccuaaacacaaaaaauuaaaacaaccuggagacggaaacccagacccaaacgcaaacccaaacgucgacccaaacgcaaacccaaauguagacccaaacgcaaacccaaacguagauccaaacgcaaacccaaacgccaacccaaacgcaaauccaaacgcaaauccaaacgcaaaucccaacgcaaauccaaacgcuaacccgaacgcaaaccccaaugcaaacccaaaugcaaacccaaacgcuaauccaaacgcaaaccccaaugcaaaccccaacgcaaacccaaacgcuaacccaaauguagacccaaacgcaaacccaaaugcaaacccaaacgcaaauccaaaugcaaacccaaacgcaaacccaaaugcaaaccccaacgcaaacccaaacgcaaacccaaaugccaacccaaaugccaacccuaaugcaaauccaaaugcaaacccaaacgcaaacccaaacgcaaacccaaacgcaaacccaaacgcaaacccaaacgcaaauccaaaugcaaacccaaacgcaaacccaaauaaaaacaaucaaggaaacggacaaggacacaacaugccaaacgacccaaacagaaauguagacgaaaacgcuaaugccaacaacgcagucaaaaauaacaauaacgaagaaccaagcgacaaacauauagaacaauaccuaaauaaaauuaaaaacucaaucucaaccgaauggucucccugcucagucaccugcggaaacggaauacaaguaagaauaaaacccggaucagcuaacaaaccgaaagaugaacuaaacuacgaaaacgacauagaaaaaaaaauaugcaaaauggaaaaaugcucaucaguauucaauguagucaacaguucaauaggacucauaaugguacuaucauuucuauuccuaaauuaa

SEQ ID NO: 5434 - RNA, 1239 nt, Artificial Sequence
  derived and/or modified CDS sequence (opt6) from Pf(Tz93-052)__BAM84764.1__CSP
augaugagaaaacuagcaauccuaucaguaucaucuuuuuuauucguagaagcacuauuccaagaauaccaaugcuacgguucaucaagcaacacacgaguauuaaacgaauuaaacuacgacaacgcagguacaaaccuauauaacgaacuagaaaugaacuacuacggaaaacaagaaaacugguacagucuaaaaaaaaacucaagaucauuaggagaaaacgacgacggaaacaacaacaacggagauaacggacgagaaggaaaagacgaagacaaaagagacggaaauaacgaagacaacgaaaaauuaagaaaacccaaacacaaaaaauuaaaacaaccaggagacggaaacccagauccaaaugcaaacccaaacguagacccaaaugcaaauccaaauguagacccaaacgcaaacccaaacgucgacccaaacgccaacccaaaugcaaacccaaacgccaacccaaacgcaaacccaaacgcaaaccccaacgcaaacccaaacgcaaacccaaacgccaacccaaacgccaacccaaacgcaaacccaaaugcaaacccaaacguagaccccaacgcaaacccuaacgcaaauccaaacgcaaacccaaacgcaaacccaaaugcaaacccaaacgcaaaccccaacgcaaaccccaacgcaaauccaaacgccaauccaaaugcaaacccaaaugcaaacccaaacgcaaacccaaacgcaaacccgaacgcaaauccaaacgcaaacccaaacgcaaacccaaacgcaaacccaaaugcaaacccaaacgcaaacccaaacgcaaacccaaacgcaaacccaaacgccaacccaaacgcuaacccaaacaaaaacaaccaaggaaacggccaaggacacaacaugccuaacgaccccaacagaaacguagaugaaaacgcaaacgcaaacaacgcaguaaaaaacaacaacaacgaagaaccaucagaccaacacauagaaaaauaucuaaaaauaauacaaaacucacuaucaacagaauggucaccuugcucaguaacauguggcaacggaauacaaguaagaauaaaacccggaucagcaaacaaaccaaaagaccaauuagacuacgcaaacgacauagaaaaaaaaauaugcaaaauggaaaaaugcagcucaguauucaacgucguaaacaguucaauaggacucauaaugguacuaucauuccuauuucuaaauuaa

SEQ ID NO: 5435 - RNA, 1239 nt, Artificial Sequence
  derived and/or modified CDS sequence (opt6) from Pf(Tz93-061)__BAM84768.1__CSP
augaugcgaaaacuagccauacuauccgucucaagcuuucuauucgucgaagcccuauuccaagaauaccaaugcuacggaagcucaucaaacacaagaguacuuaaugaacuaaacuaugacaacgcaggaacaaaccuauacaacgaacuagaaaugaauuauuauggaaaacaagaaaacugguacucauuaaaaaaaaacucacgaucacuaggagaaaacgaugauggaaacaacaacaacggagauaacggaagagaaggaaaagacgaagacaaaagagacggaaacaaugaagacaacgaaaaacuaagaaaaccaaaacacaaaaaacuaaaacaaccagccgacggaaacccagauccaaacgcuaauccaaacguagacccaaaugcaaacccaaacguugacccaaacgcaaacccaaacguagauccaaacgccaacccaaacgcaaacccaaacgcaaacccaaaugccaacccaaacgcuaacccaaacgcaaacccaaaugcaaaucccaacgcaaacccaaacgcaaacccuaacgcaaacccaaaugcaaacccaaacgcaaacccaaacgcaaacccaaacgcaaacccaaacgcaaacccaaacguagacccaaacgcaaacccaaacgcaaacccaaacgcaaaccccaacgcaaaccccaacgcaaacccaaacgcaaacccaaacgcaaacccaaacgcaaauccaaacgcaaauccaaacgcaaacccaaacgcaaacccaaacgcaaauccaaaugcaaacccaaacgcaaacccaaaugcaaauccaaacgcaaacccaaacgcaaauccaaaugcaaaucccaaugcaaaccccaacaaaaacaaccaaggaaacggacaaggccauaacaugccaaacgaucccaacagaaacguagacgaaaaugcaaacgcaaacaacgcaguaaaaaacaauaauaaugaagaaccaucagaccaacacauagaaaaauaccucaaaagaauccaaaacucccuaucaaccgaauggucaccauguagcguaacaugcggaaauggaauacaaguaagaauaaaaccaggaucagcaaacaaaccaaaagaccaacuagauuacgcaaacgacauagaaaaaaaaauaugcaaaauggaaaaaugcucaucaguauuuaacguaguuaacucaucaaucggccuaaucaugguacuaucauuuuuauuccucaacuaa

SEQ ID NO: 5436 - RNA, 1239 nt, Artificial Sequence
  derived and/or modified CDS sequence (opt6) from Pf(Tz93-075)__BAM84770.1__CSP
augaugagaaaacuagcaauacuaucagucucaagcuuccuauucgucgaagcauuauuccaagaauaccaauguuacggaagcucaucaaacaccagaguacuaaaugaacuuaacuacgacaacgcaggaacaaaccuauacaacgaacuagaaaugaacuacuauggaaaacaagaaaacugguacucccuaaaaaaaaauucacgaucacuaggagaaaacgaugacggaaacaauaacaauggagauaacggaagagaaggcaaagacgaagacaaaagagacggaaacaacgaagauaacgaaaaauuacgaaaaccaaaacacaaaaaacucaaacaacccggagacggaaacccagacccaaacgcaaacccaaacguagacccaaaugcaaacccaaacguagacccaaacgcaaacccaaauguagacccaaacgcaaacccaaacgcaaacccaaacgcaaauccaaacgcaaacccaaacgcaaacccaaacgcaaacccaaacgccaaccccaacgcaaacccaaacgcuaacccaaacgcaaacccaaacgcaaauccaaacgccaacccaaacgcaaauccaaacgcaaacccgaacgcaaacccaaacguagauccaaaugcaaacccuaaugcaaacccaaacgcaaacccgaacgcaaacccaaaugcaaacccaaacgcaaacccaaacgcaaaccccaacgcuaacccaaacgcaaauccaaacgcaaacccaaacgcaaacccaaacgcaaacccaaacgcaaaucccaaugcaaacccaaacgcaaacccaaaugccaacccaaaugcaaacccaaacgcaaacccaaacgcaaacccaaauaaaaacaaccaaggcaauggacaaggacauaacaugccaaacgacccaaaccguaacguagacgaaaacgcuaacgccaacaacgcagucaaaaacaacaauaacgaagaaccaucagauaaacacauagaacaauaccuaaaaacaaucaaaaauucauuaucuaccgaauggucaccaugcucuguaaccugcggaaacggaauacaaguaagaauaaaaccuggaucagcaaacaaacccaaagaccaacuagacuacgaaaacgacauagaaaaaaaaauaugcaaaauggaaaaaugcucaucaguauuuaacguaguaaauucaucaauaggacuaauaaugguauuaucauuccuauuucuaaauuaa

SEQ ID NO: 5437 - RNA, 1239 nt, Artificial Sequence
  derived and/or modified CDS sequence (opt6) from Pf(Tz93-113)__BAM84775.1__CSP
augaugagaaaacuagcaauacuaucaguauccucauuccuauucguagaagcacucuuccaagaauaccaaugcuacggaagcucaagcaacacuagaguacugaaugaauuaaacuacgacaacgcaggcacaaacuuauauaacgaacuagaaaugaacuacuacggcaaacaagaaaacugguacucauuaaaaaaaaacucaagaucacuaggugaaaacgacgauggaaacaacaacaacggagacaacggcagagaaggaaaagacgaagacaaaagagacggaaacaacgaagacaacgaaaaacuaagaaaaccaaaacacaaaaaacuaaaacaaccaggcgacggaaaccccgauccaaacgcaaacccaaauguagacccuaacgcaaacccaaacguagauccaaacgcaaacccaaacguagacccaaacgcaaauccaaacgcaaaccccaaugcaaacccaaacgcaaacccaaacgcuaauccaaacgccaacccaaacgcaaauccaaaugcaaacccaaacgcaaacccaaacgcaaacccaaaugcaaauccaaacgcaaacccuaacgcaaauccaaacgcaaacccaaacgcaaaccccaacgccaauccaaacgucgauccaaacgcaaacccaaacgccaacccaaacgcaaauccaaacgcaaacccaaacgccaaccccaacgccaaucccaacgcaaauccaaacgcaaauccaaaugcaaacccaaacgcaaauccaaacgcaaacccaaacgcaaacccaaacgcaaaccccaacgcaaacccaaaugcaaacccaaacgcaaaccccaaugcaaauccaaacgcaaacccaaauaaaaauaaccaaggaaacggacaaggacacaacaugccaaacgacccaaaccgaaacguagacgaaaacgcaaacgcaaacaacgcaguaaagaauaacaacaacgaagaaccaucugacaaacauauagaacaauaccuaaauaaaauaaaaaacucaauaucaacagaauggucaccaugcagugucacuugcggaaacggaauucaaguaagaauaaaaccaggauccgcaaacaaaccaaaagacgaacuaaauuacgaaaacgacauagaaaaaaaaauaugcaaaauggagaaaugcagcucagucuucaacguaguaaauagcucaauaggacuaauaaugguauuaucauuccuauuccuaaacuaa

SEQ ID NO: 5438 - RNA, 1239 nt, Artificial Sequence
  derived and/or modified CDS sequence (opt6) from Pf(Tz93-123)__BAM84778.1__CSP
augaugagaaaauuagcaauccuaucaguaaguaguuuccucuucguagaagcccucuuccaagaauaccaaugcuacggaucaucaagcaacacacgaguacuaaacgaacucaauuacgauaacgcaggaacaaaccuauacaacgaacuagaaaugaacuacuauggaaaacaagaaaacugguacucacugaaaaaaaacucaagaucacucggagaaaacgacgacggaaacaacaacaacggagacaacggaagagaaggcaaagacgaagacaaacgcgacggaaacaacgaagacaacgaaaaacuaagaaaaccaaaacacaaaaaacuaaaacaaccugcagacggaaacccagacccaaacgcaaacccaaacguagacccuaacgcaaaccccaacguagacccaaacgcaaaccccaauguagacccaaacgcaaacccaaacgcaaacccaaacgcaaacccaaacgcaaauccaaacgcaaaccccaaugcaaauccaaaugcaaauccaaacgcaaauccaaaugcgaauccaaacgcaaacccaaacgcuaaccccaacgcaaaccccaacgcaaacccaaacgcaaaccccaacgcaaacccaaacguagacccaaaugcaaacccaaaugcaaacccaaacgcaaacccaaacgcaaacccaaaugcaaaccccaaugcaaacccaaaugcaaacccaaacgcaaacccaaacgcaaacccaaacgcaaaccccaaugcaaacccaaacgcaaacccaaacgcaaacccaaaugcaaacccaaacgcaaauccaaacgcaaacccaaaugcaaauccuaacgcaaaccccaacgcaaaccccaacaaaaauaaucaaggaaacggacaaggacacaacaugccaaacgauccuaacagaaacguagacgaaaacgcaaacgcaaacaacgccgcaaaaaacaacaacaaugaagaaccauccgaucaacauauagaaaaauaccucaaaacaauacaaaauucacuaucuacagaauggucaccauguucaguaaccugcggaaacggaauacaaguaagaauaaaacccggaucagcaaacaaaccaaaagaccaacuagacuacgcaaacgacauagaaaaaaaaauuugcaaaauggaaaaauguuccagcgucuucaacguaguaaacagcuccauaggacuaauaaugguacuaucauuccuauuuuuaaacuaa

SEQ ID NO: 5439 - RNA, 1239 nt, Artificial Sequence
  derived and/or modified CDS sequence (opt6) from Pf(Tz93-124)__BAM84779.1__CSP
augaugagaaaacuagcaauacuuucagucucaagcuuccuauucguagaagcacuauuccaagaauaccaaugcuacggaucaucauccaacacaagaguacuaaacgaauuaaauuaugacaacgcaggaacaaaccuauacaaugaacuagaaaugaacuacuacggaaaacaagaaaacugguacucauuaaaaaaaaacucaagaucucuuggagaaaaugacgacggaaacaacaacaacggagacaauggccgagaagguaaagacgaagauaaaagagacggaaacaacgaagauaaugaaaaacuacgcaaaccaaaacacaaaaaacuaaaacaaccagccgauggaaauccagacccaaacgccaacccaaacguagacccaaacgcgaacccaaacguagaccccaacgcaaacccaaauguagacccaaacgcgaauccaaaugcaaacccaaacgcaaacccaaacgcaaacccaaacgcaaacccgaaugcaaacccaaacgcaaacccaaaugccaauccaaacgccaacccaaacgcaaauccaaacgcaaauccaaacgccaacccaaacgcaaacccaaacgccaacccaaaugcaaacccaaacgucgacccaaaugcaaacccaaaugcaaacccaaaugcaaauccaaacgcaaacccaaaugcaaacccaaacgcaaacccaaacgcaaacccaaacgcaaacccaaacgcaaacccaaacgcaaacccaaacgcaaacccaaaugcaaacccaaacgcaaacccaaacgcaaacccaaaugcaaacccaaaugccaauccaaacgcaaacccaaacgcaaacccaaacgcaaacccaaacaaaaauaaccaaggcaacggacaaggacacaacaugccaaacgaccccaaccgcaacgucgacgaaaaugcaaacgcaaacaacgccguaaaaaauaauaacaacgaggaaccaucagacaaacacauagaacaauaucuaaaaacaauaaaaaauucccucuccacagaauggucaccaugcucaguaacuugcgguaacggcauacaaguaagaaucaaaccaggcuccgcagacaaaccaaaagaccaacuagacuacauaaacgacauagaaaaaaaaauaugcaaaauggaaaaaugcucaucagucuucaauguaguaaacagcucaauaggacuaauuaugguacuuuccuuccuauuucuuaacuaa

SEQ ID NO: 5440 - RNA, 1239 nt, Artificial Sequence
  derived and/or modified CDS sequence (opt6) from Pf(Tz98-009)__BAM84781.1__CSP
augaugagaaaacuagcaauacuauccguaucaucauuccuauucguugaagcuuuauuccaagaauaccaaugcuacggaagcucuagcaacacaagaguauuaaaugaacucaacuaugacaacgcuggaacaaacuuauacaacgaacuagaaaugaacuacuauggaaaacaagaaaacugguacagucuaaaaaaaaauucaagaucacuaggagaaaacgaugacggaaacaacaauaauggagauaacggaagagaaggcaaagacgaagacaaaagagacggaaacaacgaagacaacgaaaaauuaaggaaaccaaaacacaaaaaacuaaaacaaccagcagacggaaacccagauccaaacgcaaacccaaacguagacccaaacgcaaaccccaacguugacccaaacgcaaaucccaacguagauccaaacgcaaacccgaacgccaaccccaacgcaaaccccaacgcgaacccaaacgcaaacccaaaugcaaacccaaacgcaaacccaaacgcaaauccaaacgcaaacccaaacgcaaacccaaacgcaaacccaaacgcaaauccaaaugcaaacccaaacgcaaacccaaacgcaaacccaaacguagauccaaacgcaaauccaaacgcaaacccaaaugcaaacccaaaugcaaacccaaacgcaaauccaaacgcuaacccaaaugcaaauccaaacgcaaacccaaaugccaauccaaacgcaaaucccaacgcaaacccaaacgcaaacccaaaugcaaacccaaacgccaaccccaacgcaaauccaaacgcaaacccaaacgcaaacccaaacgcaaacccaaaugccaacccaaauaaaaauaaccaaggaaacggacaaggacacaauaugccaaacgacccuaauagaaacguagaugaaaacgcaaacgcaaacaaugcaguaaaaaauaacaacaacgaagaacccucagacaaacauauaaaagaauaccuaaacaaaauacaaaauucuaucucaacagaauggucaccaugcagcguaacaugcggaaacggcauccaaguucgcauaaaacccggaucagcagacaaaccaaaagaccaauuagacuacauaaacgacauagaaaaaaaaauaugcaaaauggagaaaugcuccucaguauucaacguaguaaacuccucgauaggacuaauaaugguuuuaucauucuuauucuuaaacuaa

SEQ ID NO: 5441 - RNA, 1239 nt, Artificial Sequence
  derived and/or modified CDS sequence (opt6) from Pf(Tz98-049)__BAM84789.1__CSP
augaugagaaaacuagccauacuaucagucucaagcuuccuauucguagaagcauuauuccaagaauaccaaugcuacggaucaucauccaacacaagaguacucaacgaacucaacuacgacaaugcagguacaaaccuauauaacgaauuagaaaugaauuacuacggcaaacaagaaaacugguauucacuaaaaaaaaacuccagaucacuuggagaaaacgacgauggaaacaauaacaacggagacaacggccgugaaggcaaagacgaagacaaaagagacggaaacaacgaagacaacgaaaaacuacgcaaaccaaaacacaaaaaacuaaaacaaccagcagacggaaacccagaccccaacgcaaacccaaacguagacccaaacgcaaacccaaauguagauccaaaugcaaacccaaacgucgacccaaacgcaaacccaaaugcaaacccaaacgcaaacccaaacgccaacccaaaugcaaacccaaacgcaaaccccaacgccaacccaaacgcaaacccaaacgcaaaccccaaugccaacccaaacgccaacccaaaugcaaaucccaaugcaaauccaaacgcaaacccaaacgcaaaccccaacguagacccaaaugcuaacccaaacgcaaacccaaaugcaaacccaaacgcaaacccaaacgccaauccaaacgcaaacccaaacgcaaauccaaacgcaaauccuaaugccaacccaaaugccaauccaaacgcaaacccaaacgcaaaccccaaugcaaacccaaacgcaaauccaaaugcaaaccccaacgcaaacccaaacgcaaacccaaacgcaaaucccaaugcaaacccaaacaaaaacaaccaaggaaacggacaaggacacaacaugccaaaugacccaaacagaaacguagacgaaaacgcaaacgccaacaacgcaguaaaaaauaauaacaacgaagaaccaucugacaaacacauagaacaauaccuaaaaacaauaaaaaacucauuaucaaccgaauggucacccugcucaguaacaugcggaaacggaauacaaguacgcauaaaaccaggauccgccaacaaaccaaaagaccaacuagacuacgaaaacgacauagaaaaaaaaauauguaaaauggaaaaaugcucaucaguauucaacgucgucaacucauccauuggacuaauaaugguacucagcuucuuauuccuaaauuaa

SEQ ID NO: 5442 - RNA, 1239 nt, Artificial Sequence
  derived and/or modified CDS sequence (opt6) from Pf(Tz98-084)__BAM84792.1__CSP
augaugagaaaacuagcaauacuaucaguaucauccuuccuauucgucgaagcauuauuccaagaauaccaaugcuacggauccucaucaaacacaagaguacuaaacgaacuaaacuacgacaaugcuggcacaaaccuauauaacgaacuagaaaugaacuacuacggaaaacaagaaaacugguacucccuaaaaaaaaauucccgaucacuuggagaaaaugacgacggcaauaauaacaacggagacaacggcagagaaggaaaagaugaagacaaaagagacggcaauaacgaagacaacgaaaaacuaagaaaaccaaaacacaaaaaacuaaaacaacccgcagacggaaacccagacccaaacgcaaacccaaacgucgauccaaacgccaaccccaacguagacccaaacgcaaacccaaacguagacccaaaugcaaacccaaacgcaaacccaaacgcaaacccaaaugcaaaccccaacgcaaauccaaacgcaaauccaaacgccaaccccaacgcaaacccaaacgcaaacccuaacgcaaauccaaacgcaaacccaaaugcaaacccaaacgccaauccaaaugcaaacccaaacgcuaacccaaacguagauccaaacgcaaacccaaaugcaaaccccaacgcaaacccaaacgcaaaccccaacgcaaacccaaaugcaaacccaaacgcuaacccaaacgcaaacccaaacgcaaacccaaacgcaaacccaaacgcaaauccaaaugcaaacccuaacgcaaaccccaaugcaaacccaaacgccaauccaaacgccaacccgaacgcaaacccaaacgcaaacccaaaugcaaauccaaauaaaaacaaccaaggaaacggacaaggccauaacaugccaaacgacccaaacagaaacguagacgaaaacgcaaacgcaaacaaugcaguaaaaaacaacaacaacgaagaacccuccgaccaacacauagaaaaauacuuaaauaaaauccaaaacucccuaucaaccgaaugguccccaugcucagucacaugcggaaacggaauacaaguacgcauaaaacccggaucugcaaacaaaccaaaagaucaauuagacuacgcaaacgacauagaaaaaaaaauaugcaaaauggaaaaaugcucaucaguauucaacgucguaaacaguucaauaggacuuauaaugguacucucauuccuauuccucaauuaa

SEQ ID NO: 5443 - RNA, 1239 nt, Artificial Sequence
  derived and/or modified CDS sequence (opt6) from Pf(Tz98-119)__BAM84797.1__CSP
augaugagaaaacuagcaauacucuccgucucaucauuccucuuuguagaagcucuauuucaagaauaccaaugcuacggaucauccucaaacacaagaguacuaaacgaacuaaacuaugacaaugcaggcacaaaucuauacaacgaauuagaaaugaacuacuacggaaaacaagaaaacugguacagccuaaaaaaaaacucaagaucacuuggagaaaacgacgacggcaacaacaacaacggagacaacggaagagaaggaaaagacgaagacaaaagagacggcaacaacgaagauaacgaaaaacuacgaaaaccaaaacacaaaaaacuaaaacaaccugccgacggaaacccagacccgaacgcaaacccaaacguggacccaaacgcaaacccaaauguagacccaaacgcaaaucccaauguagauccaaaugcaaaccccaaugcaaacccaaacgcaaacccaaacgcaaaccccaacgcaaacccaaacgcaaauccaaacgcaaauccaaaugcaaacccaaacgcaaacccaaacgcaaacccaaaugcaaacccaaaugcaaacccaaacgcaaacccaaaugcaaacccaaacgcaaaccccaacguagauccuaaugcaaacccaaacgcaaauccaaaugcaaauccaaaugcaaauccaaaugccaauccaaacgcaaacccaaacgcaaacccaaacgcaaacccaaacgccaacccaaacgcaaacccaaaugcaaacccaaacgcaaauccaaacgcaaacccaaaugcaaaccccaacgcaaacccaaacgcaaauccaaacgcgaacccaaacgccaacccaaacgcaaacccaaacaaaaacaaccaaggaaacggacaaggacacaacaugccaaacgaccccaacagaaacgucgacgaaaaugcaaaugcaaacaacgcaguuaaaaacaacaauaaugaagaaccaucagaccaacauauagaaaaauaucuaaaaacaauacaaaacucauuauccacagaauggucaccuugcuccguaaccugcggcaauggaauacaaguaagaauaaaaccaggauccgccaacaaaccaaaagaccaacuagacuacgccaacgacauagaaaaaaaaauauguaaaauggaaaaaugcucauccguauucaaugucgucaacuccucaaucgguuuaauaaugguccuaucauuccuuuucuuaaacuaa

SEQ ID NO: 5444 - RNA, 1239 nt, Artificial Sequence
  derived and/or modified CDS sequence (opt6) from Pf(Yaounde)__AAN87602.1__CSP
augaugagaaaacuagccauauuaucaguuucgucauucuuauucguagaagcacuauuccaagaauaccaaugcuacggaucaucaagcaauacaagaguacucaacgaacuaaacuacgacaacgcaggaacaaaccuauacaaugaacuagaaaugaauuauuacggaaaacaagaaaauugguauucauuaaaaaaaaauuccagaucacucggagaaaacgacgacggcaacaacaauaauggagauaacggaagagaaggaaaagacgaagacaaaagggacggaaacaacgaagacaaugaaaaacuaagaaaaccaaaacauaaaaaauuaaaacaaccagcagacggaaacccagauccaaacgcaaacccaaacgucgacccaaacgcaaauccaaacguagauccaaaugcaaacccaaacguagacccaaaugcuaacccaaacgcaaacccaaacgcaaaccccaacgcaaacccaaacgcaaacccuaaugcaaacccaaacgcaaauccaaacgcaaacccuaacgcaaacccaaaugcaaaccccaacgcaaauccaaacgcaaacccaaaugcaaacccaaacgccaacccaaacgcaaacccaaacguagacccaaacgcaaauccaaacgcaaaccccaacgcaaacccaaacgcaaacccaaacgcaaacccaaaugcaaacccaaaugcaaacccaaacgcaaaccccaaugcaaacccaaacgcaaacccaaacgccaacccaaacgcaaacccaaacgccaacccaaaugcaaauccaaaugcaaacccaaacgcaaauccaaacgcaaacccaaaugcaaauccaaacgcaaaccccaacaaaaacaaccaagguaacggacaaggacacaacaugccaaacgacccaaacagaaauguagaugaaaacgcaaacgcaaacaaugccguaaaaaauaacaacaacgaagaaccuucagaccaacauauagaaaaauaccuaaacaaaaucaaaaacucauuaucaaccgaauggucucccuguucaguaacaugcggaaacggaauacaaguaagaauaaaaccaggaucugccaacaaaccaaaagaccaacuagacuacgcaaacgacauagaaaaaaaaauaugcaaaauggaaaaaugcucauccguauuuaacguaguaaauaguucaauaggacuaauaaugguacuaucauucuuauuccuaaacuaa

SEQ ID NO: 5445 - RNA, 1239 nt, Artificial Sequence
  derived and/or modified CDS sequence (opt6) from Pf(Yaounde)__AAN87587.1__CSP
augaugagaaaacuagccauauuaucaguaucaucauuccuauucguagaagcacuauuccaagaauaccaauguuacggaagcucaucaaauacaagaguacuaaacgaacuaaacuacgacaacgcaggaacaaaccuauauaacgaacuagaaaugaauuauuacggaaaacaagaaaacugguauuccuuaaaaaagaacucaagaucauuaggagaaaacgacgacggaaacaacaacaacggcgacaauggcagagaaggaaaagacgaagacaaaagagacggaaacaacgaagauaaugaaaaauuacgaaaaccaaaacacaaaaaauuaaaacaaccugcagacggaaacccagacccaaacgcaaacccaaacguagacccaaacgcaaacccaaacguagaccccaacgcaaacccaaacguagacccaaacgccaacccaaacgccaacccaaaugcaaaucccaacgcaaacccaaacgcaaacccaaacgcaaauccgaacgcaaacccaaacgcaaacccaaaugcaaacccaaacgcaaaccccaacgcaaacccaaaugcaaacccaaacgcaaauccuaacgcaaauccaaacgcaaacccaaacguagacccaaacgcaaacccaaaugcaaacccaaacgcaaacccaaaugcaaacccaaacgcaaacccaaacgcaaacccaaacgcaaacccaaacgcaaacccaaaugcaaacccaaaugcaaauccaaacgcaaaccccaacgcaaaucccaaugccaacccaaacgcaaacccaaacgcgaacccaaacgcaaacccaaacgcuaacccaaaugcaaaccccaacgcaaauccaaauaaaaacaaccaaggcaacggccaaggacacaacaugccaaacgaccccaacagaaacguagaugaaaacgccaaugcaaacaacgcagucaaaaacaauaacaacgaagaacccucagaucaacacauagaaaaauacuuaaaaacaauaaaaaacucauuaucaacagaaugguccccauguagugucacaugcggcaacggcauacaaguacgcauaaaaccaggcucagcaaacaaaccaaaagaucaacuagauuacgcaaacgacauagaaaaaaaaauaugcaaaauggaaaaaugcucaucaguauucaauguaguaaacuccucaauaggacuaauaaugguauuaucauuccuauucuuaaacuaa

SEQ ID NO: 5446 - RNA, 1236 nt, Artificial Sequence
  derived and/or modified CDS sequence (opt6) from Pf(A107)__ACO49330.1__CSP
augagaaaauuagcaauacuaucaguaucaucauuccuauucguagaagcacuauuccaagaauaccaaugcuauggaucaucaaguaacacaagaguacuaaaugaacuuaacuacgauaacgcaggcacaaaccuauacaacgaauuagaaaugaacuacuauggaaaacaagaaaauugguacagccuaaaaaaaaacucccgaucacuaggagaaaacgacgauggaaauaauaacaauggagacaacggacgagaaggaaaagacgaagauaaacgagacggaaacaacgaagauaacgaaaaacuacgaaaaccaaaacacaaaaaacuaaaacaaccaggagacggaaacccagacccaaacgcaaaccccaacguagauccaaaugcaaaccccaacguagacccaaacgcaaacccaaacgucgacccaaacgcaaauccaaacgcaaauccaaacgcaaacccaaacgccaacccaaacgcaaacccaaacgcaaauccaaaugcaaauccaaacgcaaacccaaacgcaaacccaaaugcaaauccaaacgccaacccaaacgcaaacccaaacgcaaauccuaaugcaaacccaaaugcaaacccaaacgcaaacccaaacgcaaacccaaacgccaacccaaaugcaaacccaaacgccaauccaaacgcaaacccaaacgcaaauccaaaugcaaauccaaacgcaaacccaaaugccaauccuaacgccaauccaaacgcaaacccaaacgcaaacccaaacgcaaacccaaacgcaaauccaaacgcaaaccccaacgccaaccccaacgcaaacccaaacgcaaacccaaacgcaaacccaaacaaaaacaaccaaggaaacggacaaggacacaacaugccaaacgaucccaaccgaaacgucgacgaaaacgcaaacgcaaacaacgcaguaaaaaacaacaacaacgaagaaccauccgauaaacacauagaacaauaccuaaaaaaaauacaaaacucauuaagcacagaauggucccccugcaguguaacaugcggaaacggcauacaaguacgcauaaaaccaggauccgccaacaaaccaaaagacgaacuagacuacgaaaacgacaucgaaaaaaaaaucugcaaaauggaaaaauguucaucugucuuuaacguaguaaacucaucaauaggacuaauaaugguacuaagcuuucuauucuuaaacuaa

SEQ ID NO: 5447 - RNA, 1233 nt, Artificial Sequence
  derived and/or modified CDS sequence (opt6) from Pf(IT)____CSP
augaugagaaaacuagccauacucucaguaucaucauuucuauucguagaagcacuauuccaagaauaucaaugcuacggaucaucaagcaacaccagaguacuaaacgaauuaaacuacgacaacgccggaaccaaccuauacaacgaacuagaaaugaacuacuacggaaaacaagaaaacugguacucacuaaaaaaaaauucaagaucccuaggagaaaacgacgauggagacaacgacaauggaaacaacaacaacggaaacaauaacaacggugacaacggacgagaaggaaaagacgaagacaaaagagacggcaauaacgaagacaacgaaaaacuaagaaaacccaaacacaaaaaacuaaaacagcccggcgacgauaaccccgacccaaacgcaaaucccaacguagacccuaacgcaaacccaaauguugauccaaacgcgaacccaaacgcaaacccaaaugcaaacccaaacgccaacccaaacgcaaacccaaacgcgaacccaaacgcaaacccaaaugucgacccaaaugcaaacccaaacgccaacccaaacgcaaacccaaacgccaacccaaacgcaaaccccaacgcaaacccaaacgcaaacccaaaugcuaacccaaaugcaaaccccaacgcaaacccaaaugcaaacccaaacgcaaacccaaacgcaaacccaaacgcgaacccaaacgcaaacccaaaugcaaacccaaaugcaaacccaaacgcaaacccaaaugcaaaccccaaugcaaacccaaacgcaaacccaaacgcaaacccaaacgcaaaccccaacgcaaacccaaaugcaaacccaaacgcaaacccaaacaaaaacaaccaaggaaacggacaaggacacaacaugccaaaugaucccaauagaaacgucgacgaaaacgcaaacgcaaacaacgcagucaaaaacaacaacaaugaagaaccaucagacaaacacauagaacaauaucuaaaaaaaauacaaaauucacuaucaacagaaugguccccauguagcguaacauguggaaacggaauacaaguuagaauaaaaccaggcuccgcagacaaaccaaaagaccaauuagacuaugaaaacgacauagaaaaaaaaauaugcaaaauggaaaaaugcucaucaguuuuuaacguaguaaacucauccauaggacuaauaaugguacuauccuucuuauuucuaaauuaa

SEQ ID NO: 5448 - RNA, 1227 nt, Artificial Sequence
  derived and/or modified CDS sequence (opt6) from Pf(14)__AGR53782.1__CSP
augaugagaaaauuagcaauacuaucuguauccucauucuuauucguagaagcacuauuccaagaauaccaaugcuacggaagcucaagcaacacaagaguacuaaacgaacuaaauuacgauaacgcaggcaccaaccuauacaacgaauuagaaaugaauuacuauggcaaacaagaaaacugguacucauuaaaaaaaaacucacgaucacuaggcgaaaacgaugauggaaacaacaacaacggagacaacggaagagaaggaaaagacgaagacaaaagagacggaaacaaugaagacaacgaaaaauuaagaaaaccaaaacacaaaaaacuaaaacaacccggagacggaaacccagauccgaacgcaaaucccaacguagacccaaacgcaaacccaaauguagauccaaacgcaaacccaaacguagacccaaacgcaaacccaaaugcaaacccaaaugcaaacccaaacgccaacccaaacgcaaaccccaacgcaaauccaaacgcaaacccaaacgcaaacccaaacgcaaacccaaacgcaaacccaaacgcaaacccaaacgucgacccaaacgccaacccaaacgcaaacccaaacgcaaaccccaacgcaaaccccaacgcaaacccaaacgccaaccccaacgcaaauccuaacgcaaacccaaacgcaaacccaaacgccaaccccaacgcaaauccaaaugcaaacccaaacgcaaacccaaacgcaaauccaaacgcaaacccaaacgcaaacccaaacgcaaauccaaacgcuaauccaaacgcaaacccaaacgcaaauccaaacgcaaacccaaacgccaaccccaacaaaaacaaccaaggaaacggccaaggacacaacaugcccaacgacccuaaccgaaacguagacgaaaacgcaaacgcaaacaaugcaguaaaaaacaacaauaacgaagaaccaucagaucaacacauagaaaaauaccuacaaaaaauucaaaacucacuaucaacagaauggucaccaugcucaguaacaugcggaaacggcauacaaguaagaauaaaaccuggcagcgcaaacaaaccaaaagaccaacuaaacuacgaaaacgacauaggaaaaaaaauaugcaaaauggaaaaaugcagcagcgucuucaacguagucaacucaucaauaggacuaauaauggugcuauccuuccuauucuuaaacuaa

SEQ ID NO: 5449 - RNA, 1227 nt, Artificial Sequence
  derived and/or modified CDS sequence (opt6) from Pf(Asembo Bay)__AAN87609.1__CSP
augaugagaaaauuagcuauacuaucaguauccucauuccuauucgucgaagcacuauuccaagaauaccaaugcuauggaucaucuagcaacacaagaguacuaaaugaacuaaauuacgacaacgcaggaacaaaucuauacaacgaacucgaaaugaauuauuacggaaaacaagaaaacugguacagcuuaaaaaaaaacucaagaucacuaggagaaaacgacgacggaaacaacaacaauggagacaauggacgagaaggaaaagacgaagacaaaagagacggaaauaacgaagacaacgaaaaacuaagaaaaccaaaacacaaaaaacuaaaacaaccagcagauggaaauccagacccaaacgcaaacccaaacguagacccaaacgcaaaccccaacguagacccaaaugcaaacccaaacguagaccccaaugcaaauccaaacgccaacccaaacgcaaacccaaacgcaaacccaaacgcaaacccaaacgcaaauccaaacgcaaacccaaacgcaaacccaaacgcaaacccaaacgcaaaccccaacgcaaacccaaacgcaaacccaaaugcaaacccaaacgcaaaccccaauguggaucccaaugcaaauccaaacgcaaacccuaacgcaaacccaaaugcaaacccaaaugcaaacccaaacgcaaacccaaacgcaaaccccaaugcaaacccaaacgcaaacccaaacgcaaaucccaacgcaaaccccaacgccaacccaaacgcaaauccaaacgcuaacccaaacgcaaacccaaacgcaaacccaaacgcuaacccaaacgcaaacccaaacgcaaacccaaacaaaaacaaccaaggaaacggacaaggacacaacaugccaaacaacccuaaccgaaacguagacgaaaacgcaaacgcaaauaacgcaguaaaaaacaacaauaacgaagaaccuucagacaaacauauagaacaauaucuaaaaacaauacaaaacucacuaucaacagaauggucaccaugcucaguaacauguggaaacggaauccaaguaagaauaaaaccaggaucagcaaacaaaccaaaagaccaacuagacuacgcaaaugauauagaaaaaaaaauaugcaaaauggaaaaaugcucaucugucuucaacgucguaaacucaucaauaggccuaauaaugguacuaucauuuuuauuccuaaauuaa

SEQ ID NO: 5450 - RNA, 1227 nt, Artificial Sequence
  derived and/or modified CDS sequence (opt6) from Pf(Bolivar)__AAN87613.1__CSP
augaugcgcaaauuagcaauacuaucaguaucaucauuccucuucgucgaagcacuauuucaagaauaccaaugcuauggauccucaucaaacacaagaguauuaaaugaauuaaauuaugacaacgcaggaacaaacuuauacaacgaacuagaaaugaacuauuacggaaaacaagaaaauugguacucacuaaaaaaaaacucaagaucacuaggagaaaaugaugauggaaacaacaacaacggagacaacggaagagaaggaaaagaugaagauaaaagagacgguaacaacgaagauaacgaaaaacuacgaaaacccaaacacaaaaaacuaaaacaacccggagacggaaacccagacccuaaugcaaauccaaauguagacccaaacgcuaacccaaacguagaccccaacgcaaacccaaacguagaccccaaugcaaauccaaacgcaaacccaaacgcaaacccaaacgcaaauccaaacgcaaacccaaacgcaaauccaaaugccaacccaaacgcaaauccaaacgcaaauccaaacgcaaaccccaacgcuaaccccaacguagacccaaacgcaaacccaaacgcaaacccaaacgccaacccaaacgccaaccccaaugcaaauccaaacgcaaacccaaacgcaaacccaaaugcaaacccaaacgcaaauccaaacgcaaacccaaacgcaaacccaaacgcaaaucccaacgcaaauccaaacgcaaacccaaacgccaacccaaacgccaauccaaacgcaaauccaaaugcaaacccaaacgcaaauccaaacgccaaccccaacgcaaaucccaaugcaaaucccaauaaaaacaaccaaggaaacggacaaggacacaauaugccaaaugauccaaacagaaacguagacgaaaacgcaaaugccaacaacgcagucaaaaacaacaacaacgaagaacccucagacaaacacaucgaacaauaucucaaaaaaauacaaaacgcccuauccacagaauggucaccaugcagcguaacuugcggaaacgguauacaaguuagaauaaaaccaggaucugccaacaaaccaaaagaccaacuagacuaugaaaacgacauagaaaaaaaaauaugcaaaauggaaaaaugcucaucagucuucaauguaguuaacucaucaauaggacuaauaaugguauuauccuuccuauuccuaaacuaa

SEQ ID NO: 5451 - RNA, 1227 nt, Artificial Sequence
  derived and/or modified CDS sequence (opt6) from Pf(Br419M3)__BAM85120.1__CSP
augaugagaaaacuagcaauacucucaguaucaucauucuuauucguagaagcauuauuccaagaauaccaaugcuauggaagcucaucaaacaccagaguacuaaaugaauuaaacuacgacaacgccggcacaaaccucuacaacgaacucgaaaugaauuacuacggaaaacaagaaaacugguacagucuaaaaaaaaacucccgaagccuaggagaaaacgacgacggaaauaacaacaacggagacaacggaagagaaggaaaagacgaagacaaaagagacggaaacaacgaagacaaugaaaaauuaagaaaaccaaaacacaaaaaacuaaaacaaccagcagacggaaacccagacccgaacgcaaacccaaacguagacccaaaugcaaacccaaacguagacccaaaugcaaacccaaacguagacccaaacgcaaacccaaaugcaaaucccaacgcaaacccaaacgcaaacccaaaugcaaaccccaacgcaaacccaaaugcaaaucccaaugcaaacccaaacgcaaacccaaacgcaaacccaaacgcaaacccaaacgcaaacccaaacgcaaacccaaacgcaaaccccaacgcaaacccaaauguagacccaaaugcaaaccccaacgcaaauccaaacgcaaacccaaaugcaaauccaaacgccaacccaaacgcaaaccccaaugcaaacccaaacgcaaacccaaacgcaaacccaaacgcaaauccaaaugcaaaccccaaugcaaauccuaacgcaaacccaaacgcaaaccccaacgcaaacccaaacgcaaacccaaacgcaaauccaaacgcaaauccaaacaaaaacaaucaaggaaauggacaaggacauaauaugccaaacaacccaaaccguaacguagaugaaaacgcaaacgcaaacaacgcagucaaaaacaacaacaacgaagaacccucagacaaacacauagaacaauaccuaaaaaaaauacaaaacucauuaucaacagaauggucaccauguucaguaaccugcggaaacggaauacaagugcgaauaaaaccaggaucagcaggaaaaucaaaagacgaauuagacuacgaaaacgauauagaaaaaaaaauauguaaaauggagaaauguucaucaguuuuuaacgugguaaacagcucaauuggacucauaaugguacuuucauuccuauuuuuaaauuaa

SEQ ID NO: 5452 - RNA, 1227 nt, Artificial Sequence
  derived and/or modified CDS sequence (opt6) from Pf(Gha1110-003)__BAM84840.1__CSP
augaugagaaaacuagcaauacucucaguauccucauuccuauuuguagaagcccuauuccaagaauaccaaugcuacggaucaucuucuaacacaagaguccucaacgaacucaacuaugacaacgccggaacaaaccuauacaacgaacuagaaaugaauuacuauggaaaacaagaaaacugguacucccuaaaaaaaaacucaagaucccuaggagaaaacgacgacgguaacaacaacaauggagacaacggaagagaaggaaaagaugaagacaaaagagacggaaacaacgaagacaacgaaaaacuaagaaaaccaaaacacaaaaaacuaaaacaaccagcagacggaaacccagacccaaacgcaaauccaaacguagauccaaacgcaaacccaaacguagacccaaaugcaaacccaaacguagacccaaacgccaacccaaacgccaauccgaaugcaaauccuaacgcaaacccaaacgcaaauccaaacgcaaacccaaacgccaacccaaacgcaaaucccaacgcaaacccaaaugcaaaccccaacgcaaauccaaacgcaaacccaaacgcgaauccaaacgcaaacccaaacguagacccaaacgcaaacccaaacgcuaauccgaaugcaaauccaaacgccaacccaaacgcaaacccaaacgcaaaccccaacgcaaacccaaacgcuaaucccaacgccaacccaaaugcaaaccccaacgcaaacccaaacgcaaauccaaaugccaauccaaacgcaaauccaaacgccaacccaaacgccaauccaaacgcaaacccaaacgcaaacccaaacgcaaauccaaacaagaacaaucaaggaaacggacaaggacacaauaugccaaacgacccaaacagaaacguagacgaaaaugcaaacgccaauaacgcaguuaaaaacaacaacaacgaagaaccaucagaucaacacauagaaaaauaccuaaaaacaaucaaaaacucacuaucaacagaauggucaccaugcucaguaacaugcggaaacggaauacaagucagaauaaaaccagguucagcaaacaaaccaaaagaccaacuagacuacgcaaacgauauagaaaaaaaaauaugcaaaauggaaaaaugcucaucaguauucaacguagucaacucaucaauaggacuaauaaugguacucucauuccuauuccuaaacuaa

SEQ ID NO: 5453 - RNA, 1227 nt, Artificial Sequence
  derived and/or modified CDS sequence (opt6) from Pf(Tz03-032)__BAM84799.1__CSP
augaugagaaaacuagccauucuaucagucucaucauuccucuucguagaagcacuauuucaagaauaccaaugcuauggaucaucaucaaacacuagaguauuaaaugaauuaaauuacgacaacgcaggaacaaaucucuacaacgaauuagaaaugaacuacuacggaaaacaagaaaacugguauucacuaaaaaaaaacucacgcucucuuggagaaaacgaugacggaaacaacaacaacggagauaacggccgagaaggaaaagacgaagacaaaagagacggaaacaacgaagacaacgaaaaauuacgaaaacccaaacauaaaaaacuaaaacagccagccgacggaaacccagacccaaacgcaaacccaaacgucgaccccaacgcaaacccaaacguugacccaaacgcaaacccaaacguagacccaaacgcaaacccuaacgcaaacccaaacgcaaauccaaacgcaaacccaaacgccaauccaaaugcaaacccaaacgcaaacccaaacgcaaacccaaacgcaaacccaaacgcaaacccaaacguagacccaaacgcaaacccaaacgccaacccaaacgcaaacccaaaugcaaacccaaacgcaaacccaaacgcgaacccaaacgcaaacccaaacgcaaacccaaacgcaaacccuaacgcaaacccaaacgccaacccaaaugccaacccaaacgcaaacccaaacgcaaacccaaacgccaacccaaaugcaaacccaaaugcaaacccaaacgcaaacccaaacgcaaaccccaacgcaaauccaaacgcaaacccaaacgccaacccaaacgcaaacccaaacaaaaacaaccaaggaaacggacaaggacacaacaugccaaacgacccuaaucgcaacguugacgaaaaugcuaacgcaaauaacgcaguaaaaaacaauaauaacgaagaaccaucagaccaacacauagaaaaauacuugaaaaaaauacaaaacucacuaucaacagaguggucacccugcucaguuaccugcggaaacggaauacaaguacgcauaaaaccaggaucagcaaacaaaccaaaagaccaacuagauuacgcaaacgacauagaaaaaaaaauaugcaaaauggaaaaaugcucaucagucuucaacguaguaaacagcuccauaggacucauaaugguauuaucauucuuauucuuaaacuaa

SEQ ID NO: 5454 - RNA, 1227 nt, Artificial Sequence
  derived and/or modified CDS sequence (opt6) from Pf(Tz03-033)__BAM84800.1__CSP
augaugagaaaauuagcaauacucucagucucaucauuucuauucguagaagcauuauuccaagaauaucaaugcuacggaucuucaagcaacacaagaguacuaaacgaacuuaacuacgacaaugcaggaacaaaccuauacaacgaacuagaaaugaacuacuacggaaaacaagaaaacugguacucacuaaaaaagaauucuagaucacuaggcgaaaacgacgacggaaauaacaauaacggagauaacggcagagaaggaaaagacgaagacaaacgagacggaaacaacgaagacaacgaaaaacuaagaaaacccaaacacaaaaaacuaaaacaaccagcagacggaaaccccgaccccaacgcaaacccaaauguagacccuaacgccaauccaaauguagauccaaacgcaaacccaaauguagaccccaacgcaaacccaaacgccaauccaaacgccaacccgaaugcaaacccaaaugcaaacccaaacgcaaacccaaaugcaaaccccaaugcaaauccaaacgccaacccaaacgcaaacccaaacgcaaauccaaaugcaaacccaaaugcaaacccaaacgcaaacccaaacguagaucccaacgcaaacccaaacgccaaccccaacgcaaacccaaacgcaaaccccaacgcaaacccaaacgccaacccaaacgcaaacccaaacgcaaauccaaacgccaacccaaacgccaacccaaacgcaaacccaaacgcaaacccaaacgcaaacccaaacgcaaaccccaacgcaaacccaaacgccaacccaaaugcaaacccaaacgcaaacccaaacgcaaacccaaauaaaaauaaccaaggaaacggacaaggacacaauaugccaaaugacccaaacagaaacguagacgaaaacgcaaacgcaaacaacgcaguaaaaaauaacaacaaugaagaaccuucagaccaacacaucgaaaaauacuuaaaaacaauaaaaaacucacuauccacagaauggucaccuugcucaguaacauguggaaacggaauacaaguuagaauaaaaccaggaucagcaaauaaaccaaaagaugaacuagauuacgccaacgacauagaaaaaaaaauauguaaaauggaaaaaugcucaucaguauuuaacgucguaaauucaucaaucggacuuauaaugguacucucauuucuauucuuaaacuaa

SEQ ID NO: 5455 - RNA, 1227 nt, Artificial Sequence
  derived and/or modified CDS sequence (opt6) from Pf(Tz93-056)__BAM84765.1__CSP
augaugagaaaacuagcaauacuaaguguauccagcuuccuuuucguagaagcacuauuccaagaauaccaaugcuacggaagcucauccaacacacgaguauuaaacgaacuaaacuacgauaacgccggcacaaaucuuuacaacgaacuagaaaugaacuacuauggaaaacaagaaaacugguacucacuaaaaaaaaacucaagaucacuaggagaaaacgacgacggcaacaacaauaacggagacaacggcagagaaggaaaagacgaagauaaaagagacggaaacaacgaagauaacgaaaaacuaagaaaaccaaaacacaaaaaacugaaacaaccagcagacggaaacccagacccaaacgccaacccaaauguagacccaaacgcaaacccaaacguagauccaaacgcaaauccaaacgucgacccaaacgcaaacccaaacgccaaccccaacgcaaacccaaacgcaaacccaaacgcaaacccaaaugccaauccaaacgcaaacccaaacgcaaacccaaacgccaaccccaaugcaaacccaaacgcaaauccaaacgcaaacccaaaugccaacccaaacgcuaacccaaacguagacccaaacgcaaacccaaacgcaaacccaaacgcaaacccaaacgcaaacccaaacgcaaacccaaacgcaaacccaaacgcaaacccaaacgcaaacccaaacgcaaacccaaaugcaaauccaaaugcaaacccaaaugcaaacccaaaugcaaauccaaacgcaaacccaaaugcaaacccaaacgcaaauccaaacgcaaacccuaacgcaaacccaaacgccaauccaaacaaaaacaaccaaggcaacggacaaggacacaacaugccaaacgacccaaauagaaacguagacgaaaacgccaacgcaaacaacgcagucaaaaacaacaacaacgaagaaccaucagacaaacacauaaaagaauaccuaacaaaaauaaaaaauucaauaucaacagaauggucuccaugcucaguaacauguggaaauggaauccaagucagaauaaaaccaggcucagcaaacaaaccaaaagaugaacucgacuacgaaaacgacauagaaaaaaaaauaugcaaaauggaaaaaugcucaucaguauucaauguaguaaacucaucaaucggauuaauaaugguccuaucauucuuauuccuaaauuaa

SEQ ID NO: 5456 - RNA, 1227 nt, Artificial Sequence
  derived and/or modified CDS sequence (opt6) from Pf(Tz93-085)__BAM84771.1__CSP
augaugagaaaacuagcaauacucucaguaucauccuuccuauucguagaagcacuauuccaagaauaucaaugcuacggauccucaucaaacacaagaguccuaaacgaacuaaacuacgacaacgcaggaacaaaccuauacaacgaacuagaaaugaacuauuacggaaaacaagaaaacugguacagccuaaaaaaaaacucccgcucacucggagaaaacgaugacggaaacaauaauaauggagacaacggaagagaagguaaagacgaagauaaaagagacggaaauaacgaagacaacgaaaaauuacgcaaaccaaaacacaaaaaacuaaaacaacccgcagacggaaacccagacccaaaugcaaauccaaauguagaccccaacgcaaaccccaacguagacccaaacgcaaacccaaaugucgacccaaacgcaaauccaaacgcaaacccaaacgcaaacccaaacgcaaacccaaacgcaaauccaaacgccaacccaaacgcaaauccaaaugcaaacccuaacgcaaacccaaacgcuaauccgaaugcaaacccaaaugcaaacccaaacgcaaacccaaacgccaacccaaacguagauccaaaugcaaauccaaacgcaaauccaaacgcaaaccccaacgcaaacccaaacgcaaacccaaacgcaaacccaaacgcaaacccaaaugcaaaucccaacgcaaauccaaacgcaaaccccaacgccaacccaaaugcaaacccaaaugcaaacccaaacgcaaacccaaacgcaaaccccaacgcaaauccaaacgcaaacccaaaugcaaauccaaacgcuaauccaaacaaaaacaaccaaggaaacggacaaggacacaacaugccaaaugaccccaaccgcaacguagacgaaaaugcaaaagcaaacaaugcagucaaaaacaacaauaacgaagaacccucagacaaacacauaaaagaauacuuaaauaaaauacaaaacucaauuucaacagaaugguccccaugcagcguaacaugcggaaacggaauccaaguaagaauaaaaccaggaucagcagacaaaccaaaagaccaacuagacuacauaaacgacauagaaaaaaaaauauguaaaauggaaaaaugcuccuccguauucaacguaguaaacucaucaauaggacuuauaaugguacucucauuccuauucuuaaacuaa

SEQ ID NO: 5457 - RNA, 1227 nt, Artificial Sequence
  derived and/or modified CDS sequence (opt6) from Pf(Tz93-102)__BAM84773.1__CSP
augaugagaaaacuagcaauauuaucagucuccagcuuccuauucgucgaagccuuauuucaagaauaccaaugcuacggaucaucauccaacacaagaguucuaaacgaacucaauuacgauaacgcaggaacaaacuuauacaacgaacuagaaaugaacuacuauggaaaacaagaaaauugguacagccuaaaaaaaaacucaagaucacuaggagaaaacgacgacggaaacaacaacaauggagacaacgguagagaaggaaaagacgaagauaaacgagacggaaacaacgaagacaaugaaaaacuacgaaaacccaaacacaaaaaacuaaaacaaccaggagacggaaauccagacccaaacgcaaacccaaacguagauccaaacgcuaacccaaaugucgacccaaaugcuaacccaaacgucgacccaaacgcaaaccccaacgcaaacccaaacgcaaauccaaacgcaaauccaaacgcaaaucccaaugcaaaccccaacgcaaaccccaacgcaaacccaaacgccaacccaaacgcaaauccaaaugcaaaccccaacgcaaacccaaaugcaaacccaaacgcuaauccaaacguagacccaaacgcaaacccaaacgcaaacccaaacgcaaacccaaacgcaaacccaaacgcaaacccaaacgcaaacccaaacgcaaacccaaacgcaaacccaaacgcaaacccaaacgcaaauccaaacgccaacccaaacgcaaacccaaacgccaacccaaacgcaaacccaaacgcaaaccccaacgcaaacccaaaugcaaacccaaacgcaaacccaaaugcaaaccccaauaaaaacaaccaaggaaacggacaaggacacaacaugccaaacgacccaaacagaaacgucgacgaaaacgcuaacgccaacaaugccguaaaaaauaacaacaacgaagaaccaucagacaaacacaucgaacaauaccuaaaaacaauaaaaaauucauuaucaaccgaauggucacccugcagcgucacauguggaaacggaauacaagucagaauaaaaccaggcucagccaauaaaccaaaagacgaacuaaauuacgaaaacgauauagaaaaaaaaauaugcaaaauggaaaaaugcuccucaguauucaauguaguaaacagcucaauaggacuaauaaugguacuuucauuccuauucuuaaauuaa

SEQ ID NO: 5458 - RNA, 1227 nt, Artificial Sequence
  derived and/or modified CDS sequence (opt6) from Pf(Tz98-021)__BAM84783.1__CSP
augaugagaaaauuagcuauauuauccguaucaaguuuucuauucguagaagcucuauuccaagaauaccaaugcuacggaucaucaucaaacacaagaguacuaaacgaacuaaauuaugacaacgcaggaacaaaccucuacaacgaacucgaaaugaacuacuacgguaaacaagaaaauugguacagcuuaaaaaaaaacagcagauccuuaggagaaaacgacgacggcaacaauaacaacggagacaauggacgagaaggaaaagaugaagacaaaagagauggaaacaacgaagacaaugaaaaacuacguaaaccaaaacauaaaaaacugaaacaaccagcagacggaaacccagacccaaacgcaaacccaaacguagauccaaacgcaaacccaaacguagacccaaacgcaaauccaaacguugacccaaacgcaaacccaaacgcaaaucccaacgcaaacccaaacgcaaauccaaacgcaaacccaaacgcaaacccaaacgcaaacccaaacgcaaaccccaacgcaaacccaaaugccaaccccaacgcaaaccccaacguagacccaaacgcaaacccaaacgccaacccaaacgcaaauccaaacgcaaauccaaacgcaaaccccaacgcaaacccaaacgcaaacccaaacgcaaauccaaacgcaaacccaaacgcaaacccaaacgccaacccuaacgcaaacccaaaugcaaacccaaaugcaaacccaaacgcaaauccaaacgcaaacccaaacgccaacccaaacgcaaacccaaaugcaaauccaaacgcaaacccaaacgcaaacccaaacgcaaacccaaacaaaaacaaccaaggaaacggacaaggacacaacaugccaaacgacccaaauagaaacguagacgaaaacgcuaacgcaaacaacgcaguaaaaaacaacaacaacgaagaaccaucagaccaacacauagaaaaauaccuaaaaacaauacaaaacucacuauccaccgaauggucaccaugcucaguaacuugcggaaacggcauacaaguaagaauaaaaccaggaucagcuaacaaaccaaaagaccaacuagacuaugccaacgacauugaaaaaaaaauaugcaaaauggaaaaauguucaucagucuucaacguaguaaacucaucaaucggccuaauuaugguacuaucuuuccuauuccucaacuaa

SEQ ID NO: 5459 - RNA, 1227 nt, Artificial Sequence
  derived and/or modified CDS sequence (opt6) from Pf(Tz98-030)__BAM84785.1__CSP
augaugcgcaaacuagccauacuaucaguaucaucauuccucuucguagaagcauuauuccaagaauaccaaugcuacgguagcucaagcaacacacgaguacucaacgaacuaaacuaugacaacgcaggaaccaaccuauauaaugaacuagaaaugaauuacuacggaaaacaagaaaauugguacagccuaaaaaaaaacucucgaucacucggagaaaacgacgacggaaacaacaacaacggagacaacggccgagaaggaaaagacgaagacaaaagggacggaaacaaugaagacaacgaaaaauuacgaaaaccaaaacauaaaaaacuaaaacaacccggagauggaaacccagacccaaacgccaacccaaacguagacccaaacgcaaacccaaacguagacccaaaugcaaauccaaacgucgacccaaacgcaaaccccaaugcaaacccaaaugcaaacccaaacgcaaacccaaaugcaaacccaaacgcaaacccaaacgcaaaccccaacgccaacccaaacgcaaacccaaacgcaaauccaaacgccaauccaaacguagacccaaacgcaaacccaaacgcuaacccaaaugcaaacccaaacgcaaacccaaacgcaaacccaaacgcaaacccaaacgcaaauccaaacgcaaauccaaacgcaaacccaaaugcaaacccaaacgcaaacccaaacgcaaacccaaacgccaacccaaacgcaaacccaaacgcaaaccccaacgccaacccaaacgcaaauccaaacgcaaacccaaacgcaaacccaaacgcaaacccaaaugcaaacccaaacgcaaacccaaacaaaaauaaccaaggaaacggccaaggacauaauaugccaaacgaccccaacagaaacgucgacgaaaacgcaaaugcaaauaacgcaguaaaaaauaacaauaaugaagaaccaucagaucaacacauagaaaaauaccuccaaaaaauacaaaauucacuaucaacagaauggucacccugcagcguaacaugcggaaacggcauacaaguacgcauaaaacccgguuccgcaaacaaacccaaagaccaauuaaauuaugaaaacgacaucgaaaaaaaaauaugcaaaauggaaaaaugcucaucaguauucaauguagucaacuccucaauaggauuaauaaugguacuaaguuuccuauucuuaaacuaa

SEQ ID NO: 5460 - RNA, 1227 nt, Artificial Sequence
  derived and/or modified CDS sequence (opt6) from Pf(Tz98-070)__BAM84790.1__CSP
augaugagaaaauuagcaauauuaagcguuucaucauucuuauucguagaagcccuauuccaagaauaucaauguuaugguucaucaucaaacacaagaguacucaaugaacuaaacuaugacaacgcaggcacaaacuuauacaacgaacuagaaaugaacuacuacggaaaacaagaaaacugguacucacuuaaaaaaaacucacgaucacuaggagaaaacgacgauggaaacaacaacaacggagauaacggaagagaaggaaaagacgaagacaaaagagacggaaacaacgaagacaacgaaaaacuaagaaaaccaaaacacaaaaaauuaaaacaaccaggagacggaaacccagacccaaacgcuaacccaaacguagacccaaaugcaaacccaaauguagacccaaaugcaaacccaaaugucgauccaaacgcaaaccccaacgcaaacccuaacgcaaacccaaacgcaaacccaaacgcaaaucccaacgcaaacccaaacgcaaacccaaaugccaacccuaacgcaaauccaaacgccaacccgaacgcaaacccaaacgcaaaccccaaugcaaaccccaacgcaaacccaaauguagacccaaacgcaaauccaaaugcaaauccaaaugcaaacccaaacgcgaacccaaacgcuaauccaaaugccaaccccaaugcaaacccaaacgcaaaccccaacgcaaaccccaacgccaacccaaaugcaaaucccaaugcaaacccaaacgccaacccaaacgcaaacccaaacgcaaauccaaacgcaaauccaaaugcaaaccccaacgcaaacccaaacgcaaacccaaacaaaaacaaccaaggaaacggacaaggacacaacaugccaaacgacccaaaccgaaauguagacgaaaacgcuaaugcaaacgacgcagucaaaaacaacaauaaugaagaaccauccgaccaacauauagaaaaauaccuaaaaauaaucaaaaacucacuaucuacagaauggucaccaugcucaguaacaugcggaaacggcauacaaguaagaauaaaaccaggaucagcaaacaaaccaaaagaccaacuagacuacgccaacgacaucgaaaaaaaaauaugcaaaauggaaaaaugcaguuccgucuucaauguaguaaacagcuccauaggccuaauaaugguucucucauuccuauuccuaaauuaa

SEQ ID NO: 5461 - RNA, 1224 nt, Artificial Sequence
  derived and/or modified CDS sequence (opt6) from Pf(A150)__ACO49332.1__CSP
augagaaaacuagccauacuauccguaucauccuuucucuucguugaagcuuuauuccaagaauaccaauguuacggaagcucaucaaacacaagaguccuaaaugaacuaaacuaugacaacgccggcaccaacuuauauaacgaauuagaaaugaauuacuacggaaaacaagaaaacugguacagccucaaaaaaaacuccagaucacuaggcgaaaacgacgacggaaauaauaacaacggagauaacggcagagaaggcaaagacgaagacaaaagagacggaaacaacgaagacaacgaaaaacugagaaaacccaaacacaaaaaacuaaaacaaccaggagacggaaacccagacccaaaugcaaauccaaacguagacccaaacgcaaacccaaacguagaccccaaugcaaacccaaacguagauccaaaugcaaacccaaacgcaaacccaaacgcaaacccaaaugccaacccaaacgcaaacccaaacgcaaaucccaacgcaaacccaaaugcaaacccaaacgcaaacccaaacgcaaacccaaacgcaaacccaaaugcaaauccaaaugcaaacccaaacgcgaacccaaacgcaaacccaaacgcaaacccaaacgcaaacccaaacgcaaacccaaacgcuaauccaaacgccaacccaaaugccaacccaaacgcaaacccaaacgcaaacccaaacgcaaauccaaacgcuaacccaaacgcaaauccaaacgcaaacccaaacgcaaacccaaaugcaaaccccaacgcaaaccccaacgcuaacccaaacgcaaacccaaaugcaaacccaaacgcaaauccaaacaaaaacaaccaaggaaacggacaaggacacaacaugccaaacgauccaaaccgcaacguagacgaaaacgcaaaugcaaacaacgcaguaaaaaacaacaacaacgaagaaccaucagacaaacacauagaacaauacuuaaaaaaaauccaaaacucacuaucaacagaaugguccccauguuccgucacauguggcaacggcauacaaguaagaauaaaaccaggaucagcaaacaaaccaaaagacgaacuagauuacgaaaaugacauagaaaaaaaaauaugcaaaauggaaaaaugcucaucaguauucaacguaguaaauucaucgauaggccuaauaauggucuuaucauuccucuucuuaaacuaa

SEQ ID NO: 5462 - RNA, 1215 nt, Artificial Sequence
  derived and/or modified CDS sequence (opt6) from Pf(Gha1109-183)__BAM84829.1__CSP
augaugagaaaacuagcaauauuaucaguaucuucauuuuuauuuguagaggcacucuuccaagaauaccaaugcuacggaucaucaucaaacacuagaguauuaaacgaacuaaauuacgacaacgcaggaacaaaccuauauaacgaauuagaaaugaacuacuacggaaaacaagaaaauugguacucccucaaaaaaaacucaagaucacuuggagaaaacgacgacggcaacaacaauaacggagacaacggaagagaaggcaaagacgaagacaaaagagacggaaacaacgaagacaacgaaaaacuacgaaaaccaaaacacaaaaaacuaaaacaaccagcagauggaaacccagaucccaacgcaaacccaaacguagacccaaacgcaaacccaaacguagacccaaacgcaaacccaaacguagacccaaacgcaaauccaaacgcaaauccaaacgcaaacccaaacgcaaacccaaacgcaaacccaaaugcaaacccaaaugcaaaccccaacgcaaacccaaaugcaaauccaaacgcaaacccaaacgccaacccaaacgcuaacccuaacgcaaacccaaacguagacccaaacgccaauccaaacgcaaauccaaacgcaaacccaaacgcaaacccaaacgcaaaccccaacgcaaacccaaacgcaaacccaaacgcaaacccaaaugcaaauccaaacgcaaacccaaacgcaaacccaaaugcuaacccaaacgcaaacccaaacgcgaacccaaaugcaaacccaaacgcaaauccaaacgcaaauccaaacgcaaaccccaacgcaaacccaaacaaaaacaaccaaggaaacggacaaggacauaacaugccaaacgacccaaaccgcaacguagacgaaaacgcaaacgcaaacaacgccgucaaaaacaauaauaacgaagaaccauccgaucaacacauagaaaaauacuuaaaaacaauaaaaaacucucuaucaacagaauggucaccaugcucagucacaugcggaaacggaauacaaguaagaaucaaaccaggaucugccaacaaaccaaaagaucaacuagacuacgcaaacgacaucgaaaaaaaaauauguaaaauggaaaaaugcucaagcguauucaaugucguaaauagcucaauuggacuuaucaugguacucuccuuucuauuccucaacuaa

SEQ ID NO: 5463 - RNA, 1215 nt, Artificial Sequence
  derived and/or modified CDS sequence (opt6) from Pf(Pal97-107)__BAM84956.1__CSP
augaugagaaaacuagcaauacuaucaguaucuucauucuuauuuguagaagcauuauuucaagaauaucaauguuauggaagcuccucaaacacacgcguacuaaacgaacucaacuaugacaaugcaggaacaaaccuauacaacgaauuagaaaugaacuacuacggaaaacaagaaaauugguacucccuaaaaaaaaauucaagaucauuaggagaaaaugacgacggaaacaacaacaauggugacaacggaagagaaggaaaagacgaagacaaaagagacggaaacaacgaagacaacgaaaaacuacgaaaaccaaaacacaaaaaacuaaaacaaccaggagacggaaauccagaccccaacgccaacccaaacguagaccccaacgcaaacccaaacguugacccaaacgcaaaccccaacguagacccaaaugcaaacccaaacgcaaacccaaacgcaaacccaaacgcaaacccaaacgccaacccaaaugcaaacccaaacgcaaacccaaacgcaaacccaaacgcaaacccuaacgcaaacccaaacgcaaacccaaacgcaaacccaaacgcaaacccaaacguagacccaaaugcaaacccaaacgcaaaccccaaugcaaaucccaaugcaaacccaaacgcaaauccaaacgcaaauccaaacgcaaaucccaacgcaaacccaaacgcaaacccaaacgcaaacccaaacgcaaacccaaaugcaaauccaaacgccaacccaaaugcaaaccccaaugcaaacccaaaugccaacccaaacgcaaacccaaacgcaaauccaaacgcaaacccaaacaaaaacaaccaaggcaacggacaaggacauaacaugccuaacgacccaaaccgaaacguagacgaaaacgcaaacgcaaacaacgccguaaaaaauaacaacaaugaagaaccaucagacaaacauauaaaagaauaccuaaccaaaauaaaaaauucaauaucaaccgaauggucacccugcuccgucaccugcggaaacggaauacaaguaagaauaaaaccaggcucagcaaacaaaccaaaagacgaacuagauuacgaaaacgacauagaaaaaaaaauaugcaaaauggaaaaaugcucaucagucuucaauguaguaaacagcucaauaggauuaauaaugguacuaucauuccuauuccuuaacuaa

SEQ ID NO: 5464 - RNA, 1215 nt, Artificial Sequence
  derived and/or modified CDS sequence (opt6) from Pf(Tz98-103)__BAM84795.1__CSP
augaugagaaaacuagcaauauuauccguaucaagcuuucuauucguugaagcacuauuccaagaauaccaaugcuacggcagcucaucaaacaccagaguacuaaacgaacuaaacuaugacaacgcaggcaccaaucuauauaaugaacuagaaaugaauuauuacggaaaacaagaaaacugguacucacuaaaaaaaaacuccagaucacuaggagaaaacgacgacggcaacaacaacaauggggacaacggacgagaaggaaaagacgaagacaaaagggacggaaauaacgaagacaacgaaaaacuaagaaaaccaaaacauaaaaaacuaaaacaaccagcagacggaaacccagacccaaaugccaauccuaacguagauccaaaugcaaacccaaacguagacccuaacgcaaauccaaacguagacccaaacgcaaacccaaacgcaaauccaaacgcaaaccccaacgcaaacccaaacgcaaauccaaacgcaaacccaaaugcaaacccaaaugcaaauccaaacgcaaacccaaacgcaaacccaaacgcaaaccccaacgcaaaccccaacgcaaauccaaacgcaaacccaaauguagacccaaaugcaaacccaaaugcaaacccaaacgccaacccaaacgcaaacccaaacgcaaauccaaaugcaaacccaaacgcaaauccaaaugcaaaccccaaugcaaauccaaacgcuaauccaaacgcaaacccaaacgcaaacccaaacgccaacccaaacgcaaacccaaacgcaaauccaaaugcaaauccuaacgcaaacccaaaugcaaacccaaacaaaaacaaucaaggaaacggacaaggacacaacaugccaaacgacccaaacagaaacguagacgaaaacgcaaacgcaaacaacgcaguaaaaaacaacaacaacgaagaaccauccgacaaacacauaacagaauaccuaaaacgaauacaaaacucacuaucaaccgaauggucaccaugcucaguaacaugcggaaacgguauacaaguccgcauaaaaccaggaucagcaggaaaaucaaaaaacgaacuagacuacgaaaacgacauagaaaaaaaaauaugcaaaauggaaaaaugcagcucagucuuuaacguaguaaacagcucuaucggccuaauaaugguacuaucauuccuuuucuuaaacuaa

SEQ ID NO: 5465 - RNA, 1215 nt, Artificial Sequence
  derived and/or modified CDS sequence (opt6) from Pf(Yaounde)__AAN87588.1__CSP
augaugagaaaacuagcaauacuaucagucucauccuuccucuucguagaagcacuauuccaagaauaucaaugcuacggaucaucauccaacacccgaguacuaaacgaacuuaacuacgacaacgcagguacaaaucuauacaacgaacucgaaaugaacuacuacggaaaacaagaaaacugguacucauuaaaaaaaaacuccagaucauuaggagaaaacgacgacggaaacaacaacaauggagacaauggacgagaaggaaaagacgaagacaaaagagacggaaacaacgaagacaaugaaaaauuaagaaaaccaaaacacaaaaaacuaaaacaaccagcagacggaaacccagacccaaacgcaaacccaaacguagauccaaaugcaaacccaaacguggacccaaacgcaaaucccaauguagaccccaacgcaaacccaaacgcaaaucccaacgcaaacccaaacgcaaauccaaaugcaaauccaaaugcaaacccaaacgcaaacccaaacgcaaacccaaacgcaaauccaaacguagacccaaaugcaaacccaaaugcaaacccaaacgccaacccaaacgcaaacccaaaugcaaacccaaacgcaaacccaaacgcuaacccaaacgcaaacccaaacgcaaacccaaaugcaaacccaaacgcaaaccccaacgcaaaucccaaugcaaacccaaacgcaaacccaaacgcaaacccaaacgcaaacccaaacgccaaucccaaugccaauccaaacgcaaacccaaacgcaaacccaaacgcaaacccaaacgcaaacccuaaugcgaacccaaacaaaaacaaccaaggaaacggacaaggacacaacaugccaaacgaccccaacagaaacguagacgaaaacgcaaacgcaaacaaugcaguaaaaaacaacaauaacgaagaaccaucagaucaacauauagaaaaauacuuaaacaaaauaaaaaacucucuaagcacagaauggucaccaugcagcguaacaugcggaaacggaauccaaguaagaauaaaaccaggaucagcuaacaaaccaaaagaccaacuagacuacgcaaacgacauagaaaaaaaaauaugcaaaauggaaaaaugcagcuccgucuucaacguaguaaacucaucaauaggauuaauaaugguauuaucauucuuauuccuaaacuaa

SEQ ID NO: 5466 - RNA, 1209 nt, Artificial Sequence
  derived and/or modified CDS sequence (opt6) from Pf(CMC247)__ADF48384.1__CSP
augaggaaauuagcaauacuaucgguaucaagcuuccuauucguagaagcacuauuccaagaauaccaaugcuacggaagcucaucaaacacaagaguacuaaacgaauuaaauuacgacaacgcaggcacaaaucuauacaacgaacuagaaaugaacuacuacggaaaacaagaaaacugguacagucuaaaaaaaaauucacgaucacuaggagaaaacgaugacggaaauaacaacaacggagacaauggcagagaaggaaaagacgaagacaaacgcgacggaaacaacgaagacaacgaaaaacugcgcaaaccaaaacacaaaaaacuaaaacaaccaggggacggaaacccagacccaaacgcaaacccaaacguagaccccaacgcaaacccaaacguagaccccaacgcaaacccaaacguagacccaaacgcuaacccaaacgccaauccaaacgcaaaucccaacgcaaaccccaacgcaaacccaaacgcaaauccaaaugcaaacccaaacgcaaaucccaaugcaaauccaaacgcaaauccaaacgcaaacccaaacgccaacccaaaugcaaacccaaacgcaaacccaaacgcaaacccaaacgcaaacccaaacgcaaacccaaaugcaaauccaaacgcaaacccaaacgcaaacccaaacgcaaacccgaacgcaaacccaaacgcaaacccaaacgcaaacccaaacgcaaauccaaacgcaaauccaaacgcaaacccaaacgcaaacccaaacgcaaaucccaacgcaaauccaaacgcaaauccaaacgcaaacccaaacgcaaacccgaacaaaaacaaccaaggcaacggacaaggacauaacaugccaaacgaccccaacagaaauguugacgaaaacgccaacgcaaacaacgacgaaaacaacaacaacgaagaaccauccgacaaacacauagaacaauaccuaaaaaaaauacaauacagucuaucaacagaauggagcccgugcucaguaacaugcggaaacggaauccaaguaagaauuaaaccagguagcgcggacaaaccaaaagaucaacuagacuacgaaaacgauauagaaaaaaaaauaugcaaaauggaaaaaugcucaagcguuuuuaacguaguaaacucaagcauaggacuaauaaugguauuaaguuuccuauucuuaaacuaa

SEQ ID NO: 5467 - RNA, 1206 nt, Artificial Sequence
  derived and/or modified CDS sequence (opt6) from Pf(Gha1109-215)__BAM84833.1__CSP
augaugagaaaacuagcaauacuaagugucucaucauucuuauucguagaagcacuauuccaagaauaccaaugcuacgguucaucaucaaauacacgcguauuaaacgaacucaacuaugacaaugcaggaacuaaccuauacaaugaauuagaaaugaauuacuauggaaaacaagaaaacugguacucacucaaaaaaaacagcagaagcuuaggcgaaaacgacgauggaaacaacgaagacaacgaaaaauuacgaaaaccaaaacacaaaaaacuaaaacaaccagcagacggaaacccagauccaaacgcaaaucccaacguagauccaaacgcaaacccaaacguagauccaaacgcaaacccaaacguagacccaaacgcaaacccaaacgcaaacccaaacgcaaacccaaacgcuaacccaaacgcaaacccaaaugcaaacccaaacgcaaaucccaacgcaaacccaaacgccaacccaaacgcaaacccaaacgcaaacccaaaugcaaauccaaacgcgaacccaaacgcaaacccaaacgcaaauccaaacgcaaacccaaacgcaaacccaaacguagaccccaacgcaaacccaaacgcaaacccaaacgcaaacccaaacgcaaaccccaacgcaaacccaaacgcaaacccaaacgcaaaccccaacgcaaacccaaacgcaaaucccaacgcaaauccaaacgcaaacccaaacgcaaacccaaacgcaaacccaaaugcaaacccaaacgcgaacccaaacgcaaacccaaacgcaaacccaaacgcaaacccaaacgcaaacccaaacaaaaacaaccaaggaaacggacaaggacacaacaugccaaaugauccaaaccgcaacguagacgaaaacgcuaaagcaaauaacgcaguaaaaaacaauaacaaugaagaaccaucugacaaacacaucgaacaauacuuaaaaacaauacaaaacucucucucaacagaauggucacccugcucaguaacauguggaaacggcauacaagucagaaucaaaccaggauccgcaaacaaaccaaaagaucaacuugacuacgaaaacgacauagaaaaaaaaaucugcaaaauggaaaaaugcagcucagucuucaauguagucaacagcucaaucggacuuauaaugguacucucauuccuauucuuaaacuaa

SEQ ID NO: 5468 - RNA, 1203 nt, Artificial Sequence
  derived and/or modified CDS sequence (opt6) from Pf(Gha1109-199)__BAM84831.1__CSP
augaugagaaaauuagcaauacuaucaguaucaucauuccucuucguagaagcacucuuccaagaauaucaaugcuacggcaguucaucaaacacaagaguacuaaacgaauuaaacuacgacaacgcaggaacaaaccuauauaaugaacuagaaaugaauuacuacggaaaacaagaaaacugguacucauuaaaaaaaaacucacgaucauuaggcgaaaacgaugauggcaacaauaacaacggagacaacggaagagaaggaaaagacgaagacaaaagagacggaaacaacgaagacaacgaaaaacuaagaaaaccaaaacacaaaaaacuaaaacaacccgcagauggaaacccagacccaaacgcaaacccaaacguagacccaaacgcaaacccaaauguagacccaaacgcaaacccaaauguagacccaaacgccaauccuaacgccaacccaaaugcaaaccccaacgcaaauccaaacgcaaauccaaacgcaaauccaaaugcaaacccaaaugcaaacccaaaugcaaauccaaacgcaaauccaaacgcaaaccccaacgcaaacccuaacguagacccaaaugcaaacccaaacgcaaacccaaaugcgaacccaaacgcaaacccaaacgcgaacccaaacgcaaacccaaacgccaacccaaacgcuaaccccaacgcaaaucccaacgcaaacccaaacgcaaacccaaacgcaaacccaaacgcaaacccaaacgcaaaucccaacgcaaacccaaaugcaaacccaaacgcaaacccaaacgcaaaccccaaugcaaauccaaauaaaaacaaccaaggcaacggacaaggucacaauaugccaaacgaccccaacagaaacgucgacgaaaacgcaaacgcaaacagugcagucaaaaacaacaauaacgaagaacccucagauaaacacauaaaagaauacuuaaacaaaauacaaaauucauuauccacagaaugguccccaugcaguguaacauguggaaacggaauacaaguaagaauaaaaccaggaucagcaaacaaaccaaaagacgaauuagacuacgccaacgauauagaaaaaaaaauaugcaaaauggaaaaaugcuccucaguauucaauguaguaaacuccucaauagguuuaauaaugguacuaucauuccucuuccuuaacuaa

SEQ ID NO: 5469 - RNA, 1194 nt, Artificial Sequence
  derived and/or modified CDS sequence (opt6) from Pf(Asembo Bay)__AAN87582.1__CSP
augaugcgaaaacucgcaaucuuaucaguaucaucauucuuauuuguagaagcauuauuucaagaauaccaaugcuacgguucauccucuaacacaagaguacuaaaugaauuaaacuacgacaacgccggaacaaaccucuacaacgaauuagaaaugaacuacuauggcaaacaagaaaacugguacucacuaaaaaaaaacagcagaucacucggagaaaacgacgacggaaacaacgaagauaacgaaaaauuaagaaaaccaaaacauaaaaaauuaaaacaaccagcagacggaaacccagacccaaacgcaaacccaaacguugacccaaacgcgaacccaaacguagacccaaaugcaaacccgaacguagauccgaacgcaaacccaaacgcaaacccaaacgcaaacccaaacgcaaacccaaacgcaaaucccaacgcaaacccaaacgcaaacccaaacgcaaacccaaacgccaauccuaacgcaaacccaaacgcgaacccuaacgcaaacccuaacgcaaacccaaaugcgaauccaaacgcuaacccaaacgcaaaccccaacgcaaacccaaacguagacccaaacgcaaacccaaacgcaaacccaaaugcaaacccaaacgcaaacccaaacgcaaauccaaacgcaaacccaaacgcaaacccaaacgcaaacccaaacgcaaacccaaacgcaaauccaaacgcaaacccaaacgcaaacccaaacgcaaacccaaacgcaaacccaaacgcaaauccaaaugcaaauccaaacgcaaacccaaacgcaaacccaaacaaaaacaaccaaggaaacggacaaggccacaauaugccaaacgaccccaacagaaauguagacgaaaaugccaacgcuaauaacgcaguaaaaaacaacaauaaugaagaaccaucagaucaacacauagaaaaauacuuaaaaacgauacaaaacucccuauccacagaauggucaccaugcagcguaacaugcgguaauggaauacaaguacgcauaaaaccaggaucggcaaacaaaccaaaagaccaauuagacuacgcaaaugacauagaaaaaaaaaucugcaaaauggaaaaaugcucaucaguauucaacguaguaaacagcucaaucggacucaucaugguacuaucauuccucuuccuaaacuaa

SEQ ID NO: 5470 - RNA, 1194 nt, Artificial Sequence
  derived and/or modified CDS sequence (opt6) from Pf(Tz98-017)__BAM84782.1__CSP
augaugagaaaauuagcaauccuaagcguaagcucauuucuauucguagaagcacucuuccaagaauaucaaugcuacggaucauccucaaacacaagaguacucaaugaacuaaauuacgacaaugcaggaacaaaccuauacaacgaauuagaaaugaacuacuacggaaaacaagaaaacugguacuccuuaaaaaaaaacuccagaagccuaggcgaaaacgacgacggaaacaacgaagacaacgaaaaacuaagaaaaccaaaacacaaaaaacuaaaacaacccgcagacggaaacccagacccuaacgcaaacccaaacguagacccaaaugcaaacccaaacguagacccaaaugcaaacccaaacguagaccccaacgcaaaccccaacgcaaacccaaacgccaacccaaacgcaaacccaaacgcaaacccaaacgcaaacccaaacgcaaauccaaaugcaaacccaaacgcaaauccaaacgcgaacccaaacgcaaacccaaaugcaaacccaaaugcgaacccaaacgcaaacccaaacgccaacccaaacgcaaacccaaacgcaaacccaaacguagacccaaacgcaaacccaaacgcaaacccaaacgcaaacccaaacgcaaacccaaacgcaaaccccaacgcaaacccaaacgcaaacccaaacgcaaauccaaacgcaaacccgaacgccaacccgaaugcaaacccaaacgccaacccaaacgcaaacccaaacgcaaacccaaacgcaaacccaaacgcaaaccccaacgcaaacccaaacgcaaacccaaacaaaaacaaucaagggaacggacaaggacacaacaugcccaacgacccuaaccgaaacguagacgaaaacgccaaugcaaacaacgcaguaaaaaauaacaacaacgaagaacccucagauaaacacaucgaacaauaccuaaacaaaauaaaaaacucaaucucaacagaauggucaccaugcagcguaacauguggaaacggaauacaagugagaauaaaaccaggcucagcaaacaaaccaaaagacgaacugaacuaugaaaacgacauagaaaaaaaaaucugcaagauggaaaaaugcucaucaguauucaauguaguuaacucaucaauaggauuaauaaugguacuaucauucuuauuccuaaacuaa

SEQ ID NO: 5471 - RNA, 1194 nt, Artificial Sequence
  derived and/or modified CDS sequence (opt6) from Pf(Yaounde)__AAN87583.1__CSP
augaugagaaaacucgcaauacuaagcguaucaucauuccucuucguagaagcacuauuucaagaauaccaauguuacggaucaucaucaaacacaagagugcucaacgaacuaaacuacgacaacgccggaacaaaccuauacaacgaacucgaaaugaauuacuacggaaaacaagaaaacugguauucacuaaaaaaaaacagcagaucccuaggagaaaacgacgacggaaacaacgaagauaacgaaaaacuaagaaaaccaaaacacaaaaaacuaaaacaaccagcagauggaaauccagacccaaacgcaaacccaaacguagacccaaacgcaaaccccaacguagauccaaacgccaacccaaacgucgauccaaaugcaaacccaaacgcaaacccaaacgcaaacccaaacgcaaacccaaacgcaaacccaaaugcaaaccccaacgcaaacccaaaugcaaacccaaacgcaaacccaaacgcaaaucccaaugcaaacccaaaugcaaacccaaacgcaaacccaaacgccaacccaaacgcaaacccaaacgcaaauccaaacgcaaauccaaacguagacccaaacgcaaacccaaacgcaaacccaaacgcaaacccaaacgcaaauccaaacgcaaauccaaacgcaaauccaaacgcaaauccaaacgcaaacccaaacgcaaaccccaaugcgaacccaaacgcaaauccaaacgccaacccaaaugcaaacccgaaugcaaacccaaacgcaaacccaaacgcaaacccaaacgcuaacccaaacgcgaacccaaacaaaaacaaccaaggaaacggacaaggacacaacaugccaaacgaccccaauagaaauguagacgaaaacgcaaacgcaaacaacgcagucaaaaacaauaacaaugaagaaccaucagaccaacacauagaaaaauacuuaaaaagaauccagaacucacuaucuaccgaauggucaccauguaguguaacaugcggaaacggcauacaaguacgaauaaaacccgguucagcaaacaaaccaaaagaucaacuagauuacgcaaacgacauagaaaaaaaaauaugcaaaauggaaaaaugcaguucagucuucaacguaguaaauagcucaauaggacucauaaugguacuaucauuccuauuccuaaacuaa

SEQ ID NO: 5472 - RNA, 1191 nt, Artificial Sequence
  derived and/or modified CDS sequence (opt6) from Pf(Amazonas)__AAN87593.1__CSP
augaugagaaaauuagccauauuaucaguaucauccuuucuauucguagaagcacuauuucaagaauaccaaugcuacggcagcuccuccaacacacgcguacuaaacgaauuaaacuaugacaacgcaggcacaaaccuauacaaugaacuagaaaugaacuacuacggaaaacaagaaaacugguacagcuuaaaaaaaaacucccgaucacuaggagaaaacgacgacggaaacaacaacaacggagacaacgguagagaaggaaaagacgaagacaaaagagacggaaauaacgaagacaacgaaaaacuaagaaaaccaaaacacaaaaaacuaaaacaaccagcagacggaaacccagaccccaacgcaaacccaaacguagacccaaacgcaaacccgaacguagacccaaacgcaaacccaaacguagacccaaacgcaaacccaaacgcaaauccaaacgcaaauccaaaugcaaaccccaacgccaacccuaacgccaacccaaaugcaaaccccaacgcaaacccaaaugcaaacccaaacgccaacccaaaugcaaacccaaacgcaaaccccaacguagauccaaacgcaaacccaaacgcaaacccaaacgcaaauccaaacgcaaauccaaacgcaaacccaaacgcaaacccaaacgcaaaccccaaugcaaacccaaacgcaaacccaaacgccaacccaaacgcaaacccaaacgcaaacccaaacgcuaaccccaacgcaaacccaaaugccaacccaaacgcaaacccaaacgcaaacccaaacgcaaacccaaacaaaaacaaccaaggaaacggacaaggucacaacaugccaaacgauccaaacagaaacguagacgaaaacgccaacgcaaauaaugccgucaaaaacaacaacaacgaagaacccucugacaaacacauaacagaauaccucaaaagaauacaaaacucacuaucaacagaauggucaccaugcagcguaacaugcggaaacggcauacaaguacgaauuaaaccaggaucagcaggaaaaucaaaaaacgaacuagauuacgaaaaugacauagaaaaaaaaaucugcaaaauggaaaaaugcucaucaguauucaacguaguaaauucaucaauaggacuaauaaugguacucucauuccuauuucuaaacuaa

SEQ ID NO: 5473 - RNA, 1191 nt, Artificial Sequence
  derived and/or modified CDS sequence (opt6) from Pf(Amazonas)__AAN87594.1__CSP
augaugagaaaacucgcaauacucuccguuucaucauuccucuucguagaagcauuauuucaagaauaccaaugcuacggaucaucaagcaacacaagaguccuaaacgaauuaaacuacgauaacgcaggaacaaauuuauacaacgaauuagaaaugaacuacuacggaaaacaagaaaacugguacucacuaaaaaaaaacucaagaucacucggagaaaacgacgauggcaacaauaacaacggagacaacggcagggaaggaaaagacgaagacaaaagagacggaaauaaugaagauaacgaaaauuuaagaaaaccaaaacacaaaaaacuaaaacaaccagcggacggaaacccagaucccaaugccaacccaaacguagacccaaacgcaaacccaaacguagacccaaacgcaaaccccaacguagacccaaaugcaaacccaaacgcaaacccaaacgcaaacccaaacgcaaacccaaacgcaaauccaaacgcaaacccaaacgcaaacccaaacgcaaacccaaacgcaaacccaaaugcaaauccaaacgcaaacccaaacgcaaauccaaacguagauccaaacgcaaacccaaaugcaaacccaaacgcaaaccccaacgccaauccuaacgcaaacccaaacgcaaauccaaacgcaaacccaaacgcaaauccaaacgcaaacccaaaugccaaccccaacgcaaacccgaacgcaaacccaaaugcaaauccaaaugcaaacccaaacgcaaacccaaacgcaaacccuaacgcaaauccaaacgccaacccaaauaaaaacaaccaaggaaacggacaaggacacaacaugccaaacgacccaaacagaaacguagacgaaaacgccaacgcaaauaacgccguaaaaaacaauaauaaugaagaaccaucagacaaacacauaacagaauaccuaaaaagaauucaaaacucauuaucgacagaauggucaccaugcucagucaccuguggcaacggaauacaagucagaauaaaaccaggcuccgcaggcaaaucaaaaaacgaacucgacuacgaaaacgacauagaaaaaaaaauaugcaaaauggaaaaauguuccucaguauucaacguaguuaacucaucaaucggacuaauaaugguacuaucauuucuauuucuaaacuaa

SEQ ID NO: 5474 - RNA, 1191 nt, Artificial Sequence
  derived and/or modified CDS sequence (opt6) from Pf(Bolivar)__AAN87592.1__CSP
augaugagaaaacuagcaauacuaucaguaucaagcuuccuauuuguagaagcauuauuucaagaauaccaaugcuacggaucauccucaaacacuagaguccuaaacgaacuaaacuacgacaacgcaggaacuaaccuauacaacgaauuagaaaugaacuauuacggaaaacaagaaaacugguauagccuaaaaaaaaacucaagaucacuaggagaaaacgacgacggcaacaacaauaacggagacaacggacgagaaggaaaagaugaagacaaacgagacggcaacaacgaagacaacgaaaaauuaagaaaacccaaacauaagaaacuaaaacaaccagccgacggaaaccccgacccaaaugcaaacccuaacguagauccaaacgcaaacccaaacguugacccaaacgcaaacccaaacguagacccaaacgccaacccaaacgcaaacccaaacgcaaauccaaacgcaaacccaaacgcaaacccaaacgcaaacccgaaugcaaacccaaacgccaacccaaacgcaaacccaaacgcaaauccaaacgcaaacccaaacgcaaacccaaacguagacccaaaugcaaauccaaacgcaaaccccaacgcaaacccuaacgccaacccaaacgcaaauccaaacgcaaacccaaacgcuaacccaaacgcaaacccaaacgcaaauccgaacgcaaauccaaacgcaaacccaaaugcaaacccaaacgcaaacccaaacgcaaacccaaacgcaaacccaaaugcaaacccaaacgcaaacccaaacgcaaacccaaacaaaaacaaucaaggaaacggacaaggacauaacaugcccaacgacccaaacagaaacgucgaugaaaaugcaaacgccaacaacgcaguaaaaaacaacaacaacgaagaaccaucagacaaacacauaaccgaauaccuaaaaagaauacaaaacucacuaucaacagaaugguccccaugcagcgucacaugcggaaacggaauacaaguaagaauaaaaccaggauccgcaggaaaaucaaaaaaccaacuagacuaugaaaacgacauagaaaaaaaaauauguaaaauggaaaaaugcucaucaguauucaacguaguaaacagcucaaucggacuuauaaugguacucuccuuccuauuccuaaauuaa

SEQ ID NO: 5475 - RNA, 1182 nt, Artificial Sequence
  derived and/or modified CDS sequence (opt6) from Pf(30)__AGR53781.1__CSP
augaugagaaaacuagcaauacuaagcgucagcucauuccuauuuguagaagcacuauuccaagaauaccaauguuacggaucauccucaaacacaagaguccuaaacgaacuaaacuaugacaaugcuggaacaaaccuauacaacgaacucgaaaugaacuauuacggaaaacaagaaaacugguacucacucaaaaaaaauagcagaagccucggugaaaacgacgacggaaacaacgaagacaacgaaaaacuacgaaaaccaaaacauaaaaaacuaaaacaaccaggagaugguaacccagacccaaacgcaaacccaaacguagacccaaacgcaaacccaaacguagacccuaacgccaacccaaacguagacccaaacgcaaaccccaaugcaaacccaaaugcaaacccuaacgcaaacccaaacgcaaauccaaacgcaaacccuaaugcaaacccaaacgcaaacccaaacgcaaauccaaacgccaacccaaacgcaaacccaaacgcaaauccaaacgcaaacccaaacgcaaaccccaacgcaaaucccaacguagacccuaacgcaaacccaaacgccaacccaaaugcaaacccaaacgcaaauccaaacgcaaacccaaacgcaaaccccaacgcaaacccaaacgcaaacccaaacgcaaacccaaacgcaaauccaaacgcaaacccaaacgcaaaccccaacgcaaacccaaacgccaacccaaacgccaacccaaacgcaaacccaaacgcaaacccaaaugcaaacccaaacgcaaacccaaacaaaaacaaccaaggaaacgggcaaggacauaauaugccaaacgaccccaacagaaauguagacgaaaacgccaaugcaaacaacgcaguaaaaaacaacaacaacgaagaaccuucagacaagcacauaacagaauaccuaaaaaaaauccaaaacucacuauccacagaauggucacccuguaguguaacaugcggaaacggcauacaaguaagaauaaaaccaggcucagccggcaaaucuaaaaacgaacucgacuacgaaaaugacauagaaaaaaaaauaugcaaaauggaaaaaugcucuuccguuuuuaacguaguaaauuccucaaucggacuaauaaugguucuaucauuccuauuccuaaauuaa

SEQ ID NO: 5476 - RNA, 1182 nt, Artificial Sequence
  derived and/or modified CDS sequence (opt6) from Pf(Gha1108-087)__BAM84819.1__CSP
augaugcgaaaacucgcaauacuaucaguaucaucauuccuauuuguagaagcacucuuucaagaauaccaauguuacggauccagcucaaacaccagaguacuaaaugaauuaaauuacgacaacgcaggcacaaaccuauacaacgaacuagaaaugaacuacuacggaaaacaagaaaacugguacucacucaaaaaaaacagcagaucacuaggagaaaacgacgacggaaacaacgaagauaacgaaaaacuaagaaaaccaaaacauaaaaaauuaaaacaaccagcagacggaaacccagacccaaacgcaaaccccaacguagacccaaacgcaaacccaaacguagacccaaacgcaaacccaaacguagacccaaacgcaaacccaaacgcaaaccccaaugcaaacccaaacgcaaaucccaacgcaaacccaaacgcaaacccaaaugcaaacccaaaugccaacccaaacgcaaacccaaacgcuaacccaaacgcaaacccaaacgcaaauccaaaugcaaaccccaacgccaacccaaaugcaaacccaaacgcaaauccaaacguagaccccaacgcaaacccaaacgcaaacccaaaugcaaaccccaaugcaaacccaaacgcaaauccaaacgcaaacccaaacgcgaacccaaacgcaaauccaaaugccaauccaaacgcaaaccccaacgcaaacccaaacgccaaccccaacgcaaacccaaacgccaacccaaacgcaaacccaaacgcaaacccaaacgcaaacccaaacgcaaacccaaacaaaaauaaccaaggaaacggacaagggcauaacaugccuaaugacccaaacagaaacguagacgaaaacgcaaacgccaacaacgcaguaaaaaacaacaauaacgaagaaccaucagaccaacacauagaaaaauaucuaaaaagaauacaaaacucacucucaacagaauggucgccaugcuccguaacauguggaaacggcauccaaguacguaucaaaccaggaucagccaauaaaccaaaagaccaacuagacuacgcaaacgacauagaaaaaaaaauaugcaaaauggaaaaaugcagcucaguauucaauguagucaacucaucaauaggacucauaaugguauuaucauuccuauuucuaaauuaa

SEQ ID NO: 5477 - RNA, 1182 nt, Artificial Sequence
  derived and/or modified CDS sequence (opt6) from Pf(Gha1108-098)__BAM84821.1__CSP
augaugagaaaacucgcaauacucagcguaucaucauuucuauucguagaagcacucuuccaagaauaccaaugcuacggaucuagcuccaacacaagaguacuaaacgaauuaaacuaugacaacgccggaacaaaccucuacaaugaacucgaaaugaacuacuacggaaaacaagaaaacugguacucgcucaaaaaaaacagcaggucccuaggagaaaacgacgacggaaacaacgaagacaacgaaaaacuaagaaaacccaaacacaaaaaacuaaaacaaccaggggauggaaacccggacccuaacgcaaacccaaacguagacccaaacgcaaacccaaacguagacccaaacgcaaaccccaaugucgauccaaacgcaaacccaaacgcaaacccaaacgcaaacccaaacgcaaacccaaacgcaaacccaaacgcaaacccaaacgcaaauccaaacgcaaacccaaacgcaaacccaaaugcaaacccaaacgcaaacccaaacgcaaacccaaacgcaaacccaaaugcaaacccaaacgcaaacccaaacguagacccaaacgcaaacccaaacgccaacccaaaugcaaaccccaaugcaaacccaaaugcaaacccaaaugcaaacccaaacgcaaacccaaacgcaaauccaaacgcaaacccaaacgcaaacccaaacgcaaaccccaaugcaaauccaaaugcaaacccaaacgcaaacccaaaugcaaacccaaacgcaaaccccaacgcaaacccaaacgccaacccaaaugcaaacccaaacaaaaacaaccaaggaaacggucaaggacauaacaugccaaacgaaccaaaccgaaacgucgacgaaaacgccaacgcaaacaacgcagucaaaaacaacaacaacgaagaacccucagacaaacauauagaacaauauuuaaacaaaauucaaaacucacuaucaaccgaauggucacccugcagcgucacaugcggcaacggcauacaaguaagaauaaaaccaggaucagccaacaaacccaaagaucaacuagauuacgcaaacgacaucgaaaaaaaaauaugcaaaauggaaaaaugcagcuccguauucaacguaguaaauucauccauaggacuaauaaugguacucucuuucuuauucuuaaacuaa

SEQ ID NO: 5478 - RNA, 1182 nt, Artificial Sequence
  derived and/or modified CDS sequence (opt6) from Pf(Gha1108-101)__BAM84808.1__CSP
augaugagaaaacuagcaauauuaucaguaucaucauuccuauucguagaagcauuauuccaagaauaccaaugcuacggaucaucaucaaacacaagaguccuaaacgaacucaacuaugacaaugcuggaaccaacuuauacaacgaacuugaaaugaacuacuauggaaaacaagaaaacugguacucacuuaaaaaaaauucacgaucacuuggagaaaaugacgacggaaacaacgaagacaacgaaaaacuaagaaaaccaaaacauaaaaaacuaaaacaaccagcagacggaaacccagauccgaacgcaaacccaaauguagacccaaacgcaaacccaaacguagacccaaaugcaaacccaaacguagauccaaacgcaaacccaaacgcaaacccaaacgcaaacccgaacgcaaacccaaacgcaaauccaaacgcaaacccaaacgcaaauccuaacgccaacccaaacgcaaacccaaacgcaaacccaaacgcaaacccaaacgcaaacccaaacgcaaacccaaacgcaaacccaaacgcgaauccaaauguugacccaaacgcaaauccaaacgcaaacccaaacgcaaacccaaacgccaaccccaaugcaaacccaaacgcaaacccaaacgcaaauccaaaugcaaacccaaacgcaaacccaaacgccaacccaaacgcaaacccaaacgcaaacccaaacgcaaaccccaacgcaaacccaaacgcaaacccaaacgcaaauccaaacgcaaacccaaaugcaaacccaaacgcaaacccaaacaaaaacaaccaaggaaacggccaaggacacaacaugccaaacgacccaaacagaaacguagacgaaaacgcaaacgccaauaacgcaguaaaaaacaacaacaacgaagaaccaucagaccaacacaucgaaaaauacuuaaacaaaauaaaaaacucacuaucaacagaaugguccccaugcucaguaacaugcggaaacggcauacaaguacgaauaaaaccaggcucagcaaacaaacccaaagaccaacuagacuaugcaaaugacauagaaaaaaaaauuugcaaaauggaaaaaugcucaucagucuucaacguaguaaacagcucaaucggacucaucaugguacucucauuccucuuucucaacuaa

SEQ ID NO: 5479 - RNA, 1182 nt, Artificial Sequence
  derived and/or modified CDS sequence (opt6) from Pf(Gha1108-148)__BAM84814.1__CSP
augaugagaaaacuagcaaucuuaucaguaucauccuuccucuucguagaagcacuauuccaagaauaccaaugcuacgguucauccucaaacacaagaguacuuaacgaacuaaacuacgacaacgcaggaacuaaccuuuacaacgaacuagaaaugaacuacuacggaaaacaagaaaauugguauucacuuaaaaaaaacaguagaucucuaggcgaaaacgacgacggaaacaacgaagacaaugaaaaacuuagaaaaccaaaacacaaaaaauuaaaacaaccaggagacggaaacccagacccaaacgcuaacccaaacgucgaucccaacgcaaacccaaauguagaccccaaugcaaacccaaacguagacccaaacgcaaacccaaacgcaaacccaaacgcaaacccaaacgcaaacccaaacgccaacccaaacgcaaauccaaaugcaaacccaaacgccaacccaaaugcaaacccaaacgcaaacccaaacgcaaacccaaacgcaaauccaaaugcaaacccaaacgcaaacccaaacgcaaacccaaacguagacccaaacgcaaacccaaacgcaaacccaaacgcaaaccccaacgcaaacccaaacgcgaauccaaacgcaaacccaaacgccaacccaaaugcaaacccaaaugcaaauccaaacgcaaauccaaacgccaacccaaacgcaaacccaaacgcuaacccaaacgcaaauccuaacgcaaacccaaaugcaaacccaaacgcaaacccaaacgcaaacccaaacgccaauccaaacaaaaacaaccaaggaaauggacaaggacacaacaugccaaacgacccaaacagaaacgucgacgaaaaugcaaacgcaaacagcgccguaaaaaacaacaacaacgaagaaccaucagacaaacacauaaaagaguacuuaaacaaaauccaaaacucacuaucaacagaauggucacccugcucuguaaccugcggcaacggaauucaaguacgaauaaaaccaggaucagccaacaaaccaaaagaugaacuagacuaugcaaaugacaucgaaaaaaaaauaugcaaaauggaaaaaugcagcucaguuuuuaacguaguaaauagcuccaucggacuaauaaugguacucucauucuuauuccuaaacuaa

SEQ ID NO: 5480 - RNA, 1182 nt, Artificial Sequence
  derived and/or modified CDS sequence (opt6) from Pf(Gha1109-097)__BAM84838.1__CSP
augaugagaaaauuagcaauacuaagcgucagcucauuccuauucguagaagcauuauuccaagaauaccaaugcuacggaucaucaucaaacacacgaguacucaacgaacuaaacuacgacaacgcaggaacaaaucucuacaaugaacucgaaaugaacuacuacggaaaacaagaaaacugguacucacucaaaaaaaacucaagaucacuaggcgaaaacgacgacggaaacaacgaagacaacgaaaaauuaagaaaaccuaaacacaaaaaauuaaaacaaccagcagauggaaacccagacccaaacgcaaauccaaacgucgacccaaacgcaaacccaaacguagacccaaaugcaaacccaaacguagaccccaacgcaaacccgaaugcaaacccaaaugcaaacccaaaugccaacccaaacgcaaacccaaacgcaaacccaaacgcaaacccaaacgcaaauccaaaugcaaacccaaacgcaaacccuaacgcaaaccccaacgcaaauccuaaugcaaaccccaacgcaaacccaaacgcaaacccgaauguagacccaaacgcaaacccaaacgcaaacccaaaugcaaaccccaacgcaaacccaaacgccaacccaaacgccaacccaaacgcaaacccaaacgcaaacccaaacgcuaacccaaacgcaaacccaaacgcaaacccaaaugcaaacccaaacgccaacccaaaugcaaacccaaacgcaaacccaaacgcaaauccaaacgcaaacccaaacgcaaacccaaacgcaaacccaaacaaaaacaaucaaggaaauggacaaggccauaacaugccaaacgaccccaaccguaauguagacgaaaacgcuaaagcuaacaacgcaguaaaaaacaacaacaacgaagaaccaucugacaagcacaucgaacaauacuuaaaaacaauacaaaacucccuaucaacagaauggucaccuugcagcguaacaugcggcaacggcauacaaguacgaauaaaaccaggaucagcaaauaaaccaaaagaccaauuagacuacgaaaacgacauagaaaaaaaaauaugcaaaauggaaaaaugcagcucagucuucaauguaguuaauuccucaauaggauuaauaaugguauuaucauuccuauuccuaaacuaa

SEQ ID NO: 5481 - RNA, 1182 nt, Artificial Sequence
  derived and/or modified CDS sequence (opt6) from Pf(Gha1110-021)__BAM84839.1__CSP
augaugcgaaaacuagcaauacuaagcguaagcuccuuccuauucguagaagcacuauuccaagaauaucaaugcuacggaucaagcucgaacacaagaguacucaaugaauuaaacuacgacaacgcaggaacaaaucuauacaacgaacuagaaaugaacuacuauggaaaacaagaaaacugguacucacuuaaaaaaaauucaagaagccuaggcgaaaaugacgacggaaacaacgaagacaacgaaaaacuaagaaaaccaaaacacaaaaaacuaaaacaaccagcagauggaaacccagaccccaaugcaaacccaaacguggacccaaaugcaaacccaaacguagacccaaaugcuaacccaaacguagauccaaacgcaaacccaaacgcaaacccaaacgcaaacccaaaugcaaacccaaacgcaaacccuaacgcaaacccaaacgcaaacccaaaugcaaaccccaacgcaaaccccaacgccaacccaaacgcaaacccaaacgcaaaccccaacgcaaacccaaacgccaacccaaacgcaaacccaaacguagacccaaaugcaaacccaaacgcaaacccaaacgcaaacccaaacgcaaacccaaacgcaaacccaaacgcaaaccccaacgcaaaccccaaugcaaacccaaacgcaaacccaaaugcuaacccaaacgcaaaccccaacgcaaacccaaaugcaaacccaaacgcaaacccaaacgcaaauccaaacgcaaacccaaaugcaaacccaaacgcaaacccaaacgccaacccgaacaagaacaaccaaggaaacggacaaggacacaacaugccaaaugacccaaaccgaaacguagacgaaaacgccaaugcaaauaacgcaguaaaaaacaacaacaacgaagaaccaucagacaaacacauagaacaauaccuaaaaacaauuaaaaacucacucucaacagaauggucaccaugcagcguaacauguggaaauggaauacaaguaagaauaaaaccaggaucagccaacaaaccaaaagacgaauuaaacuacgaaaacgacauagaaaaaaaaauaugcaaaauggaaaaaugcucaucaguuuuuaauguagucaacagcucaauaggacuaauaaugguacucucauucuuauucuuaaacuaa

SEQ ID NO: 5482 - RNA, 1182 nt, Artificial Sequence
  derived and/or modified CDS sequence (opt6) from Pf(Tz03-068)__BAM84802.1__CSP
augaugagaaaacuagcaauacuaucuguaucuucauucuuauucguagaagcacucuuccaagaauaccaaugcuacggaucaucaucaaacacacgcguacucaacgaacuaaacuacgacaacgcaggcacuaaccucuacaacgaacuagaaaugaacuacuacggcaaacaagaaaacugguacucccuaaaaaaaaacucaagaagcuugggagaaaacgacgacggaaacaacgaagauaaugaaaaacuacgaaaacccaaacauaaaaaacuaaaacaacccgcagaugguaaucccgacccaaacgcaaauccaaacguagauccaaacgccaacccaaacguagauccaaacgcaaaccccaacguagacccaaacgcaaaccccaacgcaaacccaaacgcaaacccaaacgcaaacccaaacgcaaauccaaacgccaaccccaacgcaaacccuaacgcaaauccaaacgcaaaccccaaugcaaacccaaacgcaaaccccaacgcaaacccuaacgcaaacccaaacgcgaacccaaacgcaaaccccaacguagaccccaacgcaaacccuaacgcaaacccaaacgcaaacccaaacgcaaacccaaacgcaaacccaaacgcaaacccaaacgcaaacccaaacgcaaauccaaaugcaaauccaaaugccaacccaaacgcaaacccgaacgcaaacccaaacgcaaacccaaacgcaaacccaaacgcaaacccuaaugcaaacccaaacgcaaacccaaaugccaaccccaacgccaauccaaacaaaaacaaccaaggaaacggacaaggacacaauaugccaaacgacccaaacagaaacguagacgaaaacgcaaacgccaacaacgcaguaaaaaacaauaacaacgaagaaccaucagaccaacacauagaaaaauacuuaaaaaucauccaaaacucacuaucaacagaauggucuccauguucaguaacaugcggaaacggaauacaaguaagaauaaaaccaggcucagcaaacaaaccaaaagaccaacuagacuacgcaaacgacauagaaaaaaaaauauguaaaauggaaaaaugcaguuccguuuucaacguagucaacuccucaauaggacuaauaaugguauuaucauuucuauucuuaaacuaa

SEQ ID NO: 5483 - RNA, 1182 nt, Artificial Sequence
  derived and/or modified CDS sequence (opt6) from Pf(Tz03-070)__BAM84803.1__CSP
augaugagaaaacucgcaauacuauccguaagcucauucuuauucguagaagcacuauuccaagaauaccaaugcuauggaucgucuucaaacacacgaguacucaacgaauuaaacuaugacaacgccggaacaaauuuauacaacgaauuagaaaugaacuacuacggcaaacaagagaacugguacucacucaaaaaaaacucaagaucauuaggcgaaaacgacgacggaaacaacgaagacaacgaaaaacucagaaaaccuaaacauaaaaaauuaaaacaaccagcagacggaaacccagacccaaacgcaaaccccaacguagacccaaacgcaaacccaaacguagacccaaaugcaaauccgaacgucgacccaaacgcuaauccgaaugcaaacccaaacgcaaauccaaacgcaaaccccaacgcaaacccaaacgcaaacccaaacgcaaacccaaacgcaaacccaaacgcuaauccaaacgcaaacccaaaugcaaacccaaacgcaaacccaaacgcaaacccaaacgcaaacccaaacgcaaacccaaacgcgaacccaaacguagaccccaacgcaaacccaaacgcaaauccaaacgcaaacccaaacgccaacccaaacgcaaacccaaacgcaaacccaaacgcaaacccaaacgcaaauccaaacgcaaauccaaacgcaaacccuaacgcaaacccaaacgcaaacccaaacgcaaacccaaacgccaacccaaaugcaaacccaaaugcaaacccaaacgccaaccccaacgcaaauccaaacaaaaacaaccaaggcaacggacaaggucacaacaugccaaacgaccccaaucgaaacguagacgaaaacgcaaaugcaaacaacgcaguaaaaaacaauaacaaugaagaaccauccgaccaacacauagaaaaauaccuacaaaaaauacaaaacucccucucaacagaauggucaccaugcucaguaacaugcggcaauggcauccaaguaagaauaaaaccaggcucagcaaacaaaccaaaagaccaacuaaacuacgaaaacgacauagaaaaaaaaauuugcaaaauggaaaaaugcagcucaguauucaacguagucaacagcucaaucggacuaauaaugguccuaucauucuuauuccuaaacuaa

SEQ ID NO: 5484 - RNA, 1182 nt, Artificial Sequence
  derived and/or modified CDS sequence (opt6) from Pf(Yaounde)__AAN87579.1__CSP
augaugagaaaacuagcaauacuaucaguaucaucauucuuauucguagaagcacucuuccaagaauaccaaugcuacggaucaagcucaaacacaagaguacuaaacgaauuaaacuacgacaacgcugggacaaacuuauauaacgaauuagaaaugaacuacuacggcaaacaagaaaacugguacucacuuaaaaaaaacagcaggagcuuaggagaaaacgacgacggaaacaacgaagauaacgaaaaauuacgcaaaccaaaacacaaaaaauuaaaacaaccaggagacggaaacccagacccaaacgcaaacccaaacguggacccaaacgccaacccaaacguagacccaaacgcaaacccaaacgucgaccccaaugcaaacccaaacgcaaacccaaacgcaaauccaaacgcaaacccgaacgcaaacccaaacgccaacccaaacgcaaacccaaacgcaaacccaaacgcaaacccaaacgcaaacccaaaugcaaauccaaacgcaaaccccaacgcaaacccaaacgcaaauccaaacgcaaacccaaacguagacccaaacgcaaauccaaacgcaaacccaaacgcaaacccgaacgcaaacccaaacgcaaacccaaaugcaaacccaaacgcaaacccaaacgcaaacccaaacgcaaaccccaacgcaaacccaaacgcaaacccaaacgcaaauccaaacgcaaauccaaaugcaaauccaaacgcaaacccaaacgcaaacccaaaugcaaacccaaacgcaaacccaaaugcaaacccaaauaaaaacaaucaaggaaacggacaaggccauaauaugcccaacgaucccaacagaaacguagacaaaaaugcaaacgcaaacaacgcaguaaaaaacaacaacaacgaagaaccaucagacaaacauauagaagaauaucugaaaaaaaucaaaaacucaauaucgaccgaauggucacccugcaguguaacaugcggaaacggaauacaaguaagaauaaaaccagguucagcuaacaaaccuaaagacgaauuagacuacgaaaacgauauagaaaaaaaaauaugcaaaauggaaaaaugcagcucaguauucaacguaguaaacagcucaauaggacuaauaaugguauuaucauucuuauucuuaaacuaa

SEQ ID NO: 5485 - RNA, 1182 nt, Artificial Sequence
  derived and/or modified CDS sequence (opt6) from Pf(Yaounde)__AAN87578.1__CSP
augaugagaaaacuagccauacuaagcguaucaucauuccuauucguagaagcacucuuccaagaauaccaaugcuacggcucaagcucaaauacacgaguacucaaugaauuaaacuacgauaacgcaggaacaaaccuauacaacgaauuagaaaugaacuacuacgguaaacaagaaaacugguacucauuaaaaaaaaauucaagaucacuaggagaaaaugaugaugggaauaacgaagacaacgaaaaauuacgaaaaccuaaacacaaaaaacuaaaacaaccaggggacggaaacccagacccaaacgcaaacccaaacguagacccaaacgcaaauccaaacgucgacccaaacgcaaacccaaacgucgacccaaacgcaaacccaaaugccaacccaaacgcaaacccaaacgcaaacccaaacgccaauccaaaugcaaacccaaacgcaaacccaaacgcaaacccaaacgcaaacccuaacgcaaacccaaacgcaaacccaaacgcaaaccccaacgcaaacccaaaugcaaacccaaacgcaaacccaaauguagacccaaacgcaaacccaaacgcaaacccaaacgcaaauccaaacgccaacccaaacgccaacccaaaugcaaacccaaacgcaaacccaaacgccaacccaaacgcaaacccaaacgcaaacccaaacgccaacccaaacgcaaacccaaaugcaaacccaaacgccaauccaaacgcgaacccaaacgcaaaccccaacgccaacccaaaugcaaacccaaacgcuaacccaaacaaaaacaaccaaggaaacggacaaggacauaacaugcccaacgacccaaacagaaacguaaaugaaaacgcaaaugccaauaaugcagucaaaaacaacaacaaugaagaaccaucagacaaacacauagaaaaauacuuaaaagaaauccaaaacucacuauccacagaauggucaccaugcucaguaaccuguggaaacggaauacaaguaagaauaaaaccaggaucagcaggaaaaccaaaaaacgaauuagacuacgaaaacgacauagaaaaaaaaaucugcaaaauggaaaaauguuccucugucuucaacguagucaacucauccauaggacuaauaaugguacuaucauuucuauuccucaacuaa

SEQ ID NO: 5486 - RNA, 1179 nt, Artificial Sequence
  derived and/or modified CDS sequence (opt6) from Pf(Asembo Bay)__AAN87607.1__CSP
augaugagaaaacuagcaauacuaucaguaucaagcuucuuauucgucgaagcacuauuccaagaauaccaauguuacggaucauccucaaauacaagaguacuaaacgaacuaaauuacgauaaugcaggaaccaacuuauacaaugaauuagaaaugaacuacuacggaaaacaagaaaacugguacucccuaaaaaaaaacucacgaucccuaggagaaaacgaugacggaaacaacaacaacggcgacaacggccgagaagggaaagaugaagacaaacgagacggaaacaacgaagacaacgaaaaacuaagaaaaccaaaacacaaaaaacuaaaacaaccagcagacggaaauccagacccaaaugcaaacccaaacguagacccaaacgcaaacccaaauguagauccaaacgcaaacccaaacgcaaaccccaacgcaaacccaaacgcaaaccccaacgccaauccaaaugcaaacccaaacgcaaacccaaacgcaaacccaaacgccaauccaaacgcaaauccaaacgcaaacccaaacgcaaacccaaacguagacccaaacgcuaacccaaacgcaaauccaaacgcaaacccaaacgcuaacccaaaugcaaacccaaacgcaaacccaaacgcaaacccaaacgcaaacccaaaugcaaacccaaacgcaaacccaaacgcaaauccaaacgccaacccaaacgcaaacccaaacgcaaacccaaacgcaaacccaaacgcaaauccaaacgcaaacccaaacgcaaauccaaacgcaaacccaaacaaaaacaaccaaggaaacggacaaggacacaacaugccaaaugacccaaauagaaacguagacgaaaacgcaaacgcaaacaacgcaguaaaaaacaacaacaacgaagaacccuccgacaaacacauagaacaauacuuaaacaaaauaaaaaacucaauauccaccgaauggucuccauguuccguaacaugcggaaacggaauacaaguaagaaucaaaccaggcucugcaaacaaacccaaagaccaauuagacuacgaaaacgauauagaaaaaaaaauauguaaaauggaaaaaugcucaucaguuuucaauguagucaacucauccaucggccuaauaaugguacuauccuuccuauuccuaaacuaa

SEQ ID NO: 5487 - RNA, 1179 nt, Artificial Sequence
  derived and/or modified CDS sequence (opt6) from Pf(Asembo Bay)__AAN87608.1__CSP
augaugcgaaaacuagcaauccuauccguaucaaguuuccucuucguagaagcacuauuucaggaauaccaaugcuacggaaguuccuccaacacaagaguauuaaacgaacuaaacuacgacaacgcaggcacaaaucuauacaacgaauuagaaaugaacuacuacggaaaacaagaaaacugguacucacuaaaaaaaaacucaagaucacuaggcgaaaacgacgacggaaacaacaauaacggagauaauggaagagaaggaaaagacgaagacaaaagagauggaaacaacgaagacaacgaaaaacucagaaaaccaaaacauaaaaaacuaaaacaacccgcagacggcaacccagacccaaacgcaaauccaaacguagauccaaaugcaaauccaaacguagacccaaacgcaaacccaaacguagaucccaacgcaaauccaaaugcaaacccaaacgcaaacccaaacgcaaacccaaacgcaaauccaaacgcaaacccaaacgcaaacccaaacgcaaacccaaaugcaaacccaaacgcaaacccaaacguagacccaaacgcuaacccuaacgcaaacccaaacgcaaacccaaacgcaaaccccaaugcaaacccaaacgcaaacccaaacgcaaauccaaacgcaaacccaaacgcaaacccaaacgccaacccaaaugcaaaccccaacgccaauccaaacgcaaacccaaacgcaaauccaaaugcuaacccaaacgcaaacccaaacgcaaacccaaacgcaaauccaaacgcaaacccaaacaaaaacaaccaaggaaacggacaaggacacaacaugcccaacgaccccaacagaaacgucgacgaaaacgcaaacgcaaacaacgcaguuaaaaacaacaacaacgaagaacccagcgacaaacacauagaacaauaccuuaaaauaauaaaaaacucacuaucaacagaauggucacccugcucaguaacuugcggaaacggaauacaaguaagaauaaaacccgguucagcaaacaaacccaaagaugaauuagacuacgccaacgacauagaaaaaaaaauuugcaagauggaaaaauguucaucagucuucaauguaguaaacucauccaucggacuaaucaugguauuaucauuucuauuucuaaacuaa

SEQ ID NO: 5488 - RNA, 1179 nt, Artificial Sequence
  derived and/or modified CDS sequence (opt6) from Pf(Asembo Bay)__AAN87595.1__CSP
augaugagaaaacuagcaauacuaucagucucaagcuucuuauucguagaagcccuauuccaagaauaccaaugcuacggcaguucauccaacaccagaguauuaaaugaacuaaauuacgacaacgcaggaacaaaccuauacaacgaauuagaaaugaacuacuacggaaaacaagaaaacugguauucacucaaaaaaaauucaagaagccuaggcgaaaacgacgacggcaauaacaacaacggagacaacggcagagaaggaaaagacgaagauaaaagagacggaaauaaugaagacaacgaaaaacuaagaaaaccaaaacacaaaaaacucaaacaaccagcagacggaaaccccgacccaaacgcaaacccaaacguagacccaaacgcaaauccaaacguagacccaaaugcaaacccaaacguagacccaaacgcaaacccuaacgcaaaccccaacgcaaacccaaacgcaaacccaaacgcaaaccccaaugcaaacccaaacgcaaacccaaacgcaaacccaaacgcaaauccaaacgcaaaccccaacguagacccaaacgcaaacccaaaugcaaacccaaaugcaaacccaaaugcaaauccaaaugcaaacccaaacgcaaacccaaacgcaaaucccaacgccaacccaaacgcaaacccaaacgcaaacccaaacgcaaacccaaacgccaacccaaacgcaaaccccaacgcaaauccaaacgcaaaucccaaugcaaacccaaacgcaaauccaaaugcaaacccaaaugcaaacccaaacaaaaauaaccaaggaaauggacaaggacacaacaugccaaacgacccuaacagaaacguugacgaaaaugcaaacgccaacaacgcaguaaaaaacaacaacaacgaagaaccuucagauaaacacauaacagaauaccucaaaagaauacaaaacucacuaagcacugaauggucaccuugcagcguaaccugcggaaacggaauacaagucagaauaaaaccaggaucagcaggaaaaucaaaaaacgaacuagacuacgaaaacgacauagaaaaaaaaauaugcaaaauggaaaaaugcucaucaguauucaacguagucaacucaucaaucggauuaauaaugguauuauccuuccuauuccuaaacuaa

SEQ ID NO: 5489 - RNA, 1179 nt, Artificial Sequence
  derived and/or modified CDS sequence (opt6) from Pf(India)__AAN87618.1__CSP
augaugcgaaaauuagccauauuaucaguauccagcuuccuauuuguagaagcccuauuccaagaauaccaaugcuacggaagcucaucuaacacaagaguacucaacgaacuaaacuacgacaacgcaggaacaaaccuauacaacgaauuagaaaugaacuacuacggaaaacaagaaaacugguacucacuaaaaaaaaacucaagaucacuuggagaaaacgacgacggaaacaauaacaacggagacaacggcagagaaggaaaagacgaagacaaacgagacggaaacaacgaagacaacgaaaaacuaagaaaaccaaaacacaaaaaacuaaaacaaccaggaggcgacaacccagacccaaacgcaaauccaaacguagacccaaacgcaaacccaaacgcaaacccaaacgcaaauccaaacgcaaacccaaacgcaaacccaaaugcaaacccaaacgcaaacccaaaugccaaccccaacgcaaacccaaaugccaauccaaacgcaaacccaaacgcaaauccaaacgcuaacccaaaugcaaacccaaacgcaaacccaaaugcaaacccaaacgcaaacccaaaugcaaaccccaacgcaaacccaaacgcaaacccaaacgcaaacccaaaugcaaacccaaacgccaaucccaacgcaaacccaaacgcaaacccaaacgcaaacccaaacgcuaacccaaacgcaaacccaaacgcaaacccaaaugccaaccccaacgcuaauccaaacgcaaacccaaacgcaaacccaaacgcaaauccaaacaaaaauaaccaaggaaacggacaaggacacaacaugccaaacgacccaaaccgaaacguagacgaaaaugccaaugcaaacaacgcaguaaaaaacaauaacaacgaagaacccucagacaaacacauagaacaguacuuaaaaaaaauacaaaacucacuaucaacagaauggucaccaugcucaguaaccugcggcaacggcauacaaguaagaauaaaacccggaucagcaaacaaaccaaaagaugaacuagauuacgaaaacgauauagaaaaaaaaauauguaaaauggaaaaaugcucaucagucuucaacguaguaaacagcucaauaggacuuauaaugguacuaucauuccuauucuuaaacuaa

SEQ ID NO: 5490 - RNA, 1170 nt, Artificial Sequence
  derived and/or modified CDS sequence (opt6) from Pf(Asembo Bay)__AAN87585.1__CSP
augaugagaaaacuagccauccuaucagucucaucauuccuauucguagaagcacucuuucaagaauaccaaugcuacggaucaaguucaaacacaagaguauuaaacgaacuaaacuacgacaacgcaggaacaaaccuauacaacgaacuagaaaugaacuacuacggaaaacaagaaaacugguacucccucaaaaaaaacuccagaaguuuaggagaaaacgacgaugguaacaacgaagacaacgaaaaacuaagaaaaccaaaacacaaaaaacuaaaacaaccagcagacggaaacccagacccaaaugcaaacccaaacguagacccuaacgccaacccaaacguagacccuaacgcaaacccaaauguagaccccaacgcaaacccaaacgcaaacccaaaugccaacccaaaugcaaauccuaacgcaaacccaaaugcaaacccaaaugcaaauccaaacgcaaacccaaaugcaaauccaaacgcuaacccaaacgccaacccaaacgcaaacccaaaugcaaauccgaacgcaaaccccaacgcaaacccaaauguagauccaaacgcuaacccaaacgcaaacccaaacgcaaaccccaaugcaaaccccaacgcaaacccaaacgccaacccaaacgcaaacccaaacgcuaacccaaacgcaaaccccaacgcaaaucccaacgcaaauccaaaugcaaauccaaacgcaaaccccaacgcaaacccaaacgccaacccaaaugcaaacccaaacgcgaacccaaacgcaaauccaaacaaaaacaaucaaggaaacggacaaggacacaacaugccaaacgacccaaacagaaacguagacgaaaacgcaaacgcaaacaacgcaguaaaaaacaacaacaacgaagaacccuccgaccaacacaucgaaaaauaucuaaaaacaauccaaaacucacuaucaacagaauggucccccugcagcguaacaugcggcaacggcauacaaguacgaauaaaaccaggaucagcaaacaaaccaaaagaccaauuagauuacgcaaacgacaucgaaaaaaaaauauguaaaauggaaaaaugcucuucagucuucaacguugucaauucaucaauaggauuaaucaugguccuauccuuccuauuccuaaacuaa

SEQ ID NO: 5491 - RNA, 1170 nt, Artificial Sequence
  derived and/or modified CDS sequence (opt6) from Pf(Asembo Bay)__AAN87577.1__CSP
augaugagaaaacucgcaauauuaucaguaucaucauuccuauuuguagaagcacuauuccaagaauaccaaugcuauggaucaagcucaaacacaagaguacuaaacgaauuaaacuacgacaacgcaggaacaaaccucuacaacgaacucgaaaugaauuacuacggaaaacaagaaaacugguauucacuaaaaaaaaacucaagaagccuaggagaaaacgacgacggaaacaacgaagacaacgaaaaacuaagaaaaccaaaacacaaaaaacuaaaacaaccaggagacggaaacccagacccaaacgccaacccaaauguagacccaaacgcaaacccaaacguagauccaaacgcaaacccaaacguagauccaaaugcaaacccaaacgcaaacccaaacgcaaaccccaacgcaaacccaaacgcaaauccaaacgcaaacccaaacgcaaacccaaacgcaaacccaaacgcaaacccaaacgcaaacccaaacgcaaacccaaacgcaaauccaaacgcaaauccaaaugcaaacccaaacguagacccaaacgcaaacccaaacgcaaacccaaacgcaaauccaaacgcaaacccaaaugcaaacccgaacgcaaauccaaacgccaacccaaacgcaaacccaaacgccaacccgaacgcaaacccaaacgccaacccaaaugcgaacccaaacgcaaacccaaaugcaaauccaaaugcaaaucccaacgcaaacccaaaugcuaauccaaacgcaaacccaaacgcaaacccaaacaaaaacaaucaaggaaacggacaaggacacaacaugcccaaugauccaaaucgaaacguaaaugaaaacgcaaacgccaacaaugcaguaaaaaacaacaauaacgaagaacccuccgacaaacacauagaaaaauaccuaaaagaaauacaaaacucacucucaacagaauggucgccaugcuccguaacaugugguaacggcauacaaguacgaauaaaaccaggcucagcaggcaaaccaaaaaacgaacuagacuacgaaaacgacauagaaaaaaaaauaugcaaaauggaaaaaugcucaucaguauucaacguagucaauuccucaauaggacucauaaugguacuaucauuccuauucuuaaacuaa

SEQ ID NO: 5492 - RNA, 1170 nt, Artificial Sequence
  derived and/or modified CDS sequence (opt6) from Pf(Gha1108-043)__BAM84815.1__CSP
augaugagaaaacucgcaauucuauccguaucaucauuccuauucguagaagcacuauuucaagaauaccaauguuacggaucaucaucaaauacaagaguacuaaacgaacuaaauuacgauaacgcaggaaccaaccuauacaacgaacuagaaaugaacuacuacggcaaacaagaaaacugguacucauuaaaaaaaaacagcagaucacuaggcgaaaacgacgacggaaacaaugaagacaacgaaaaauuaagaaaaccaaaacacaaaaaauuaaaacaaccaggagacggaaacccagacccaaaugccaacccaaacguagaccccaacgcaaaccccaacguagacccaaacgcaaacccaaacguagacccaaacgcaaacccaaacgcaaacccaaacgcaaacccaaacgcaaauccaaaugccaacccaaaugcaaacccaaacgcaaacccaaacgcaaauccaaacgcaaaucccaacgccaacccaaacgcaaacccaaacgcaaauccaaacgcaaacccaaacgcaaacccaaacguagacccaaaugcaaaccccaacgcaaacccaaacgcaaacccaaacgccaaccccaacgcaaacccaaacgcaaauccaaaugcaaacccaaaugcaaacccgaacgcaaacccaaacgcaaacccaaacgcaaacccaaaugcaaacccaaacgcaaauccgaaugccaacccaaacgcaaacccaaaugcaaacccaaacgcaaacccaaacgcaaacccaaacgcuaacccaaacaaaaacaaccaaggaaacggacaaggacacaacaugccaaaugacccaaacagaaacgucgaugaaaacgcaaaugcaaacagcgcaguaaaaaacaacaauaacgaagaacccucagacaaacacauaaaagaauacuuaaacaaaauacaaaauucccuaucaaccgaaugguccccaugcucaguaaccugcgguaacggaauccaaguacgaauaaaaccaggaucagccaauaaaccaaaagacgaacuagauuacgcaaacgacauagaaaaaaaaauaugcaaaauggaaaaaugcagcuccguauucaacguaguaaacucaucaaucggccucauuaugguacuaucauuucuauuccuaaauuaa

SEQ ID NO: 5493 - RNA, 1170 nt, Artificial Sequence
  derived and/or modified CDS sequence (opt6) from Pf(Gha1108-052)__BAM84816.1__CSP
augaugagaaaacuagcgauacuaucaguaagcucuuucuuauucguugaagcacuauuccaagaauaccaaugcuacggcucaagcucaaacacaagaguacucaacgaacuaaauuaugauaacgcaggaacaaaucuauacaaugaacucgaaaugaauuacuacggaaaacaagaaaacugguacucucuaaaaaaaaacuccaggucccuaggugaaaacgacgacggaaacaacgaagacaacgaaaaacuacguaaaccaaaacacaaaaaacugaaacaaccagcugacggaaacccagauccaaacgcaaacccaaaugucgacccaaacgcaaacccaaacguagacccaaacgcaaacccaaacguagacccgaaugcaaacccgaacgcaaacccaaacgcaaacccaaacgcaaaucccaacgcaaacccaaacgcaaacccaaacgcgaacccaaacgccaacccaaaugccaacccaaacgcaaacccaaaugcaaacccaaacgccaacccaaacgccaacccgaacgcaaacccaaacguagacccaaacgcaaacccaaacgcaaacccaaacgcaaacccaaacgcaaacccaaaugcaaacccuaaugccaacccaaacgcaaacccaaacgcaaacccgaacgcaaacccaaacgcaaacccaaacgcaaacccaaacgcaaacccaaaugcaaaccccaacgcaaacccaaacgcaaacccgaacgcaaacccaaacgccaacccaaacgcaaacccaaacgccaacccaaacaaaaacaaccaaggaaacggacaaggacacaacaugccaaacgaccccaaccgaaacgucgacgaaaaugcuaaugcaaacagugcaguaaaaaauaacaacaacgaagaaccauccgacaaacauauagaacaauaucucaaaacaauccaaaacucccucucaacagaauggucaccaugcagcguaacaugcggaaacggaauacaagucagaauaaaaccaggaucagcaaacaaaccaaaagaucaauuagacuacgaaaacgacauagaaaaaaaaauaugcaaaauggaaaaaugcucaucgguauucaacguaguaaacuccucaauaggacucauaaugguacuaucauucuuauuccuaaacuaa

SEQ ID NO: 5494 - RNA, 1170 nt, Artificial Sequence
  derived and/or modified CDS sequence (opt6) from Pf(Gha1108-124)__BAM84812.1__CSP
augaugcgaaaacuugccauauuaucaguauccucauuccuauucguagaagcacucuuccaagaauaccaaugcuacggcucaagcucaaacacacgaguacuaaacgaacuaaacuacgacaacgcaggaaccaaccuauacaacgaauuagaaaugaacuacuacggaaaacaagaaaauugguacucacucaaaaaaaacucaagaucacuaggagaaaaugacgacggaaacaacgaagauaacgaaaaacuacgcaaacccaaacacaagaaauuaaaacaaccagcggacggaaacccagauccgaaugcaaacccaaauguggaccccaacgcaaacccaaacguagauccaaacgcaaaccccaacguagacccaaacgcaaacccaaacgcaaacccaaacgcaaacccaaacgcaaacccaaacgcaaauccaaacgcaaacccaaacgcaaacccaaacgcaaacccaaacgcaaauccaaacgccaacccaaacgcaaacccaaacgcaaacccaaacgcaaaccccaacgcaaacccaaacgcaaacccaaacguagacccaaacgcaaacccaaacgcaaacccaaacgcaaacccaaacgcaaacccaaaugcaaacccaaaugcaaacccaaacgcaaaucccaacgcaaacccaaacgcaaacccaaacgcaaacccaaacgcaaauccaaaugcaaacccaaacgcaaauccaaacgcuaacccaaacgccaauccaaaugcaaacccaaacgcaaaccccaacgcaaacccaaacaaaaauaaccaaggaaacggacaaggacacaacaugccaaacgacccaaaccgcaauguagaugaaaacgcaaacgccaacaacgcagucaaaaacaauaacaacgaagaacccucugaccaacacauagaaaaauaccuaaacaaaauaaaaaauucacucucaacagaauggucgccauguagcgugacaugcggaaacggaauacaaguaagaauaaaaccaggaucagccaacaaaccaaaagaccaacuagacuacgcaaacgauauagaaaaaaaaauaugcaaaauggagaaaugcuccuccguauucaacguaguuaacucaucaauaggacuuauaaugguacuaucauucuuauuccuaaauuaa

SEQ ID NO: 5495 - RNA, 1170 nt, Artificial Sequence
  derived and/or modified CDS sequence (opt6) from Pf(Gha1109-003)__BAM84834.1__CSP
augaugcgaaaauuagcaauacuauccguaucaucauuucuauucguagaagcacucuuucaagaauaccaauguuacggaucaucaucaaauacacgaguacuaaacgaacuaaacuacgacaacgcaggaaccaaccuauacaacgaacucgaaaugaacuacuacggaaaacaagaaaacugguacucacuuaaaaaaaacuccagaucacucggagaaaacgacgacggaaauaacgaagacaacgaaaaauuaagaaaacccaaacacaaaaaacuaaaacaaccagcagacggaaaccccgacccaaacgccaaucccaacguagacccaaacgcaaacccaaauguagacccaaacgcaaauccaaacguagacccaaacgcaaacccaaacgcaaacccaaacgcaaacccaaacgcaaacccaaacgcaaacccaaacgcaaaucccaacgcaaacccaaacgcaaacccaaaugcaaaccccaacgcaaacccaaacgcaaacccaaaugcaaauccaaacgcaaacccaaacgccaauccaaacgucgacccaaacgcaaacccaaaugcaaacccaaacgccaacccaaacgcaaacccaaacgcaaacccaaacgcaaaccccaacgcaaauccaaacgcaaacccaaacgccaacccaaaugcaaacccaaacgcaaacccaaacgcaaacccaaaugcaaacccaaacgcaaaucccaacgcaaauccaaaugcaaaccccaacgcaaaucccaacgccaauccaaacgcaaacccaaacaaaaauaaucaaggaaacggacaaggacacaacaugccuaacgacccaaacagaaacguagacgaaaaugcaaaugccaaugacgcaguaaaaaauaacaauaacgaagaacccuccgaccaacacauagaaaaauaccuaaaaauaauaaaaaacucauuauccacagaauggucacccugcagcguaacaugcggcaauggaauacaaguuagaauaaaacccggaucagcaaauaaaccgaaagaccaacuagacuacgccaaugauauugaaaaaaaaauaugcaaaauggaaaaaugcaguucaguauucaacgucguaaacagcucaauaggacuuauaaugguacucuccuuccuuuuccuaaauuaa

SEQ ID NO: 5496 - RNA, 1170 nt, Artificial Sequence
  derived and/or modified CDS sequence (opt6) from Pf(Gha1109-058)__BAM84835.1__CSP
augaugcgcaaacucgcaauacuaagcguaucuucauuccuauucguagaagcacuauuccaagaauaccaauguuacggaucaagcuccaacacaagaguacucaaugaacuaaacuacgacaacgcaggaaccaaccuauacaacgaacuagaaaugaacuacuacggaaaacaagaaaacugguacucacucaaaaaaaacucaagaagccuaggagaaaacgacgacggaaacaacgaagacaacgaaaaauuaagaaaaccaaaacauaaaaaauuaaaacaaccaggagacggaaacccagacccaaacgcaaacccaaacguagacccaaacgcaaacccaaacguagacccaaacgcaaacccaaacguagacccaaacgcaaacccaaacgcgaacccaaacgccaacccaaacgcgaacccaaacgcaaacccgaacgcaaaccccaacgccaacccuaacgcaaacccaaaugcaaaccccaacgcaaacccaaacgcaaacccaaacgcaaacccaaacgcaaacccaaacgcaaaccccaacguagacccaaacgcaaacccaaacgcaaauccuaacgcuaacccaaaugcaaacccaaacgcuaacccaaaugcaaauccaaacgccaaucccaacgcuaacccaaacgcaaacccaaacgcaaacccaaacgcaaacccaaacgcaaauccaaacgcaaacccaaacgcaaacccaaacgcaaacccaaaugcaaacccaaacgcaaacccaaaugcaaacccuaacgcaaacccaaacaaaaacaaccaaggaaacggacaaggacacaacaugccaaacgacccaaauagaaacgucgaugaaaacgcaaacgccaacaacgcaguaaaaaacaacaacaacgaagaaccaucagacaaacacauaacagaauacuuaaaaaaaauucaaaacucccucucaacagaaugguccccaugcuccguaacaugcggcaacggaauacaaguaagaauaaaaccaggaucagcaggaaaauccaaaaaugaauuagauuacgaaaaugacauagaaaaaaaaauauguaaaauggaaaaaugcaguucagucuucaauguaguaaacagcucuauaggauuaauaaugguacucucauuccuauuccuaaacuaa

SEQ ID NO: 5497 - RNA, 1170 nt, Artificial Sequence
  derived and/or modified CDS sequence (opt6) from Pf(Gha1109-105)__BAM84822.1__CSP
augaugagaaaacucgcaauacuaagcguauccucauuccuauucguggaagcacucuuccaagaauaccaaugcuacggaucaaguucaaauacaagaguacuaaacgaacuaaacuacgauaaugcaggcaccaaccucuacaacgaacuagaaaugaacuauuacggaaaacaagaaaacugguauucacuaaaaaaaaacucccgaucccucggagaaaacgacgacggcaacaacgaagacaacgaaaaauuacgaaaaccaaaacacaaaaaauuaaaacaacccgcagacggaaacccagacccaaacgcaaacccaaacguagacccaaacgcgaauccaaacgcaaacccaaacgcuaacccaaacgcaaacccaaaugcaaacccaaacgcaaacccaaacguagaccccaacgcaaacccaaacguagacccaaaugcaaauccaaacgcaaacccaaacgcuaacccaaacgcuaaccccaacgcaaaccccaacgcaaacccaaacgcaaacccaaaugcaaacccaaauguagacccaaacgcaaacccaaacgcaaaucccaacgcaaacccaaacgcaaacccaaaugcaaaccccaacgcaaacccaaacgcaaacccaaacgcaaauccaaacgcaaacccaaacgcaaacccaaacgcaaacccaaacgcaaacccaaacgcaaacccaaacgcaaacccaaacgcaaacccaaacgcaaacccaaacgcaaauccaaacgcaaacccaaaugcaaacccaaacgccaacccaaauaaaaacaaucaaggaaauggacaaggccauaauaugccaaacgacccaaaccgcaacguagaugaaaacgcaaaagccaacaacgcaguaaaaaacaacaacaacgaagaaccaucugacaaacacauagaacaauaccuaaaaacuauccaaaacucacuauccacagaauggucacccugcucaguaacaugcggcaacggcauacaaguacgaauaaaaccaggaucagcaaacaaaccaaaagaccaacuagacuacgaaaacgacauagaaaaaaaaauaugcaaaauggaaaaauguagcucaguauucaacgucguaaauucaucaauaggccuaauaaugguacuaucauuccuauuccucaauuaa

SEQ ID NO: 5498 - RNA, 1170 nt, Artificial Sequence
  derived and/or modified CDS sequence (opt6) from Pf(Gha1109-111)__BAM84823.1__CSP
augaugcgaaaacuagcaauccuaagcguaucaucauuccuauucguagaagcacuauuucaagaauaccaguguuacggaucauccucaaacacaagaguacuaaacgaacuaaacuacgacaacgccggaacaaauuuauauaacgaauuagaaaugaacuacuacggaaaacaagaaaauugguacucacuaaaaaaaaauucaagaaguuuaggagaaaacgacgauggaaacaaugaagacaacgaaaaacuaagaaaaccaaaacacaaaaaacuaaaacaacccggagacggaaacccagacccaaacgcaaacccaaacguagacccaaacgcaaacccaaacgucgacccaaacgcaaacccuaacguagacccaaacgcaaacccaaacgcaaacccaaacgcaaacccaaacgcaaacccaaacgcaaacccaaacgcaaacccaaacgcaaaccccaacgcaaacccaaacgcaaacccaaacgcaaacccaaacgcaaacccaaacgcaaauccaaacgcaaaccccaacgcaaaucccaacguggacccaaacgcaaauccaaaugcaaauccaaacgcaaacccaaacgcaaacccaaaugcaaacccaaacgcaaacccaaacgcaaacccaaacgcaaacccaaacgcaaauccaaacgccaacccaaacgcaaacccaaacgcaaauccaaacgcaaaccccaacgcaaacccaaacgcuaacccaaacgcaaauccaaacgcgaacccaaacgcaaacccaaacgcaaauccgaauaaaaacaaccaaggaaacggucaaggacacaacaugccaaacgaccccaaccgaaauguagacgaaaacgcaaaugcaaacaacgcagucaaaaacaacaacaacgaagaaccaucagauaaacacauaaaagaauaccuaaacaaaauacaaaauucaauaucaacagaauggucaccaugcagcgucacaugcggaaacggcauacaaguaagaauaaaaccaggaucagccgacaaaccaaaagaccaacuagacuacauaaacgacauagaaaagaaaauaugcaaaauggaaaaauguaguucaguauucaacguaguaaacagcuccaucggccucauaaugguccuaucguucuuauuucuaaacuaa

SEQ ID NO: 5499 - RNA, 1170 nt, Artificial Sequence
  derived and/or modified CDS sequence (opt6) from Pf(Gha1109-125)__BAM84824.1__CSP
augaugcgcaaacuagccauacuaucaguaagcucauuccuauucguggaagcacuauuccaagaauaccaguguuacggcucaucuucaaacacacgaguacuaaacgaacuaaacuaugacaacgcaggaacaaacuuauacaacgaauuagaaaugaacuauuauggcaaacaagaaaacugguacucacucaaaaaaaacagcagaagccucggagaaaacgacgacggaaacaacgaagacaacgaaaaauuacgaaaaccaaaacacaaaaaauuaaaacaacccgcagacggaaacccagacccaaacgcaaacccaaacguagacccaaacgcaaacccaaacguagacccaaaugcaaacccaaacguagacccaaacgcaaacccaaacgcaaacccaaacgcaaacccaaacgcaaacccaaacgccaacccaaacgcaaacccaaacgcaaacccaaaugccaacccaaacgcaaacccaaacgcaaacccaaacgcgaacccaaacgcaaauccaaacgcaaacccaaacgcuaacccaaacgcaaacccaaacguagauccaaacgcaaacccaaacgcaaauccaaacgcaaacccuaacgcaaacccaaacgcaaacccaaaugcaaacccaaacgcaaacccaaacgcaaacccaaacgcaaacccaaacgcaaacccaaacgcaaacccaaaugccaacccaaacgccaacccaaacgcaaacccaaacgcaaaccccaaugcaaauccaaacgcaaauccaaacgcaaauccaaacaaaaacaaccaaggcaacggacaaggacacaacaugccaaacgacccuaaccgaaacgucgacgaaaaugcaaaugcaaacaacgcaguaaaaaacaauaacaacgaagaaccauccgaccaacacauagaaaaauaccuaaaaacaauaaaaaacucccucucaacagaauggucccccugcuccguaacaugcggcaacggaauacaaguacgaauaaaaccaggaucagcaaacaaaccaaaagaccaacuagacuacgcaaacgacauagaaaaaaaaauaugcaaaauggaaaaaugcagcucaguauucaacguaguaaauagcuccaucggacuaauaaugguacuaucauuccuauuucugaacuaa

SEQ ID NO: 5500 - RNA, 1170 nt, Artificial Sequence
  derived and/or modified CDS sequence (opt6) from Pf(Gha1109-127)__BAM84825.1__CSP
augaugcgaaaacucgcaauccuauccguaucaucauuccucuucguagaagcacuauuucaagaauaccaaugcuacggaucaucaucaaacacaagaguacucaacgaacuaaacuacgacaaugcaggaacaaacuuauauaacgaacuagaaaugaacuauuacggaaaacaagaaaacugguacucacuaaaaaaaaacucaagaucacuaggcgaaaacgacgacggaaacaaugaagacaaugaaaaacuaagaaaacccaaacauaaaaaacuaaaacaaccaggagacggaaacccagacccaaacgcaaacccaaacgucgauccaaacgcaaacccaaauguagacccaaacgcaaacccaaacguagacccaaacgcuaacccaaacgcaaacccaaacgcaaacccaaacgccaacccaaaugcuaacccaaacgcaaacccaaacgcaaauccaaaugccaacccaaacgccaacccaaacgcaaacccaaacgccaacccaaacgcaaacccaaacgcaaauccgaacgccaacccaaacgucgacccaaaugcaaauccaaacgcaaacccgaacgcaaacccaaacgcaaaccccaacgcaaauccaaacgcuaacccaaacgcaaacccaaacgcaaauccaaacgcaaacccaaacgcaaacccaaacgcaaacccaaacgcaaacccaaaugcaaacccaaacgcaaacccaaacgcaaacccaaacgcaaauccaaacgcaaacccaaacgcaaacccaaaugcaaacccaaacaaaaacaaccaaggaaacggacaaggucacaacaugccaaacgaccccaaccgaaacguagacgaaaacgcaaacgcaaacaacgcaguaaaaaacaacaacaaugaagaaccaucagacaagcauauaacagaauaccuaaaaaaaauaaaaaacucucucucgacagaauggucaccauguaguguaaccuguggcaacggcauacaaguacgcauaaaaccaggaucagcaggaaaaucaaaaaaugaacuagacuaugaaaacgacauagaaaaaaaaauaugcaaaauggaaaaaugcagcucaguauucaacguuguaaacuccucaauaggacucauaaugguccucucauuccuauuccuaaacuaa

SEQ ID NO: 5501 - RNA, 1170 nt, Artificial Sequence
  derived and/or modified CDS sequence (opt6) from Pf(Gha1109-158)__BAM84826.1__CSP
augaugcgaaaacuagcaauauuaucaguaucaucuuuccuauucguagaagcacuuuuccaagaauaccaaugcuacggauccagcucaaacacacgagucuuaaacgaacuaaacuaugacaacgcaggcacaaaccuauacaaugaacucgaaaugaauuacuacggaaaacaagaaaacugguacucacuaaaaaaaaacuccagauccuuaggagaaaacgacgacggaaacaacgaagauaacgagaaacuacgaaaaccaaaacacaaaaaacuuaaacaacccgcagacggaaacccagacccaaacgcaaacccaaacguagacccaaacgcaaacccaaacguagacccaaacgcaaauccaaacguagaccccaacgcaaacccaaacgcaaacccaaacgcaaacccuaaugcaaacccaaacgcaaacccaaacgcaaacccaaacgcaaaccccaaugcaaacccaaaugcaaauccaaacgcaaacccaaacgcaaauccuaacgccaacccaaacgcaaauccaaacgcaaacccaaacguagaccccaacgcaaacccaaacgcaaacccaaacgcaaacccaaacgcaaacccaaacgcaaacccaaacgcaaaccccaacgcaaacccaaaugcaaauccaaacgcaaacccaaaugcaaacccaaacgcgaacccaaacgcaaacccaaacgccaacccaaacgccaacccaaacgccaacccaaacgccaacccaaacgcaaacccaaaugcaaacccaaacgccaacccaaacaaaaauaaccaaggaaacggacaaggacauaacaugccaaacgacccaaacagaaacguagacgaaaaugcaaaugcaaacaacgcaguaaaaaacaacaacaacgaagaacccucagacaaacauauagaacaauacuuaaaaacaauaaaaaacucucuaucaacagaauggucaccaugcucaguaacaugcggaaacggcauacaaguaagaauaaaaccaggauccgccaauaaaccuaaagaccaacuagauuacgcaaacgacauagaaaaaaaaauaugcaaaauggaaaaauguucaucuguauucaauguaguaaacagcucaauaggacuuaucaugguccucucauucuuauuccuaaacuaa

SEQ ID NO: 5502 - RNA, 1170 nt, Artificial Sequence
  derived and/or modified CDS sequence (opt6) from Pf(Gha1109-205)__BAM84832.1__CSP
augaugagaaaacucgcaauccucagcguaaguucauucuuauucgucgaagcauuauuccaagaauaucagugcuauggauccucaucaaacacaagaguacucaacgaacugaacuacgacaacgcuggaacaaaucucuacaaugaauuagaaaugaacuauuacggcaaacaagaaaacugguauucucuaaagaaaaauucaagaagccuaggcgaaaacgacgacggaaacaacgaagacaaugaaaaauuaagaaaaccaaaacacaaaaaacuaaaacaaccagcagacggaaacccugacccaaacgcaaacccaaacguagacccaaacgcgaaccccaacgucgaccccaaugcaaauccaaacguagacccaaaugccaacccaaacgcaaacccaaacgcaaauccaaacgcaaacccaaacgcaaacccaaacgcaaacccaaacgcaaacccuaaugcaaacccaaacgccaacccaaacgcaaacccaaacgcaaacccaaaugcaaacccaaacgcaaaccccaacgcaaacccaaacguagacccaaacgcaaacccaaaugcaaacccaaacgcaaauccaaacgcaaacccaaacgcaaacccaaacgcaaacccaaacgcaaacccaaacgcaaacccaaacgcaaacccaaacgcaaaccccaacgcaaauccaaaugcaaacccaaacgcaaacccgaacgcaaaccccaacgcaaacccaaacgcaaacccuaacgcaaaccccaacgcuaacccaaaugcaaacccaaacaaaaacaaccaaggaaauggacaaggacacaacaugccaaacgaccccaacagaaacgucgacgaaaacgcaaacgcaaacaacgcaguaaaaaacaacaacaacgaagaaccaucagaccaacacauagaaaaauaccuaaaaauaauacaaaauucacuaucaaccgaaugguccccaugcaguguaaccugcggcaauggaauacaaguaagaauaaaaccaggcucagcaaacaaaccaaaagaccaacuugacuacgcaaacgacauagaaaaaaaaauauguaaaauggaaaaauguagcucaguauucaacguagucaacucaucaauaggacucauaaugguacucuccuuuuuauuccuaaacuaa

SEQ ID NO: 5503 - RNA, 1170 nt, Artificial Sequence
  derived and/or modified CDS sequence (opt6) from Pf(T9/96)__BAD73957.1__CSP
augaugcgaaaacuagcaauacuaucaguaagcuccuuccuauucguagaagcacuauuucaagaauaccaaugcuacggcucaagcucaaacacaagaguauuaaacgaacuaaacuaugacaacgcaggcacuaaccucuacaacgaacuagaaaugaacuacuacggcaaacaagaaaacugguacucacuaaaaaaaaacucaagauccuuaggcgaaaacgacgacggaaacaacgaagacaacgaaaaacuacgaaaacccaaacacaaaaaacuaaaacaaccagcagacggcaaucccgacccaaacgcaaacccaaaugucgacccaaacgcaaacccaaauguagacccaaaugcaaacccaaacguagacccgaacgcaaauccaaacgcaaacccaaacgcaaacccaaaugcaaacccaaacgcaaacccaaacgcaaacccaaacgcaaauccaaacgccaacccaaacgcaaacccaaacgcaaaccccaacgcaaacccaaacgcaaauccaaacgcaaacccaaaugcuaacccuaacguagacccaaacgcaaacccaaacgccaacccaaacgcaaacccaaacgcaaacccaaacgcaaacccaaaugcaaacccaaacgccaacccaaacgcaaacccaaacgcaaaccccaaugcaaacccaaacgcaaaccccaacgcaaacccaaacgcaaacccaaacgcaaaccccaacgcaaaucccaacgcaaacccaaacgcgaacccaaacgcaaaccccaacgcaaacccaaacaaaaacaaucaagggaacggacaaggacacaacaugccaaacgacccaaacagaaacguagaugaaaaugcuaaugcaaacaacgcagucaaaaacaacaacaaugaagaaccaucagacaaacacauagaacaauacuuaaaaacaauaaaaaacucauuauccacagaauggucacccugcucaguuacaugcggcaacggaauacaaguaagaauaaaacccggcucagcuaacaaaccaaaagacgaacuagacuaugcaaacgauauagaaaaaaaaauaugcaaaauggaaaaaugcagcucaguauucaacguagucaauagcucaaucggacuuauaaugguacucucauuccuauucuuaaacuaa

SEQ ID NO: 5504 - RNA, 1170 nt, Artificial Sequence
  derived and/or modified CDS sequence (opt6) from Pf(Tz93-015)__BAM84752.1__CSP
augaugagaaaacucgcaauacuaucaguaucaucauuccucuucguagaagcacuauuccaagaauaccaaugcuacggaucaucaucaaacacaagaguacuaaacgaacuaaauuacgacaacgcuggaaccaaccuauacaacgaacuagaaaugaacuauuauggaaaacaagaaaauugguauucacuaaaaaaaaacagcagaagccuaggcgaaaaugaugacggaaacaacgaagauaacgaaaaacuccgaaaaccaaaacacaaaaaacuaaaacaacccggagacggaaacccagacccaaaugcaaacccaaacguagaccccaacgcaaacccaaacguagauccaaacgccaacccaaacguagacccaaacgcaaacccaaacgcaaacccaaacgcaaacccaaacgccaauccaaacgcaaacccaaacgcaaacccgaacgcaaacccaaaugcaaacccaaacgcaaacccaaacgccaacccaaacgcaaacccgaacgcaaauccaaaugcaaauccaaacgcaaacccaaauguagacccaaacgcuaacccaaacgccaacccaaacgcaaacccaaacgccaacccaaacgcuaacccaaacgcaaaccccaacgcaaacccaaacgcaaacccaaacgcaaacccaaacgcaaacccaaacgcaaacccaaacgccaacccuaacgcaaacccaaacgcaaacccaaacgcaaacccaaacgcaaacccaaacgccaacccaaacgcgaacccaaaugcaaacccaaacaaaaauaaccaaggaaacggccaaggacacaacaugccaaaugaucccaacagaaacgucgacgaaaacgcaaacgcaaacgacgcaguuaaaaacaacaacaacgaagaacccucagaccaacacauagaaaaauaccuaaaaauaauaaaaaauucacuuucaaccgaauggucaccauguucuguaacaugcggcaacggcauacaaguacgcauaaaaccaggaucagcaaacaaaccaaaagaccaacucgacuacgcaaaugacauagaaaaaaaaauauguaaaauggaaaaaugcagcucagucuucaauguagucaacucaucaaucggacuaauaaugguacuaucauuccuauuccuaaauuaa

SEQ ID NO: 5505 - RNA, 1170 nt, Artificial Sequence
  derived and/or modified CDS sequence (opt6) from Pf(Tz93-050)__BAM84762.1__CSP
augaugagaaaacucgcaauauuaucaguaagcucauuccuauucguagaagcccuuuuccaagaauaccaaugcuacggaucaagcuccaacacccgaguucuaaacgaacuaaacuaugacaacgccggaacaaaucucuacaacgaacuagaaaugaauuacuauggaaaacaagaaaacugguacucacuaaaaaaaaacagcagaucccuaggagaaaacgaugacggaaacaaugaagacaacgaaaaauuacgaaaaccaaaacacaaaaaacuaaaacaaccaggagauggcaauccagacccaaacgcaaacccaaacguagauccaaacgcaaacccaaacguagaccccaacgcaaacccaaacgucgacccaaacgcaaacccaaacgcaaacccaaacgcaaacccaaacgccaacccaaacgcaaacccaaacgcaaacccaaacgcaaaccccaacgcaaacccaaacgcaaacccaaaugcaaaccccaacgcaaacccaaacgcaaacccaaacgcaaauccaaacgcgaacccaaauguagacccaaacgcaaacccaaacgcaaacccuaacgcaaacccaaacgcaaacccaaacgcaaacccaaacgcaaaccccaacgcaaacccaaaugcaaauccaaacgccaacccaaacgcuaacccaaacgcaaacccaaacgcaaacccaaacgcaaacccaaacgcaaacccaaaugcuaacccaaacgcaaacccaaacgcaaacccaaacgcaaaccccaacgcaaacccaaacaaaaacaaccaaggaaacggacaaggacauaacaugccaaaugacccaaacagaaacguagacgaaaacgcaaacgcuaauaacccagucaaaaacaacaacaacgaagaaccaucagacaaacacauaacagaauacuuaaaaaaaaucaaaaauucaaucucaacagaauggucaccaugcucaguaacaugcggcaacggaauacaaguccgaauaaaaccaggcucagcaaacaaaccgaaagacgaacuagacuacgaaaaugacaucgaaaaaaaaauaugcaaaauggaaaaaugcagcucagucuucaacguagucaacagcucaauaggccuaauaaugguacuauccuuucuauuccuaaacuaa

SEQ ID NO: 5506 - RNA, 1170 nt, Artificial Sequence
  derived and/or modified CDS sequence (opt6) from Pf(Tz93-105)__BAM84774.1__CSP
augaugagaaaacuagcaauucuaagcgucagcucauucuuauucguagaagcacuauuccaagaauaccaauguuacggauccagcucaaacacaagaguacuaaacgaacuaaacuacgacaacgcaggaacaaacuuauacaacgaacuagaaaugaacuacuacggaaaacaagaaaacugguacucacucaaaaaaaauucacgcagucuaggagaaaacgacgacggaaacaacgaagauaacgaaaaacuacgaaaacccaaacacaaaaaauugaaacaaccaggagacggaaauccagacccaaacgcgaacccaaacguagacccaaacgcaaacccaaacgucgaccccaaugcaaacccaaacguagacccaaacgcaaacccaaacgccaacccaaacgcaaacccaaaugcaaacccaaacgcaaacccaaacgcaaacccaaacgccaacccaaaugcaaacccaaacgcaaauccaaacgcaaacccaaacgcaaacccaaacgcaaacccaaacgcaaauccaaacgcaaacccgaacguagacccaaacgcaaacccaaacgcaaacccaaacgcaaacccaaacgcaaacccaaacgcaaacccaaacgcaaacccaaacgcaaacccaaacgcaaacccaaacgcaaacccaaacgcgaacccaaacgcaaacccaaacgcaaacccaaacgcaaacccaaacgccaacccaaacgcaaacccaaacgcaaacccaaacgcaaacccgaacgcaaacccaaacgcaaacccaaacaaaaauaaccaaggaaacggacaaggacacaacaugccaaacgacccuaacagaaauguagacgaaaacgcaaacgcaaauaacgcagucaaaaauaacaacaaugaagaaccuuccgaccaacacauagaaaaauaccuaaaaauaauacaaaacucacuauccacagaauggucaccauguucaguaacaugcggaaacggaauacaaguaagaauaaaaccaggaucagcaaauaaaccaaaagaucaauuagacuaugcaaacgacauagaaaaaaaaauaugcaaaauggaaaaaugcagcucaguauuuaacgucgucaauucaucaauaggacucauaaugguacuaucguucuuauuccuaaacuaa

SEQ ID NO: 5507 - RNA, 1170 nt, Artificial Sequence
  derived and/or modified CDS sequence (opt6) from Pf(Tz93-121)__BAM84777.1__CSP
augaugcgaaaacuagcaauacuaagcguaucaucauuccuauucguagaagcacuauuccaagaauaucaaugcuacggcucaagcucaaacacacgaguacuaaacgaacuaaauuacgacaaugcaggaaccaaccucuacaacgaacuagaaaugaacuauuacggcaaacaagaaaacugguacucacuaaaaaaaaacagcagaucacuaggagaaaaugacgacggaaacaacgaagacaacgaaaaacuacgaaaaccaaaacacaaaaaauuaaaacaaccaggagauggaaacccagacccaaacgcaaacccaaacguagauccaaacgcaaacccaaacguagauccaaacgcaaacccaaaugucgacccaaacgcaaacccaaacgcaaauccaaaugcaaacccaaacgcaaacccaaacgccaacccaaacgcaaacccaaaugcaaauccaaaugcaaacccaaacgcaaacccaaacgccaacccaaacgccaauccaaauguagacccgaacgcaaacccaaaugcaaacccaaacgcaaacccaaacgcaaacccaaaugcgaacccaaacgcaaacccaaacgccaauccaaacgcaaacccaaacgccaacccaaacgcaaacccaaaugcaaauccaaacgccaacccaaacgcaaacccaaacgcaaacccaaacgcaaacccaaaugcaaacccaaacgcaaacccaaacgcaaauccaaacgcaaacccaaacgcaaacccaaacgcaaacccaaacgcaaacccaaauaaaaauaaccaaggaaauggacaaggacacaacaugccaaacgacccaaacagaaacguagacgaaaacgcaaacgcaaacaacgcagucaaaaacaacaacaacgaagaaccaucagaccaacacauagaaaaauaccuuaaaaaaaucaaaaacucgauaucaacagaauggucucccugcagcguaacaugcggcaacggcauacaaguaagaauaaaaccaggauccgccaacaaaccaaaagacgaacuagacuacgaaaacgacauagaaaaaaaaauaugcaaaauggaaaaauguagcucaguauucaacguaguaaacagcucaauaggacuaauaaugguauuaucauuccucuuccuaaacuaa

SEQ ID NO: 5508 - RNA, 1170 nt, Artificial Sequence
  derived and/or modified CDS sequence (opt6) from Pf(Tz98-032)__BAM84786.1__CSP
augaugcguaaacuagcaauccuaucaguauccucauuucuauucguagaagcacucuuccaagaauaccaaugcuacggaucuuccucaaacacacgcguauuaaaugaacuaaacuacgauaacgcaggaacaaaccuuuacaacgaacuagaaaugaacuacuauggaaaacaagaaaacugguacucacuaaaaaaaaacucaagaucauuaggagaaaacgacgacggcaacaacgaagacaacgaaaaacuaagaaaaccaaaacacaaaaaacuaaaacaaccagcagauggaaacccagacccaaacgcaaauccaaacguagauccaaacgcaaauccaaacguagacccaaaugcaaacccaaacguagacccgaaugcaaauccaaacgcaaaccccaacgccaaccccaacgcaaacccaaacgcaaacccaaacgcaaacccaaacgcaaacccaaacgccaacccaaacgcaaacccaaacgcaaacccaaacgcaaacccaaacgcaaaccccaaugcaaauccaaacgcaaacccaaacgcaaacccaaacguagacccuaacgcaaacccaaacgcaaacccaaacgcaaacccaaaugcaaacccaaacgcgaacccaaacgccaacccaaaugccaacccaaacgcaaacccaaacgcaaacccaaacgcaaacccaaacgcaaacccaaacgcaaauccaaacgcaaacccaaaugcaaacccaaacgcaaacccaaacgcaaacccuaacgcaaauccaaacgcaaacccaaacaaaaacaaucaaggaaacggacaaggacacaacaugccaaaugacccaaauagaaauguugacgaaaacgcaaaugccaauaacgcaguuaaaaacaacaacaacgaagaaccaucagacaaacacauagaacaauaucuaaacaaaauaaaaaacucaauaucaacagaauggucaccaugcucagugaccugcggcaacggaauccaaguccgaauaaaaccaggaucagccaacaaacccaaagaugaacuaaauuacgaaaacgacauagaaaaaaaaauaugcaaaauggaaaaaugcuccuccguauucaacguaguaaauucaucaauaggacuaauaaugguacuaucauuccuauuccuaaacuaa

SEQ ID NO: 5509 - RNA, 1170 nt, Artificial Sequence
  derived and/or modified CDS sequence (opt6) from Pf(Tz98-107)__BAM84796.1__CSP
augaugcgaaaacuagccauauuauccguaucaucauuccuauucguagaagcauuauuucaagaguaccaaugcuacggaucauccucgaacacacgcguccucaacgaacuaaacuacgacaacgcaggaaccaaccuauacaaugaacuagaaaugaacuacuacggcaaacaagaaaacugguauucacuaaaaaaaaacuccagaagccuaggagaaaacgacgauggaaacaacgaagacaacgaaaaauuaagaaaaccaaaacacaaaaaacuaaaacaacccgcugacggcaacccugacccaaacgcaaacccaaacguagacccaaacgcaaacccaaacguagacccaaacgcaaacccaaauguagacccaaaugcaaacccaaacgcaaacccaaacgcaaaccccaacgcaaacccaaacgcaaacccaaacgcaaacccaaacgcaaacccaaacgcaaacccaaacgcaaacccaaacgcaaacccaaacgcaaauccaaacgcaaacccaaacgcaaaccccaacgcaaacccaaacguagacccaaacgcaaacccaaacgcaaauccaaacgcaaacccuaaugcaaacccaaaugccaaccccaacgcaaauccuaacgcaaacccaaaugccaacccaaacgcaaacccaaacgcaaacccaaacgcaaacccaaaugcaaacccaaacgcaaauccaaacgcaaacccaaacgcaaacccaaacgcaaaccccaacgccaaccccaacgcaaauccaaacgcaaauccaaacaaaaacaaccaaggaaacggccaaggacacaacaugccaaacgacccaaacagaaacguagacgaaaacgcaaacgcaaacaacgcaguaaaaaacaacaacaacgaagaacccucagaccaacauauagaaaaauacuuaaaaagaauccaaaacucacuaucaacugaauggucacccuguucaguuaccugcggaaacggaauacaaguaagaauaaaaccaggaucagccaauaaaccaaaagaccaacuagacuacgcaaacgacauagaaaaaaaaaucugcaaaauggaaaaaugcagcucagucuucaacguaguaaacagcucaauaggauuaauaaugguauuaucauucuuauuccuaaacuaa

SEQ ID NO: 5510 - RNA, 1167 nt, Artificial Sequence
  derived and/or modified CDS sequence (opt6) from Pf(Asembo Bay)__AAN87599.1__CSP
augaugagaaaacuagcaauacuaucagucucaucauuuuuauucgucgaagcccuauuucaagaauaccaaugcuacggauccucaucaaacacaagaguacuaaacgaacuaaacuacgacaacgcagguacaaaccuauauaacgaacucgaaaugaauuauuacggaaaacaagaaaacugguacucacuaaaaaaaaacucacguucacuaggagaaaacgacgacggaaacaauaacaacggagacaacggaagagaaggcaaagacgaagacaaaagagacggaaacaacgaagacaacgaaaaauuacgcaaaccaaaacacaaaaaacuaaaacaaccagcagacggaaacccagacccaaacgcaaacccuaacguugacccaaacgcaaacccaaacguagacccaaacgcaaauccaaauguagacccaaaugcaaacccaaacgcaaacccaaaugcaaacccaaaugcaaacccaaaugcaaauccaaaugcaaacccaaacgccaacccaaacgcaaacccaaacgcaaacccaaacguagauccaaaugcaaacccaaacgcaaacccaaacgcaaacccaaacgcaaaccccaaugcaaacccaaacgcaaacccaaaugcaaacccaaacgcaaacccgaacgcaaacccaaacgcaaauccaaacgcaaacccaaacgcaaacccaaacgcaaacccaaacgcaaacccaaacgcaaauccaaacgcaaacccaaaugcaaacccaaacgcaaauccaaacgcaaacccaaacaaaaacaaucaaggaaacggacaaggacacaauaugccaaacgauccaaacagaaacgucgacgaaaacgcuaacgcaaacaacgcaguuaaaaacaacaacaacgaagaacccucugacaagcacauagaacaauaucuaaacaaaauacaaaacucauuaucgacugaauggucaccuugcucaguuacaugcggcaacggaauacaaguacgaauaaaaccaggcuccgcaaacaaaccaaaagaccaacuagacuacgcaaaugacauagaaaaaaaaauaugcaaaauggaaaaaugcucaucaguuuucaacgucguuaacuccucaauaggauuaauaaugguauuauccuuccuauuccuaaacuaa

SEQ ID NO: 5511 - RNA, 1158 nt, Artificial Sequence
  derived and/or modified CDS sequence (opt6) from Pf(Asembo Bay)__AAN87581.1__CSP
augaugagaaagcuagcaauacuaagcguauccucauuccuauucguagaagcacucuuccaagaauaccaaugcuacggaucaaguucaaacacaagaguauuaaacgaauuaaacuacgacaacgcaggaacaaaccuauacaaugaacuugaaaugaacuauuacggcaaacaagaaaacugguacucacuaaaaaaaaacagcagaagccuaggagaaaacgacgacggaaacaacgaagacaacgaaaaauuacgaaaacccaaacacaaaaaauuaaaacaacccgcagacggaaacccagaccccaaugcaaacccaaauguagauccaaacgcaaacccaaacguagaccccaacgcaaauccaaacguagacccaaacgcaaacccaaacgcaaauccaaacgcaaacccaaacgcaaauccaaaugcaaacccaaacgcaaacccaaacgccaacccaaacgccaacccaaacgccaacccaaaugcaaacccgaacgcuaauccuaacgcaaauccaaacgcaaacccaaacgucgacccaaaugcuaauccaaacgcaaaccccaacgcaaacccaaacgcaaacccaaacgcaaacccaaacgcaaacccuaacgcaaacccaaacgcaaacccaaacgcaaacccaaaugcaaauccaaacgcaaacccaaaugccaauccaaacgcaaacccaaacgcaaacccaaacgcaaacccaaacgcaaacccaaaugccaacccgaacgcaaacccaaaugcaaauccaaauaaaaacaaccaaggaaauggacaaggucacaacaugccaaacgacccaaaccgaaacguagacgaaaacgcaaaagcaaacaacgcaguaaaaaacaacaacaacgaagaaccaucagauaaacacauaaaacaauaccuaaaaaaaauacaaaauucaauaucaacagaauggucacccugcagcguaaccuguggaaacggcauacaaguacgaauaaaacccggaucagccgacaaaccaaaagaccaacuagacuacgacaacgacauagaaaaaaaaaucuguaaaauggaaaaaugcagcucgguauuuaacguaguaaauuccucaauaggacucauaaugguacuaucauucuuauucuuaaacuaa

SEQ ID NO: 5512 - RNA, 1158 nt, Artificial Sequence
  derived and/or modified CDS sequence (opt6) from Pf(Gha1108-115)__BAM84810.1__CSP
augaugagaaaacuagcaauccuaucaguaagcuccuuucuauucguagaagcgcuauuccaagaauaucaaugcuauggcucaucaucaaacacaagaguauuaaacgaacuaaacuacgacaacgcuggaacuaaucucuacaacgaacucgaaaugaacuauuauggaaaacaagaaaacugguacucacucaaaaaaaacucacgaucccuaggugaaaacgacgacggaaacaacgaagacaacgaaaaacuacgaaaaccaaaacacaaaaaacuaaaacaacccgccgacggaaaccccgacccaaacgcaaacccaaacguagacccaaacgcaaacccaaacguagacccaaacgcaaacccaaauguagacccaaacgcaaacccaaacgcaaacccaaacgcaaacccaaacgcaaacccaaacgcaaacccaaacgcaaacccaaaugcaaacccaaacgcaaacccaaacgcaaacccaaacgcaaaccccaacguugacccaaacgcaaacccaaacgcaaacccaaacgcaaacccaaacgcaaacccaaacgcaaauccaaaugcaaacccaaacgcaaacccaaacgcaaacccaaacgcaaauccaaacgcaaacccaaacgcaaacccaaaugcaaacccaaacgcaaacccaaacgcaaacccaaacgcaaacccaaaugcaaacccaaacgcaaacccaaacgccaacccaaaugcaaacccaaacgcaaauccaaaugcaaacccaaaugcaaaccccaacaaaaacaaccaaggaaacggccaaggacacaacaugccaaacgauccaaacagaaacgucgacgaaaacgcaaaugccaacaacgcaguaaaaaacaacaacaacgaagaaccaucagaccaacacauagaaaaauaccuacaaaaaauacagaauucacuaucaacagaauggucaccauguagcguaacuugcggaaacggaauacaaguaagaauaaaacccggcucagcaaacaaaccaaaagaucaacuaaacuacgaaaaugacauagaaaaaaaaauaugcaaaauggaaaaaugcuccucaguuuuuaauguaguaaacucaucaaucggcuuaauaaugguacuaucauuccuauuccuaaacuaa

SEQ ID NO: 5513 - RNA, 1158 nt, Artificial Sequence
  derived and/or modified CDS sequence (opt6) from Pf(Gha1108-119)__BAM84811.1__CSP
augaugagaaaacucgccauacuaagugucucaucauuccuauucguagaagcacuauuucaagaauaccaauguuacggaucaagcucaaauaccagaguauuaaacgaacuaaacuacgauaacgccggaacaaacuuauacaacgaacuagaaaugaacuauuacggaaaacaagaaaacugguacucacuaaaaaaaaacagcagaucacuuggagaaaacgacgacggaaacaacgaagauaacgaaaaauuacgaaagcccaaacacaaaaaacuaaaacaacccggagacggaaacccagacccaaacgcaaacccaaacguagacccuaaugcaaacccaaacguagacccaaacgcaaacccaaacguagacccaaacgcaaacccaaacgcaaacccaaacgcaaacccaaacgcaaacccaaacgcaaacccaaaugccaacccaaacgcaaacccaaacgcaaacccaaacgcaaacccaaacgcaaacccaaaugcaaacccaaacgcuaacccaaaugcaaacccaaacguagacccaaacgccaacccaaacgccaaccccaacgcaaacccaaacgcaaacccaaacgcaaacccaaaugcaaaccccaacgccaacccaaacgcaaaccccaacgcaaacccaaacgcaaauccaaacgcaaacccaaaugcaaauccaaacgcaaacccaaacgcaaacccaaacgcaaacccaaacgcaaacccaaacgccaacccaaaugcaaaccccaaugcaaacccaaacaaaaacaaccaaggaaacggacaaggacacaacaugccuaacgaccccaacagaaacgucgacgaaaacgccaacgcaaacaaugcaguaaaaaacaauaacaacgaagaacccucagaccaacacauagaaaaauacuuaaaaaccauaaaaaacucacucuccacagaauggucaccaugcucaguaacaugcggcaacggaauacaaguaagaauaaaaccaggaucagccaauaaaccaaaagaucaauuagacuacgaaaacgacauagaaaaaaaaauaugcaaaauggaaaaaugcagcuccguauucaauguaguaaacucuucaauaggacucauaaugguacuaucauuccucuuccuaaacuaa

SEQ ID NO: 5514 - RNA, 1158 nt, Artificial Sequence
  derived and/or modified CDS sequence (opt6) from Pf(Gha1109-071)__BAM84836.1__CSP
augaugcguaaacuagcaauauuaagcguauccucauuuuuauucguagaagcacucuuccaagaauaccaaugcuacggcuccagcucaaacacaagaguacucaacgaacuaaacuacgacaacgcaggaaccaaccuauacaacgaacuagaaaugaauuacuacggcaaacaagaaaacugguacucacuaaaaaaaaacagcagaucccuuggcgaaaacgacgacggaaacaacgaagauaacgaaaaauuacgaaaaccaaaacauaaaaaauuaaaacaaccaggagacggaaauccagacccaaacgcaaaccccaauguagaccccaacgcaaacccaaauguagauccaaacgcaaacccaaauguagacccaaaugcaaacccaaacgcuaacccaaacgcaaacccaaaugcaaacccaaacgccaacccaaacgcaaacccaaacgcaaacccaaacgcaaacccaaacgcaaauccaaacgccaauccaaacgcaaacccaaacgcaaacccaaaugcaaaccccaacgcaaacccaaacguggacccaaaugcaaacccaaacgcaaacccaaacgcaaacccaaacgcaaauccaaacgcaaacccaaacgcaaacccaaacgcaaauccaaacgcaaacccaaacgcaaacccaaacgcaaauccaaacgcaaauccaaacgcaaacccaaacgcgaacccaaaugcaaacccgaacgcaaacccaaacgcaaaccccaacgcaaacccuaacgcaaacccaaacaaaaacaaccaaggaaacggacaaggacacaauaugccaaaugacccaaaccgcaacguagacgaaaacgccaacgcaaacaacgcaguaaaaaacaacaacaacgaagaacccucagaccaacacauagaaaaauacauaaaaaaaauucaaaacucgcuaucaacagaauggucaccaugcagcguaacaugcggcaacggcauacaagucagaauaaaaccaggcagcgcuaacaaaccaaaagacgaacuaaacuacgaaaacgacauagaaaaaaaaauaugcaaaauggaaaaaugcagcucaguauucaauguaguaaacagcucaaucggacuaauaaugguauuaucauuucuauucuuaaacuaa

SEQ ID NO: 5515 - RNA, 1158 nt, Artificial Sequence
  derived and/or modified CDS sequence (opt6) from Pf(Gha1109-163)__BAM84827.1__CSP
augaugagaaaacuagcaaucuuaagcguauccucauuuuuguucgucgaagcacuauuccaagaauaccaaugcuacggaucaagcucaaacacaagaguacuaaacgaauuaaacuacgacaacgcaggcacaaaccucuauaacgaacuugaaaugaacuacuauggaaaacaagaaaacugguacucacuaaaaaaaaauagcagaucucuaggagaaaacgacgacggaaacaaugaagacaacgaaaaauuacgcaaaccaaaacacaaaaaacuaaaacaaccagcagacggaaacccagacccaaacgcaaacccaaacguagacccuaacgcaaauccaaacguagacccaaacgcaaacccaaacguagacccaaacgcaaaccccaacgcaaacccaaacgcaaacccaaacgccaaccccaacgcaaacccaaacgcaaacccaaacgccaacccaaacgcaaacccaaaugcaaacccaaacgcaaaccccaacgcaaacccaaacgcaaacccaaaugcaaauccaaacgcaaacccaaacgucgacccaaacgcaaacccaaaugcaaacccaaacgcaaauccaaacgccaacccaaacgcaaacccaaacgcaaacccaaacgcgaauccaaacgcaaauccaaacgcuaacccgaacgcaaacccaaacgcaaauccaaacgccaacccaaaugcaaacccaaacgcaaacccaaaugcaaacccaaacgcaaacccuaacgcaaacccgaacgcuaacccaaacaaaaacaaccaaggaaacggacaaggacacaauaugccaaacgacccaaaccgaaauguagacgaaaacgccaaugcaaacaacgcaguaaaaaauaauaacaacgaagaaccaucagaccaacacauagaaaaauaccuaaaaacaauucaaaacucacuuucaacagaauggucaccaugcagcguaacaugcggaaacggcauacaaguaagaauaaaaccaggaucagcaaauaaaccaaaagaccaacuagacuacgcaaacgacauagaaaaaaaaauaugcaaaauggaaaaauguagcucagucuucaacguaguaaacagcucaaucggauuaauaaugguacuauccuuccuauuccuaaacuaa

SEQ ID NO: 5516 - RNA, 1158 nt, Artificial Sequence
  derived and/or modified CDS sequence (opt6) from Pf(Tz93-007)__BAM84748.1__CSP
augaugagaaaacuagcaauauuaagcguauccucauucuuguucguagaagcauuauuccaagaauaccaaugcuacggaucaagcucaaacacccgaguacuaaacgaacuaaacuaugacaacgcaggaacaaaccucuacaacgaacuagaaaugaacuauuauggaaaacaagaaaacugguacucacuuaaaaaaaacuccagaagucuaggagaaaacgaugacggaaacaacgaagauaacgaaaaacuaagaaaaccaaaacacaaaaaacuaaaacaaccagcagacggaaacccagacccaaaugccaaccccaacguagacccaaacgccaaccccaacguagacccaaacgcaaacccaaacguagaccccaacgcaaacccaaacgcaaacccaaacgcaaacccaaacgcaaacccaaacgccaacccuaacgcaaaccccaacgcaaacccaaacgcaaacccaaacgccaacccgaacgcaaauccaaacgcaaacccaaacgcaaauccaaacgccaacccaaacguagacccaaacgcaaauccaaacgcaaacccaaaugcaaacccaaacgcaaacccaaacgccaacccaaacgcaaacccaaacgcaaacccaaacgcaaacccaaacgcaaacccaaacgcuaacccaaaugcaaacccaaacgccaauccaaacgcaaacccaaacgcaaacccaaacgcaaacccaaacgccaacccaaacgcuaacccaaacgcaaacccaaacgccaaccccaacaaaaauaaccaaggaaacggacaagggcacaauaugccaaacgacccaaacagaaacguugacgaaaaugcaaacgcaaacaacgcaguaaaaaauaacaacaacgaagaacccucagacaaacacauagaacaauaccuaaaaacaauaaaaaacucacuaucaacagaauggucaccaugcagcguaacaugcggaaacgguauacaagucagaauaaaaccaggcucagccaacaaaccaaaagacgaacuagacuacgcaaacgacauagaaaaaaaaauaugcaaaauggaaaaaugcaguucaguauucaacguaguuaacucauccauaggacuaauaaugguacuauccuucuuauuccuuaacuaa

SEQ ID NO: 5517 - RNA, 1158 nt, Artificial Sequence
  derived and/or modified CDS sequence (opt6) from Pf(Tz93-008)__BAM84749.1__CSP
augaugcgaaaacuagcaauacuaucagugucaucauucuuauucguagaagcacucuuccaagaauaccaaugcuacggaucgagcucaaacacaagaguacuaaaugaauuaaacuacgacaacgcaggcacaaaucucuauaacgaauuagaaaugaacuacuacggcaaacaagaaaacugguacucacucaaaaaaaacuccagaucacuaggugaaaacgacgacggaaauaacgaagacaacgaaaaauuaagaaaaccaaaacacaaaaaauuaaaacaacccgcagacggaaauccagacccaaacgcaaacccaaacguagacccaaacgcaaacccaaacguagacccaaacgcaaacccaaacguagacccaaacgccaacccaaacgcaaacccaaacgcaaacccaaaugcgaacccaaacgcaaauccaaacgcaaacccaaacgccaacccgaaugcaaacccaaacgcaaauccaaaugcaaacccaaacgcaaacccaaacgccaacccaaacgcaaacccaaacguagacccaaacgcaaacccaaacgcaaaccccaaugcaaacccuaacgcaaacccaaacgcaaacccaaaugcaaacccaaacgcuaacccaaacgcaaacccaaacgcaaacccaaacgcaaauccaaaugcaaacccaaacgcaaacccaaacgcaaacccaaacgcaaauccaaacgcuaacccaaaugcaaacccaaaugcaaacccaaacgcaaaccccaacgcaaacccaaauaaaaacaaccaaggaaacggacaaggacauaacaugccaaacgacccaaaccgcaacguagacgaaaaugcuaacgccaacaacgcagucaaaaacaacaacaaugaagaaccuucagacaaacauauaacagaauaucuaaaaaagauacaaaacucacucucaacagaauggucgcccugcagcguaacuugcggaaacggaauacaaguaagaauaaaaccaggcuccgccggaaaaucaaaaaacgaacuagacuacgaaaacgacauagaaaaaaaaauaugcaaaauggaaaaaugcagcucaguauucaacgugguaaacagcucaauaggacucauaaugguacuaucauuccuauucuuaaacuaa

SEQ ID NO: 5518 - RNA, 1158 nt, Artificial Sequence
  derived and/or modified CDS sequence (opt6) from Pf(Tz93-013)__BAM84751.1__CSP
augaugcgaaaacuagcaauauuaagcguaucauccuuccuauuuguagaagcacucuuccaagaauaccaaugcuacggcucaagcuccaacacacgaguacuaaacgaauuaaauuaugacaacgcaggaaccaauuuauacaaugaacuagaaaugaacuauuacggaaaacaagaaaacugguacucacuaaaaaaaaacuccagaucacugggagaaaacgacgacggaaauaaugaagauaacgaaaaacuaagaaaaccaaaacacaaaaaacuaaaacaaccagcagacggaaacccagacccaaacgcaaacccaaacguagaucccaacgcaaacccaaacguagacccaaacgcaaacccaaacgucgacccaaacgcaaauccaaacgcaaacccaaacgcaaacccaaaugcaaauccaaacgcaaaccccaacgcaaacccuaacgcaaacccuaacgcaaacccaaacgcaaacccaaacgcaaaccccaacgcaaacccuaacgcaaaccccaacgcaaacccaaacguagacccaaacgcuaacccaaacgcaaacccaaacgcaaauccaaacgcaaacccaaacgcaaacccgaacgccaacccaaacgcaaacccuaacgcaaaccccaacgcaaacccaaacgcaaacccaaaugcgaacccaaacgcaaacccuaacgcaaacccaaacgcaaacccaaacgcaaacccaaacgcaaacccaaacgcaaacccaaacgcaaauccaaaugcaaacccaaauaaaaauaaccaaggaaacggacaaggacacaacaugccaaacgacccaaauagaaacguaaacgaaaaugcaaacgcaaauaacgcaguaaaaaacaacaacaacgaagaaccaucagacaaacacauaacagaauaccuaaaaaaaauacaaaacucacuaucaaccgaauggucaccaugcucaguaacuugcggaaacggaauacaaguucgaauaaaaccaggaucagcaggaaaaucaagagacgaacuagacuacgaaaacgacauagaaaaaaaaauaugcaaaauggaaaaaugcucuucaguauucaacgucgucaacucaucaauaggacucauaaugguacuauccuucuuauuccuaaacuaa

SEQ ID NO: 5519 - RNA, 1158 nt, Artificial Sequence
  derived and/or modified CDS sequence (opt6) from Pf(Tz93-048)__BAM84761.1__CSP
augaugagaaaauuagcaauccuaucaguaagcuccuuccuauucguagaagcauuauuccaagaauaccaaugcuacggauccucaucaaacacacgaguacucaacgaacuaaacuacgacaaugcaggaaccaaccucuauaacgaacuagaaaugaacuacuacggaaaacaagaaaacugguacucauuaaaaaaaaacagcagaucacuaggagaaaaugacgacggaaacaacgaagauaaugaaaaauuaagaaaacccaaacacaaaaaacuaaaacaacccgccgacggaaacccagacccaaacgcaaacccaaauguagacccaaacgcaaauccaaacguagacccaaacgcaaacccaaacguagacccaaacgcgaauccaaacgcuaacccaaacgcaaacccaaaugcaaacccaaacgcaaacccaaacgcaaacccaaacgcgaaccccaacgccaacccaaacgcaaauccaaacgcaaauccaaacgcaaacccaaacgcaaacccaaacgcaaacccuaacgccaaccccaacguagacccaaacgcaaacccaaacgcaaauccaaacgcaaacccaaacgcaaacccaaacgcaaaucccaaugcaaacccaaacgcaaacccaaacgcaaacccaaacgcaaacccaaacgcaaacccaaacgccaacccaaacgcaaaccccaacgcaaacccaaacgcaaacccaaacgcgaacccaaacgcaaaccccaaugcaaacccaaacgcaaacccaaacaaaaacaaccaaggaaacggacaaggacacaacaugccaaaugacccaaaccgcaauguagacgaaaaugccaacgcaaacaacgcggucaaaaauaauaacaacgaagaacccuccgaccaacacauagaaaaauaccuaaaaauaauaaaaaacucauuaucaaccgaauggucaccuugcaguguaacaugcggaaacggaauacaaguaagaaucaaaccaggaucggccaauaaaccgaaagaucaacuagacuacgccaacgacauagaaaaaaaaaucugcaaaauggaaaaaugcagcucaguuuuuaacguaguaaacucaucaauaggacucauaaugguacucucauuccuauuucuaaacuaa

SEQ ID NO: 5520 - RNA, 1158 nt, Artificial Sequence
  derived and/or modified CDS sequence (opt6) from Pf(Tz93-120)__BAM84776.1__CSP
augaugcgcaaacuagcaauacuaucaguaagcucauucuuauucguagaagcacucuuucaagaauaucaaugcuacggaucaagcucaaacacaagaguccuaaacgaauuaaauuacgacaacgcaggaaccaaccuauacaacgaacuagaaaugaacuacuacgguaaacaagaaaauugguacucacuuaaaaaaaacuccagaucacucggcgaaaacgacgacggaaauaacgaagacaacgaaaaauuaagaaaacccaaacacaaaaaacuaaaacaaccagcagacggaaacccagacccuaaugcaaacccaaacguagacccaaacgcuaacccaaacguagacccaaacgcaaacccaaaugucgacccaaacgcaaacccaaacgcaaaccccaaugcaaacccaaacgcuaacccaaacgccaacccaaacgcuaacccaaaugcaaacccaaacgcaaacccaaacgcaaacccaaacgccaacccaaacgcaaaccccaacgcaaacccaaacgcaaacccaaacguagacccaaacgcaaacccaaacgcaaacccaaacgcaaacccaaacgccaacccaaaugcaaauccaaacgcaaacccaaacgcaaacccaaacgcaaacccaaacgcaaacccaaacgcaaacccaaacgcaaacccaaacgcaaacccaaacgcaaaucccaacgcaaacccaaaugcgaaccccaacgccaacccaaacgcaaaucccaacgcaaacccaaacgcaaacccaaacaaaaacaaccaaggaaacggacaaggacacaacaugccaaacgacccaaacagaaacgucgacgaaaacgcaaacgccaacaacgcaguaaaaaauaauaacaaugaagaaccaucugaccaacacauagaaaaauacuuaaaaauaauacaaaacucacuaucaacagaauggucaccaugcucaguuacaugcggaaacggcauacaaguccgaauaaaaccaggaucagcaaacaaaccaaaagaucaauuagacuaugcaaacgacauagaaaaaaaaauaugcaaaauggaaaaaugcucaucaguuuucaacguagucaauucaucaauaggacucauaaugguacuuucguuccucuucuuaaacuaa

SEQ ID NO: 5521 - RNA, 1158 nt, Artificial Sequence
  derived and/or modified CDS sequence (opt6) from Pf(Tz98-101)__BAM84794.1__CSP
augaugcgcaaacuagcaauacuaagcgucuccucuuuuuuauucguagaagcacuauuccaagaauaccaaugcuacggaucaagcuccaacacgcgaguccuaaaugaacuaaacuacgacaaugcagggacaaaccucuauaacgaauuagaaaugaauuauuauggaaaacaagaaaacugguacucucuaaaaaaaaacagcagaagccuaggagaaaacgacgacggaaacaacgaagacaaugaaaaacuacgaaaaccaaaacacaaaaaacuaaaacaacccgcagacggaaacccagacccaaacgcaaacccaaacguagacccaaacgcaaacccaaacguagacccaaacgcaaauccaaacguagacccaaacgcaaacccaaacgcaaacccaaacgcaaacccaaacgcaaacccaaacgcaaacccaaacgcaaacccaaacgcaaaucccaacgcaaauccgaacgcaaacccaaacgcaaacccaaaugcaaacccaaacgccaacccaaaugcgaauccaaacgcaaacccaaacguagauccaaacgcaaacccaaacgcaaacccgaacgcaaacccaaacgcaaaccccaacgcaaacccaaacgcaaaccccaacgcgaacccaaacgccaacccaaaugcaaauccaaacgcaaauccaaacgcaaacccaaacgcaaacccaaaugcaaacccaaaugccaacccaaacgcaaacccaaaugcaaaccccaacgcaaacccaaaugcaaaucccaacaaaaacaaccaaggaaacggacaaggacacaacaugccgaacgacccaaauagaaaugucgacgaaaacgccaacgccaacaaugcaguaaaaaacaauaauaacgaagaacccucagacaaacacauaacagaauacuuaaaacgaauacaaaacucacuauccacagaauggucacccuguucaguaaccugcggcaacggaauacaaguacgaauaaaaccaggcucagcaggaaaaucaaaaaacgaauuagacuacgaaaacgacauagaaaaaaaaauaugcaaaauggaaaaaugcaguucaguauucaacguaguaaauagcucgauaggucuaauaaugguacuaucauuccuauuccuaaacuaa

SEQ ID NO: 5522 - RNA, 1158 nt, Artificial Sequence
  derived and/or modified CDS sequence (opt6) from Pf(Yaounde)__AAN87580.1__CSP
augaugagaaaacuagcaauucuaaguguaagcucauuccuguucguagaagcacuauuucaagaauaccaaugcuaugguucaaguucaaacacacgaguacuaaaugaauuaaacuacgacaacgcaggaacaaacuuauacaacgaacuagaaaugaacuacuacgguaaacaagaaaacugguacucauuaaaaaaaaacagcagaagccuaggcgaaaacgacgacggaaacaacgaagacaacgaaaaauuacgcaaaccaaaacacaaaaaacuaaaacaaccagcagacggaaacccagacccaaacgcaaacccaaacguagacccaaacgcaaacccaaacguagacccaaacgcaaacccaaacgucgacccaaacgcaaacccaaacgcaaacccaaacgcaaacccaaaugcaaacccaaacgcgaauccaaaugcaaacccaaacgccaacccaaacgccaaccccaaugcaaaccccaacgcgaacccaaacgcaaacccaaacgcaaacccaaaugcaaacccaaauguagauccaaacgcaaauccaaacgcuaaccccaaugcaaacccaaacgcaaauccaaacgccaacccaaaugcaaacccaaacgcaaacccaaacgcuaacccaaacgcaaacccaaacgcaaauccaaacgcaaacccaaacgcaaacccaaacgcaaacccaaaugcaaacccaaacgcaaacccaaacgcaaauccaaaugcaaacccaaacgcaaacccaaaugcaaacccaaacaaaaacaaccaaggaaacggacaaggacacaacaugccaaacgacccuaaccgaaacguagaugaaaacgcaaaagcaaacaacgcaguaaaaaacaacaacaaugaagaaccauccgacaaacacauagaacaauaccuaaaaacaauacaaaacucacucuccaccgaauggucaccaugcagcguaacaugcggcaacggaauacaaguaagaauaaaaccaggaucagcaaacaaaccgaaagaucaacuagacuacgaaaacgacauagaaaaaaaaauaugcaaaauggaaaaaugcagcucaguauuuaacguagucaacagcucaauaggacuaauaaugguauuaucauuccuauuccuaaacuaa

SEQ ID NO: 5523 - RNA, 1143 nt, Artificial Sequence
  derived and/or modified CDS sequence (opt6) from Pf(Asembo Bay)__AAN87610.1__CSP
augaugagaaaacuagcaauacuaucuguaucaucauuccuauucguagaagcacucuuccaagaauaccaaugcuacggcagcucaucaaacaccagaguccuaaacgaacuaaauuacgacaacgcaggaacaaaccucuauaacgaacuagaaaugaacuauuacggaaaacaagaaaauugguacucacuaaaaaaaaauucacgcucacucggagaaaacgacgacggaaacaacaacaauggagacaacggaagagaaggcaaagaugaagacaaacgagacggaaauaacgaagacaacgaaaaacuacgaaaaccaaaacacaaaaaacuaaaacaacccggagacggaaaccccgacccaaacgcaaauccaaacguagauccaaacgcaaacccaaacguagaccccaacgcaaacccuaacgucgacccaaacgcaaacccaaacgcaaauccaaacgcuaacccaaaugcaaacccaaacgcaaacccaaacgcaaacccaaacgcaaacccaaacgcaaacccaaacgcaaaccccaacgcaaacccaaacgcaaacccaaacgcaaauccaaacgcaaacccaaaugcaaacccuaacgcaaacccaaacgcaaacccaaaugcaaacccaaacgcuaacccaaacgcaaaccccaacgcuaaccccaacgcaaacccaaacgcaaauccaaacgcaaaccccaacgcaaauccaaacgcaaaccccaacgcaaacccaaacgcaaauccaaauaaaaacaaucaaggaaacggacaaggacauaacaugccaaacgaccccaacagaaacguagacgaaaacgcaaaugcaaacaaugcaguaaaaaauaacaacaacgaagaaccaucagauaaacauauagaacaauaccuaaacaaaauaaaaaauucuauaucaacagaauggucaccaugcucagucacaugcggaaacggaauacaaguaagaauaaaacccggaucagcaaacaaaccaaaagaccaacuagacuacgcaaaugacaucgaaaaaaaaauauguaaaauggaaaaauguucaaguguauucaacguaguaaacucaucaaucggacuaauaaugguccuaucauuccuauuucucaacuag

SEQ ID NO: 5524 - RNA, 1143 nt, Artificial Sequence
  derived and/or modified CDS sequence (opt6) from Pf(India)__AAN87619.1__CSP
augaugagaaaacuagccauacuuucaguaucaucauucuuauucguagaagcauuauuccaagaauaccaaugcuauggaucauccucaaacacaagaguacuaaacgaacuaaacuacgacaacgcuggaacaaaccucuacaacgaacuagaaaugaauuacuacggaaaacaagaaaacugguacagccuaaaaaagaacucaagaucacuaggcgaaaacgaugacggaaauaacaacaacggcgauaacggacgcgaaggaaaagacgaagacaaacgagacggcaauaacgaagacaaugaaaaacuaagaaaaccaaaacacaaaaaacucaaacaaccuggcggagacaacccugauccaaacgcaaauccaaaugcaaacccaaacgcaaacccaaacgcuaauccaaacgcaaacccaaacgcaaacccaaacguagacccaaacgcaaacccaaacgcaaacccaaacgccaacccaaaugcaaauccaaacgcaaacccaaacgccaaccccaacgcaaacccaaacgcaaacccgaacgcaaacccaaacgcaaacccaaacgcaaauccaaaugccaauccaaacgccaaccccaaugccaacccaaacgcaaacccaaacgccaacccaaacgcaaaccccaacgcaaacccaaacgcaaacccaaaugcaaaccccaacgcaaacccaaacgcaaacccaaacgcaaacccaaacgcaaacccaaacgcaaacccaaacgcaaacccaaacaaaaauaaccaaggaaacggacaaggacacaacaugccaaacgaccccaacagaaacguagacgaaaacgcaaacgcaaacaacgcaguaaaaaacaauaacaacgaagaaccauccgacaaacacauagaacaauacuuaaaaaaaauacaaaacucacucucaacagaauggucaccaugcucaguaacaugcggaaacggcauacaaguaagaauaaaaccuggaucagcaaacaaaccaaaagacgaauuagacuacgaaaacgacauagaaaaaaaaauaugcaaaauggaaaaaugcucaucaguauuuaacguagucaacucaucaauaggacuaauaaugguccuaucauuccucuuccuaaacuaa

SEQ ID NO: 5525 - RNA, 1107 nt, Artificial Sequence
  derived and/or modified CDS sequence (opt6) from Pf(India)__AAN87617.1__CSP
augaugcgaaaacucgcaauacuaucaguaucaucauucuuauuuguagaagcccuauuccaagaauaccaauguuacggaucaucaagcaacacaagaguauuaaaugaauuaaacuacgacaacgcaggaacaaaccuauacaacgaauuagaaaugaacuacuacggaaaacaagaaaacugguacagucuaaaaaaaaacucacgaucauuaggagaaaacgaugacggaaauaacaacaacggagauaacggacgagaaggaaaagacgaagacaaacgagacggaaacaacgaagacaacgaaaaacuaagaaaaccaaaacacaaaaaacuaaaacaaccaggaggagacaacccagacccaaacgcaaacccaaauguagacccaaacgcaaacccaaacgcaaacccaaacgcaaaccccaaugcaaacccaaaugccaacccaaacgccaacccaaacgcaaacccaaacgcaaauccaaaugcaaacccaaaugcaaauccaaacgcaaauccaaaugcaaacccaaacgcuaauccaaacgcaaaucccaaugcaaacccaaacgcaaacccaaacgcaaauccaaacgcaaacccaaaugcaaacccaaacgcaaacccaaacgcaaacccaaacgcaaacccaaacgcaaaccccaacgccaaccccaacgcaaacccaaacgcaaacccaaacgcaaacccaaacgcaaacccaaacaaaaacaaccaaggaaacggacaaggacacaacaugccaaacgacccaaauagaaacgucgacgaaaacgcaaaugcuaacaacgcaguuaaaaacaacaacaacgaagaaccaucagacaaacacauagaacaauaccuaaaaaaaauacaaaacucacuaucaacagaauggucaccaugcucaguaacaugcggaaacgguauacaaguaagaauaaaaccaggauccgcaaacaaaccaaaagacgaacucgacuacgaaaacgacauagaaaaaaaaauaugcaaaauggaaaaaugcuccucaguauucaacguaguaaauucaucaaucggacucauaaugguacuaucauuccuauucuuaaacuaa

SEQ ID NO: 5526 - RNA, 1095 nt, Artificial Sequence
  derived and/or modified CDS sequence (opt6) from Pf(India)__AAN87616.1__CSP
augaugagaaaacuagcaauacuaucaguaucaagcuuccuauucguagaagcacuauuccaagaauaccaaugcuacggaagcucaucaaacacaagaguccuaaacgaacuaaacuacgacaacgcaggaacaaacuuauacaacgaacuagaaaugaacuacuacggaaaacaagaaaacugguacagccuaaaaaaaaacucaagaucacuaggagaaaacgacgacggaaauaauaauaacggagacaacggcagagaaggaaaagacgaagacaaacgagacggcaacaacgaagauaacgaaaaacuaagaaaacccaaacacaaaaaacuaaaacaaccaggaggagacaauccagacccaaacgcaaacccaaacgucgacccaaacgccaacccaaacgcaaacccaaacgcaaacccaaacgcaaauccaaaugcaaacccaaacgcaaacccaaacgcaaacccaaacgcaaacccaaacgcaaacccaaacgcaaauccaaacgcaaacccaaacgcaaacccaaacgcaaacccaaaugccaacccaaacgcaaauccaaacgcaaaccccaacgcaaacccaaacgcaaacccaaacgcaaacccaaacgcaaaucccaaugcaaacccgaaugcaaacccaaacgcaaacccaaacgcaaacccaaacgcaaauccaaacgcaaacccaaaugcaaacccaaacaaaaauaaccaaggaaacggacaaggacacaacaugccaaaugacccaaacagaaauguagaugaaaacgcaaacgccaacaaugcagucaaaaauaacaacaacgaagaaccaucagacaaacacauagaacaguacuuaaaaaaaauccaaaauucucuaucaacagaguggucaccauguucaguaaccugcggaaacggaauacaaguaagaauaaaaccaggaucagcaaacaaaccaaaagacgaacuagacuacgaaaacgauauagaaaaaaaaauaugcaaaauggaaaaaugcucaucaguauucaacguaguaaacaguucaauaggacuaauuaugguacucucauucuuauuccuaaacuaa

SEQ ID NO: 5527 - RNA, 1092 nt, Artificial Sequence
  derived and/or modified CDS sequence (opt6) from Pf(Bolivar)__AAN87600.1__CSP
augaugagaaaacuagcaauacuuucaguaucaucauucuuauucguagaagcauuauuccaagaauaccaaugcuacggaucauccucaaacacaagaguacuaaacgaacucaacuaugacaacgcaggaaccaacuuauacaacgaacuagaaaugaacuacuacggaaaacaagaaaacugguacucccuaaaaaaaaacagcagaagccuuggagaaaacgacgacggaaacaauaacaacggcgacaacggacgcgaaggaaaagacgaagacaaaagagauggaaacaacgaagacaacgaaaaacuuagaaaaccaaaacauaaaaaacucaaacaaccagcugauggaaacccagaucccaaugcaaacccaaacguagaucccaaugcaaacccaaauccaaacgccaacccaccaaacgcuaauccaaacgcaaacccaaacgcaaaccccaacgcaaacccaaacguagaccccaacgcaaaccccaacgcaaacccaaaugcaaauccaaacgcaaacccaaaugcaaacccaaacgcaaacccaaacgcaaauccaaacgcaaacccaaacgccaacccuaacgcaaacccaaacgcaaaccccaacgcaaacccaaacgcaaacccaaacgcaaacccaaacgcaaacccaaacgcaaaccccaacgcaaacccaaacgcaaacccaaacgcaaauccaaacaaaaacaaucaaggaaacggacaaggacacaacaugccaaacgacccaaacagaaauguagacgaaaacgcaaacgcaaauaacgcaguaaaaaacaacaacaacgaagaaccaucagacaaacacauagaacaauacuuaaacaaaauccaaaacucacuaucaacagaauggucacccugcucagugacaugugguaacggaauacaaguaagaaucaaaccaggaucagcaaacaaaccaaaagaucaauuagacuacgcaaacgacauagaaaaaaaaaucugcaaaauggaaaaaugcucauccgucuucaacguaguaaauucaucaaucggacuuauaaugguccuaucauuccuauuccuaaauuaa

SEQ ID NO: 5528 - RNA, 1083 nt, Artificial Sequence
  derived and/or modified CDS sequence (opt6) from Pf(Asembo Bay)__AAN87597.1__CSP
augaugagaaaacuagcuauacuuuccguauccucauuccuauucguagaagcauuauuccaagaauaccaauguuauggauccucaucaaauacccgaguacuaaaugaauuaaauuacgacaacgcaggaacaaauuuauacaacgaacuagaaaugaacuauuacggaaaacaagaaaacugguauucacucaaaaaaaacucacgaucacuaggagaaaacgacgauggaaauaacaacaacggcgacaacggcagagaaggaaaagacgaagacaaaagagacggaaacaacgaagacaacgaaaaacuaagaaaacccaaacacaaaaaacuaaaacaaccagcagacggaaacccagauccaaacgcaaacccaaacguagacccaaacgcaaacccaaacgcaaaccccaacgcaaacccaaacgcaaacccaaacgcaaaccccaacgcaaaccccaacguagacccaaacgcaaacccaaacgcaaacccaaacgcaaauccaaacgcaaacccaaaugcaaacccaaacgcaaacccaaacgcaaacccaaacgcaaauccaaacgcaaacccaaacgcaaacccaaacgccaacccaaacgcaaacccaaacgcaaaccccaacgcaaaccccaaugcaaacccaaacgcaaauccaaaugcaaacccaaacgcaaacccaaacgcaaacccaaacaaaaauaaucaaggaaacggacaaggacacaacaugccaaacgacccaaacagaaauguagacgaaaaugcaaacgcaaacaacgcaguaaaaaacaacaacaacgaagaaccaucagauaaacacaucaaagaauaccuaaaaauaauaccaaacucacuaucaacagaauggucaccaugcagugucacaugcggaaacggaauacaaguacgaauaaaaccaggaagugcaggaaaacccaaagacgaacucgacuacgcaaacgacauagaaaaaaaaaucugcaaaauggaaaaaugcucaucaguauucaacguaguuaacucaucaauaggacuaauaaugguauuaucauucuuauucuuaaacuaa

SEQ ID NO: 5529 - RNA, 1083 nt, Artificial Sequence
  derived and/or modified CDS sequence (opt6) from Pf(Asembo Bay)__AAN87596.1__CSP
augaugagaaaacuagcaauacuuucaguaucaagcuuucuauuugucgaagcauuauuccaagaauaucaaugcuacggcuccuccucaaacaccagaguacuaaacgaacucaacuacgauaacgcaggaacaaaccuauacaacgaauuagaaaugaacuauuacggcaaacaagaaaacugguauucacuaaaaaaaaacucaagaagccuaggugaaaacgacgacggaaacaacaacaauggagauaacggaagagaaggaaaagacgaagacaaaagagacggaaacaacgaagacaaugaaaaacuaagaaaaccaaagcacaaaaaacuaaaacaaccagcagacggaaacccagacccaaacgcaaacccaaacgucgacccaaacgcaaacccaaacgcaaacccuaacgccaauccaaacgccaacccaaacgcaaacccaaacgccaauccaaacguagacccaaacgcaaauccaaacgcaaauccaaacgcaaacccaaacgcaaacccaaaugcaaacccaaacgcaaacccaaacgcaaacccaaaugcaaacccaaacgccaacccaaacgcaaaccccaacgcaaaccccaacgcaaacccaaacgcaaacccaaaugcaaacccaaacgcaaacccaaaugcaaaccccaacgcaaauccaaacgcaaacccaaaugcaaacccaaacaaaaauaaccaaggaaacggacaaggacacaacaugccaaacgacccaaaccgaaacguagacgaaaacgcaaacgcaaacaacgcaguuaaaaacaacaacaacgaagaaccaucagacaaacacauaaaagaauaccuaaaaauaauacaaaacucucuaucaacagaauggucaccaugcuccguaacaugcggcaacggaauacaaguaagaaucaaacccggaucagcaggcaaaccuaaagaugaacuagacuacgcaaacgacauagaaaaaaaaauaugcaaaauggaaaaaugcuccagcguauucaacguaguaaauucaucaaucggacuaauaaugguacuaucauuccuauuucuaaacuaa

SEQ ID NO: 5530 - RNA, 1071 nt, Artificial Sequence
  derived and/or modified CDS sequence (opt6) from Pf(India)__AAN87615.1__CSP
augaugagaaaauuagcaauccuaucaguaucaagcuuccuauucguagaagcucuauuccaagaauaccaaugcuacggaucaucguccaacacaagaguacuaaacgaacuaaacuacgacaaugcaggaacaaaucuauacaacgaacuagaaaugaacuacuacggaaaacaagaaaacugguacagccuaaaaaaaaacucccgaucauuaggugaaaacgacgacggaaacaauaacaacggcgacaacggaagagaaggaaaagacgaagacaaaagagacggaaauaacgaagacaacgaaaaacuaagaaaacccaaacacaaaaaacuaaaacaaccaggcgacggaaauccagacccaaacgcaaacccaaacguagacccaaacgcaaacccaaacgcaaacccaaacgcaaacccaaaugccaacccaaacgcaaacccuaacgcaaacccaaacgccaacccaaacgcaaauccaaaugcaaaccccaacgcaaauccaaaugcaaacccaaaugcaaacccaaauguuaauccaaacgccaacccaaacgcaaacccaaaugcaaacccaaaugcaaacccaaaugcaaacccaaaugcaaacccaaacgcaaacccaaacgcaaacccaaacgcaaauccaaacgcaaacccaaacgcaaauccaaaugcaaacccaaacaaaaacaaccaaggaaacggacaaggccacaacaugccaaacgacccaaauagaaaugucgacgaaaacgcaaacgucaacaacgcaguaaaaaacaacaauaacgaagaacccucagauaaacacauagaacaauaccucaaaaaaauccaaaacucacuaucaacagaauggucgccuugcucaguaaccugcggaaacggcauacaaguaagaauaaaaccaggauccgcaaauaaaccaaaagacgaauuagacuacgaaaacgacauagaaaaaaaaauaugcaaaauggaaaaaugcucaucaguauucaacguaguuaacucaucaauaggacuuauaaugguacuaucauucuuauucuuaaacuaa

SEQ ID NO: 5531 - RNA, 1110 nt, Artificial Sequence
  derived and/or modified CDS sequence (opt6) from Pk(UMMAC6)__AHF20622.1__CSP
augaagaauuuuauacuacuggcaguaaguaguauucuacuaguagauuuauuaccuacacauuuugaacauaauguagauuuaucaagggcuauaaauguaaauggagugaguuuuaauaauguggauacaucgaguuuaggugcagcacaaguaagacaaagugcgucaagaggaagaggacuuggagaaaaaccaaaggaaggggcagauaaagaaaaaaaaaaagaaaaagaaaaagaaaaagaagaagaaccaaaaaaaccaaaugaaaauaaacuaauacaaccagaacaaccagcggcaggggcaggaggagaacaaccagcggcaggugcaggaggugaacaaccagcagcaggagcaggaggagaacaaccagcagcaggagcaggaggagaacaaccggcagcaggagcugggggagaacaaccggcugcaggagcaagaggagaacaaccagcagcaggugcaggaggagaacaaccagcagcaggagcaggaggagaacaaccagcggccggagcuggcggagagcaaccagcggcaggagcaggaggugaacaaccagcagcaggagcaggaggagaacaaccagcagcaggagcaagaggagaacaaccagcagcaggagcaggaggugaacaaccagcugcaggagcaggaggagagcaaccagcaccagcuccaaggagagaacaaccggcugcuggagcaggaggagaacaaccagcaccagcaccacgaagagaacaaccagcaccaggagcaggggcaggagacggagcgagaggaggaaaugcaggagcagguaaaggacagggacaaaauaaucaaggagcaaauguaccaaaugaaaaaguagugaaugauuacuuacauaaaauaagaaguagcguuacgacggaauggacaccauguagcguaacauguggaaauggaguaagaauaagaagaaaaggacaugcaggaaauaaaaaagcggaagauuugacgauggaugacuuagaaguugaagcgugcguaauggauaaaugcgcaggaauauuuaaugucguaucaaauagcuuaggauugguaauauuauuaguacuagcacucuuuaauuag

SEQ ID NO: 5532 - RNA, 1092 nt, Artificial Sequence
  derived and/or modified CDS sequence (opt6) from Pk(H (SL1_PK))__XP_002259002.1__CSP
augaaaaauuuuauauuacuagcaguaagcucaauauuacuaguagacuuguuaccuacacauuucgaacauaauguagaucuaucaagagcaauaaacguaaacggaguaaguuuuaauaauguagauaccucaagccuaggcgcugcccaaguaaggcaaucagcaaguagaggaagaggucucggagaaaaaccaaaagaaggugcagauaaagaaaaaaaaaaagaaaaaggaaaagagaaagaagaagaaccaaaaaaaccuaacgaaaacaaacuaaaacaaccaaacgaaggacaaccacaagcacaaggagauggagcgaacgcuggacaaccacaagcacaaggagauggagcaaacgcaggccaaccacaagcacaaggagauggagcaaacgcaggacaaccacaagcacaaggagauggagcgaaugcaggacaaccacaagcacaaggagauggagcaaacgcaggacaaccccaagcacaaggagauggagcaaacgcaggacaaccacaagcacagggagauggagcaaaugcaggacaaccucaagcgcaaggagauggagcaaaugcaggacaaccacaagcucaaggugacggagcaaacgcaggacaaccacaagcacaaggagauggagcaaaugcuggacaaccacaagcacaaggagauagagcaaaugcaggacaaccacaggcacaaggagacggagcaaacguaccaagacaaggaagaaauggaggaggggcaccagcaggaggaaaugaaggcaauaaacaagcaggaaaaggacaaggacaaaauaaccaaggagcaaacgcaccaaaugaaaaaguaguaaacgauuaccuacauaaaauaagaagcagcgucacgacagaauggacgccauguagcguaacauguggaaacggaguucgaauacgcagaaaagcacacgcaggaaauaaaaaagcggaagacuuaacaauggacgauuuagaaguagaagcauguguaauggacaaaugcgcaggaauauucaauguaguaagcaauagcuuaggacuaguaauuuuauuaguauuagcacuauuuaauuaa

SEQ ID NO: 5533 - RNA, 1443 nt, Artificial Sequence
  derived and/or modified CDS sequence (opt6) from Pk(SGEHIH2-im-Y09-12)__AFD97213.1__CSP
augaagaauuuuauauuacuagcgguaagcucaauacuauuaguagaucuauuaccaacgcauuuugaacauaauguagacuuaaguagagcaauaaaugugaauggaguaaguuuuaauaauguagauacgaguucgcuaggagcggcacaagugagacaaagugcaucaaggggaagagggcuaggagaaaaaccaaaagaaggagaugauaaagaaaaaaaaaaagaaaaagaaaaagaagaagaacccaaaaaauuaaaugaaaauaauccaaaaaaaccgaaugaagaaggggauggagcaaaauuaaaacaaccaaacgaagaaggagacggagcaaaauuaaaacaaccaaaugcagaaggaggagcuaaacuuaaacaaccaaacgcagaaggaggagcaaaugcaggacaaccuaaugcagaaggaggggcaaaugcaggacagccaaacgcagaaggaggagcgaaugcaggacaaccaaaugcaggaggugcaaaugcuggccaaccaaaugcagaagggggugcgaacgcaggacaaccaaaugcugaaggaggcgcaaaugcaggacaaccaaaugcagaaggaggggcaaacgcacggcaaccaaaugcagaagguggagcaaaugcaagacaaccgaaugcagagggaggugcaaacgcuggacaaccaaacgcagaagggggagcaaacgcgggacaaccaaaugcagagggaggggcaaaugcaggacaaccaaaugcagaagggggagcaaacgcaagacaaccaaacgcagaaggaggagcuaaugcgggacaaccgaacgcagaagggggagcaaaugcgggacaaccaaaugcagaagggggagcaaaugcaggacaaccaaacgcagaaggaggagccaaugcaggucagccaaaugcagaaggaggagcaaaugcaagacaaccaaacgcagaagggggagcaaaugcaggacagccaaaugcagaaggaggagcaaaugcaggacaaccaaaugcugagggaggagcgaaugcaagacaaccacaggcagaaggaggaggggcaaaugcuagacaaccacaagcugaagguggaggagcaaaugcaaggcaagggggaaaugaaggaaacaagcaagcaggaaaaggacaaggacaaaacaaccagggugcaaacgcgccaaaugaaaaaguaguaaaugauuaucuacaaaaaauaagaucaagugugacaauagaauggacacccuguaguguuacaugcggaaauggaguaagaauacgaaggcgagcccaugcagauaaaaaaaaagcagaagaucuaacaauggaugauuuagaggucgaagcauguguaauggauaaaugcgcaggaauauuuaauguaguaagcaacaguuuaggacuaguaauauuauuaguucuagcauuauuuaauuaa

SEQ ID NO: 5534 - RNA, 1320 nt, Artificial Sequence
  derived and/or modified CDS sequence (opt6) from Pk(NB028)__AFG25469.1__CSP
augaaaaauuucauuuuauuagcaguaucaagcauacuguuaguagaucuauuaccaacccauuucgaacauaacguagauuuaaguagagccauaaauguaaauggaguaucauucaauaauguagauacaaguagcuuaggggcggcacaagugagacaaagugcaaguagaggaagaggauugggugaaaaaccaaaagaaggagaugauaaagagaaaaagaaagaaaaagaaaaagaagaagaaccuaaaaaucugaacgaaaacaaaccaaaacagccaaaugcagaaggagauggagcuaaauuaaaacaaccaaaugcagaaggagauggagcaaaauuaaaacaaccacaagcggaaggagauggagcaaaugcaagacaaccacaagcggaaggaaauggagcaaaugccagacaaccgcaagcagaaggagacggugcaaacgcuagacaaccacaagcugaaggagauggagcgaaugcuagacaaccacaagcagaaggggauggggcaaaugcuagacaaccacaagcggaaggagauggagcaaaugcuagacaaccacaagcugaaggagauggagcaaaugcaagacaaccgcaagcagaaggcgauggagcaaacgcaagacaaccacaagcagaaggaggaggagcaaacgcacgacaaccacaggcagaaggagacggagcaaaugcaagacaaccacaggcagaaggagauggugcaaaugcgagacaaccacaagcagaaggagacggagcaaaugcaagacaaccacaagcagaaggagauggagcgaacgcacggcaaccacaagcagaaggugauggagcaaaugcaagacaaccgcaagcagaaggaggaggagcaaaugcaaggcaaccgcaagcagaaggagauggagcaaacgcaaggcaagcacaagcacaaggagauggaggaaaugcuagacaaggagggaauggaggaggagcaccagcaggaggaaaugaaggaaauaaacaagcaggaaaaggacaaggccaaaacaaucaaggagcgaacgcaccaaaugaaaaagugguaaaugacuauuuacagaaaauaagaaguucuguaacaacagaauggacuccguguaguguaacaugcggaaacggagugagaauaagaagaagggcgcaugcagauaaaaagaaagcagaagaacugacgauggaugaccuagaaguagaagcaugcguuauggauaaaugugcaggaauauuuaacguagugucaaacagucuggggcuaguaauacuauuaguauuagcacuauuuaacuaa

SEQ ID NO: 5535 - RNA, 1278 nt, Artificial Sequence
  derived and/or modified CDS sequence (opt6) from Pk(SGEHIH1-im-Y09-102)__AFD97209.1__CSP
augaaaaauuuuauauuguuagcaguaucaaguauuuuacuaguagauuuacuaccaacacauuucgaacauaauguagaucuaagcagagcgauaaauguaaauggaguaagcuucaacaauguggacacaaguagcuuaggagcggcacaagugagacaaagugcaagucgagguagaggacuaggagaaaaaccaaaagaaggagacgauaaagagaaaaaaaaagagaaggagaaagaagaagaaccaaaaaaauuaaacgaaaacaauccaaaaaaaccaaaugaagaaggagauggagcaaaauuaaaacaaccaaaugaagaaggagauggagccaaacucaaacaaccaaaugcagaaggaggagcgaaauuaaaacaaccaaaugcagaaggaggagcaaacgcaggacaaccaaaugcagaaggaggagcgaacgcgggacaaccuaaugcugaaggaggagcaaaugcaggacaaccaaaugcaggaggggcaaaugcaggacaacccaaugcagagggaggggcaaacgcaggacaaccaaaugcggaaggaggagcgaacgcaggacaaccaaaugcagaaggaggagcaaaugcaagacaaccaaaugcagaaggaggugcaaaugcaagacaaccaaaugcagaaggaggagcaaacgcaggacaaccaaaugcggaagguggagcgaaugcaggacaaccaaaugcagaaggcggagcuaaugcggggcaaccaaaugcagaaggcggagcaaaugcuagacagccaaaugcagaaggaggagcaaaugcaggacaaccaaacgcagaaggaggggcaaaugcugggcaaccaaaugcagaaggaggagcaaacgcgagacaaccacaggcggaagggggaggagcaaaugcaagacaaccucaagcagaaggaggaggagcaaacgcaagacaaggaggaaaugaaggaaauaaacaagccgguaaaggacaaggacaaaauaaccaaggagcaaaugcaccgaaugagaaagucguaaaugacuaucuacaaaaaauaagaucuagcguaacgauagaauggacaccauguaguguaacauguggaaauggaguaagaauaagaagaagagcgcaugcagauaaaaaaaaagcagaggacuuaacaauggaugaucuagaaguagaagcauguguaauggauaggugugcaggcauauuuaauguaguaaguaauaguuugggauuaguaauacuacuaguauuagcauuauuuaauuaa

SEQ ID NO: 5536 - RNA, 1278 nt, Artificial Sequence
  derived and/or modified CDS sequence (opt6) from Pk(SGEHIH1-im-Y09-17)__AFD97205.1__CSP
augagaaauuucauauuacuagcaguuucaaguauauuguuaguagauuuauuaccaacacacuuugaacauaauguagaucuaagcagagcaauaaauguaaauggagugucguucaauaauguggauacaagcagcuuaggagcagcucaaguaagacaaagugcaucaaggggaagaggauuaggagaaaaaccgaaagaaggagaugauaaagagaaaaagaaagaaaaagaaaaggaagaagaaccgaagaaauuaaacgaaaacaauccuaagaaaccaaaugaagaaggugauggagcgaaauuaaaacaaccaaaugaagaaggagauggagcgaaauugaaacaaccgaaugcagaaggaggggcaaaauuaaaacaaccaaaugcagaagggggagcaaaugcaggacaaccaaaugcagaaggaggagcaaacgcaggacaaccaaaugcagaaggaggagcaaaugcaggacaaccaaaugcaggaggagcaaacgcagggcaaccgaaugcggaaggaggggcaaaugcaggacaaccaaaugcagaaggaggagcaaacgcaggucaaccaaaugcagaaggaggagcaaacgcaagacaaccaaaugcagaaggaggagcaaaugcgaggcaaccuaaugcagaagggggagcaaaugcaggacaaccaaacgcagaaggaggagcgaaugcagggcaaccaaaugcggaagggggagcgaaugcagggcaaccaaaugcagaaggaggagcaaaugcaagacaaccaaaugcagaagguggagcaaaugcaggacaaccgaaugcagaaggaggcgccaacgcagggcaaccaaaugcagaaggaggggcaaaugcaagacaaccacaagcagaaggaggaggggcaaaugcaagacaaccucaagcagaaggugguggagcaaacgcaagacaaggaggaaaugaaggaaauaaacaagcaggaaaaggucaaggucaaaacaaucaaggagcgaaugcaccaaacgaaaaaguaguaaacgauuauuuacagaaaauaagaaguaguguaacaauagaauggacgccaugcagcguuacaugugguaauggaguaagaauaagaagacgagcacacgcagauaaaaagaaagcagaagaucuaacaauggaugaucuagaaguagaagccugcguaauggacaaaugugcaggaauauuuaacguaguaucaaauagucugggucuaguaauauuauuaguauuagcauuauuuaauuaa

SEQ ID NO: 5537 - RNA, 1278 nt, Artificial Sequence
  derived and/or modified CDS sequence (opt6) from Pk(SGEHIH1-im-Y09-25)__AFD97206.1__CSP
augaaaaauuucauacuauuagcaguaucaucaauauuacuaguagauuuauuaccaacacauuuugaacauaauguagaucuaucaagagcgauaaacguaaaugggguaaguuuuaauaauguagauacgaguaguuuaggggcagcacaaguaagacaaucggcaagcagaggaagaggguuaggagaaaagccaaaagaaggggaugauaaagaaaaaaaaaaagaaaaagaaaaagaagaagaaccaaaaaaauuaaaugaaaauaauccaaaaaaaccaaaugaagaaggagauggagcaaaauuaaaacaaccaaaugaagaaggagauggagcaaaauuaaaacaacccaaugcagaagggggggcaaaauugaagcaaccaaacgcagaaggaggagcaaaugcgggacaaccaaacgcagaaggaggggcaaaugcaggucaaccaaacgcagaagguggagcaaaugcaggacagccaaaugcgggaggggcuaaugcgggacaaccuaacgcagaaggaggagcaaacgcaggacaaccaaaugcugaaggaggagcaaaugcaggacaaccgaaugcagaaggaggugcaaaugcaagacaacccaacgcagaaggaggggcaaaugcaagacaaccaaaugcagagggaggagcaaaugcaggacaaccaaaugcagaaggaggagcaaaugcaggacaaccaaacgcggaaggaggagcuaaugcagggcaaccaaaugcagagggcggagcuaaugcaagacaaccaaaugcagaaggaggagcaaaugcgggacaaccaaaugcggaaggaggagcuaaugcaggacaaccaaacgcagaaggaggagccaacgcacgacaaccacaagcugaaggaggaggagcaaaugcacgacaaccacaagcagagggaggaggagcaaacgcaagacaaggaggaaaugaaggaaacaaacaggcagguaaaggacaaggacaaaauaaucaaggagcaaaugcaccaaacgaaaaaguggugaacgacuauuugcaaaaaauaagaagcaguguuacuauagaauggacaccaugcagcguaacuugcggaaacggaguaagaauaagaagaagagcacaugcggacaaaaagaaagcagaagauuuaaccauggaugauuuagaaguagaagcaugcguaauggacaaaugugcaggaauauucaauguaguaaguaauucauuaggauugguaaucuuauuaguauuagcacuauuuaauuaa

SEQ ID NO: 5538 - RNA, 1278 nt, Artificial Sequence
  derived and/or modified CDS sequence (opt6) from Pk(SGEHIH2-im-Y09-11)__AFD97212.1__CSP
augaaaaauuucauauuauuggcaguaucaucaauauuauugguagauuuacuaccaacacauuuugaacacaauguagauuuaagcagggcaauaaaugugaaugggguuaguuucaauaauguggauacaucaagcuuaggagcagcgcaaguaaggcaaagugcaaguagaggaagagguuuaggagaaaaaccgaaagagggagaugauaaagaaaaaaaaaaagaaaaagaaaaagaagaagaaccgaagaaacuaaacgaaaauaauccaaaaaaaccaaaugaagaaggagauggagcaaaacuaaaacaaccuaaugaagaaggagauggugcaaaacuaaaacaaccaaacgcggaaggaggugcaaaacuaaaacagccgaaugcagaaggaggggcaaaugcaggacaaccaaacgcagaaggaggggcaaacgcaggacaaccaaaugcggaaggaggagcaaaugccgggcaaccaaaugcgggaggagcaaaugcaggacaaccaaaugcagaaggaggagcaaaugcaggacaaccgaaugcagaagggggggcaaaugcaggucaaccaaacgcagaaggaggagcaaaugcaagacaaccaaaugcagaaggaggagcaaacgcaagacaaccaaaugcagaaggaggagcaaacgcagggcaaccaaaugcggaaggaggagcaaaugccggacaaccuaacgcggaaggaggagcaaacgcgggucaaccaaaugcagaagggggagcaaaugcaagacagccaaaugcagaaggaggagcgaacgcaggucaaccaaaugcagaaggaggagccaacgcaggacaaccaaacgcagaaggaggagcaaacgcacgacagccacaggcagaaggaggaggagcaaaugcaagacaaccacaagcagaaggaggaggagcaaaugcacgacaaggaggaaaugaaggaaacaaacaagcaggaaaggggcaaggacaaaacaaucaaggagcaaacgcuccaaaugaaaaaguuguaaaugauuauuuacaaaaaauaagaaguaguguaacaaucgaauggacaccauguaguguaacuuguggcaauggaguaagaauaagaagaagagcacaugcugauaaaaaaagggcagaagaucuaacaauggaugaucuagaaguagaagcauguguaauggauaaaugugcagggauauucaauguuguaaguaacaguuugggucugguaauacuauuaguguuagcuuuauuuaauuaa

SEQ ID NO: 5539 - RNA, 1278 nt, Artificial Sequence
  derived and/or modified CDS sequence (opt6) from Pk(SGEHIH2-im-Y09-18)__AFD97214.1__CSP
augaaaaauuuuauauuacuagcggugaguaguauauuacuaguggacuugcuaccaacacacuuugaacacaacguagauuuaacaagagcaauaaauguaaauggagucucauuuaacaacguggauacaagcucauuaggagcagcacaaguaagacaaagugccucacgaggaaggggauuaggagaaaaaccaaaagagggcgacgauaaagaaaaaaaaaaagaaaaagaaaaagaagaagaaccaaaaaaauugaacgaaaauaacccuaaaaaaccaaaugaagaaggugauggagcgaaauugaaacagccaaaugaagaaggggauggagcgaaacuaaaacaaccaaaugcagaaggaggagcuaaauugaaacaaccgaaugcagaaggaggagcaaaugcaggacaaccaaaugcagaagguggagcaaaugcaggacaaccaaaugcagaaggaggagcaaaugcaggacaaccaaacgcagggggagcaaaugcaggacaaccaaacgcagaaggaggagcaaacgcaggacaaccaaaugcagaaggaggagcaaaugcaggacaaccaaaugcagaaggaggagcuaaugcaagacaaccaaaugcagaaggaggagcaaaugcaagacaaccaaaugcagaaggaggagcaaaugcaggacaaccgaaugcagaaggaggagcaaaugcaggacaaccaaacgcagaaggaggcgcaaacgcaggucaaccaaacgcagaaggaggagcaaaugcaagacaaccaaacgcugaaggaggagcaaaugcaggccaaccgaaugcagaagggggagcaaacgcagggcaaccgaaugcagaaggcggagcaaaugcgcgacaaccacaagcagaaggaggaggagcaaaugcaagacaaccacaagcagaaggagggggagcaaacgcaagacaaggaggaaacgaaggaaauaaacaagcaggaaagggacagggacaaaauaaucaaggagcgaaugcaccaaaugaaaaaguaguaaacgauuauuuacaaaaaauaagaaguagcguaacaauagaauggacaccauguucaguaacauguggaaauggaguaagaauaaggagaagagcacacgcagauaaaaaaaaagcagaagaucuaacaauggaugauuuagaaguagaagcauguguaauggauaaaugugcaggaauauuuaauguaguaucaaacagucuagggcuaguaauacuacuaguguuagcauuauuuaauuaa

SEQ ID NO: 5540 - RNA, 1278 nt, Artificial Sequence
  derived and/or modified CDS sequence (opt6) from Pk(SGEHIH2-im-Y09-3)__AFD97210.1__CSP
augaaaaauuuuauauuauuagcgguaaguucaauauuacuaguggaccuauuaccaacacauuucgaacauaauguagauuuaaguagagcaauaaauguaaauggaguaucauuuaauaauguagacacaaguagcuugggggccgcacaaguaagacaaagugcaucaagaggaagaggacuaggggaaaaaccaaaggaaggagaugauaaagaaaaaaaaaaagaaaaagaaaaagaagaggaaccaaaaaaacuaaaugaaaauaacccgaaaaaaccaaaugaagaaggagacggagcgaaacuaaaacaaccgaaugaagaaggagauggagcaaaauuaaaacaaccaaaugcagaagggggagcaaaauuaaaacaaccaaaugcagaaggaggggcaaaugcaggacaaccaaaugcagaagggggagcaaacgcaggacaaccaaaugcugaagggggagcaaaugcaggacagccaaacgcaggaggugcaaaugcaggacaaccaaacgccgaaggaggagcaaaugcuggacagccaaacgcagaaggaggagccaacgccgggcaaccaaaugcagaaggaggagccaaugcaagacaaccaaaugcagaagguggggcaaaugcaagacaaccaaaugcaggaggaggagcaaacgcaggacaaccaaaugcagaagguggagcaaacgccggacaaccuaaugcagaaggaggagcaaaugcaggacaaccaaaugcagaaggaggagcuaaugcaagacaaccaaacgcagaaggaggggcaaaugcaggccaaccaaaugcagaaggaggagcgaaugcaggucaaccgaaugcagaaggaggagcaaaugcaaggcaaccacaagcagaaggaggaggagcaaaugcaagacaaccucaagcagaaggagguggggcgaacgcaagacaaggaggcaacgaaggaaauaaacaagcaggaaaaggacaaggacaaaauaaucaaggagcaaaugcaccuaaugaaaagguaguaaaugauuaccuacaaaaaauaaggucaaguguaacaauagaauggacaccuuguaguguaacauguggaaaugggguaagaauuagaagaagagcgcaugcagauaaaaaaaaggcagaagauuuaacaguagaugauuuagaaguagaagcaugugucauggauaaaugcgcaggaauauuuaaugugguaaguaacagcuuaggcuuaguaauauuauugguauuagcacuguucaauuaa

SEQ ID NO: 5541 - RNA, 1278 nt, Artificial Sequence
  derived and/or modified CDS sequence (opt6) from Pk(SGEHIH2-im-Y09-7)__AFD97211.1__CSP
augagaaauuucauacuauuggcgguaaguaguauuuuauuaguagauuuacuaccaacacauuuugaacauaauguugaccuaagccgagcaauaaauguaaauggaguuagcuuuaauaauguggacacaaguagcuuaggagcagcacaaguaaggcaaagugcaagcagagguagaggauuaggugaaaaaccaaaagaaggagaugauaaagaaaaaaaaaaagaaaaagaaaaagaagaagaaccaaaaaaauuaaacgagaauaauccaaagaaaccaaaugaagaaggagauggagcuaaauugaaacaaccaaaugaagaaggagauggagcaaaauuaaagcaaccgaacgcagaagggggagcaaaauuaaaacaaccaaaugcagaaggaggagcgaaugcaggacaaccaaaugcagaaggaggagcgaaugcaggacaaccgaaugcugaaggaggagcuaaugcgggacaaccaaaugcaggaggagcaaaugcagggcaaccaaaugcagaagguggagcaaaugcaggacaaccaaaugcagaagggggagcaaacgcgggacaaccaaacgcagagggaggagcaaaugcaagacaaccaaaugcagaagguggagcaaaugcuagacaaccaaaugcagaaggaggagcaaacgcaggacaaccaaaugcagaaggaggugcuaaugcaggacaaccaaaugcagaagguggagcaaacgcaggacaaccaaaugcagaagggggagcaaacgcaagacaaccaaaugcagaaggaggagcaaaugcugggcaaccaaaugcagaaggaggagcaaaugcuggacaaccaaacgcagaaggaggagcaaacgcgagacaaccucaagcagaagggggaggagcaaaugcaagacaaccacaagcagaagggggaggagcaaacgcaagacaaggaggaaaugagggaaauaaacaagcaggaaaaggacaaggucaaaacaaucaaggagcaaaugcaccaaaugaaaaaguaguaaaugauuaucuacaaaaaauuaggagcaguguaacgauagaauggacaccuuguagcguaacauguggaaauggaguaaggauaagaagaagagcacaugcagauaaaaaaaaagcugaagauuuaacaauggaugauuuagaaguagaagcauguguaauggauaaaugugcaggaauauuuaauguaguaucaaauacauuaggucuaguaauauuacuaguauuagcacuauuuaacuaa

SEQ ID NO: 5542 - RNA, 1278 nt, Artificial Sequence
  derived and/or modified CDS sequence (opt6) from Pk(UMNGC3)__AHF20628.1__CSP
augaaaaauuuuauacuacuagcaguaagcucaauauuauuaguagauuuacuaccaacacauuuugaacauaacguagauuuaucaagagcgauaaauguuaauggaguaaguuucaauaacguugauacaucaagucuaggagcagcacaaguaagacaaagugcaucaagaggaaggggguuaggagaaaaaccgaaagaaggagaugacaaagaaaaaaaaaaagaaaaagaaaaggaagaagagccaaaaaaauuaaaugaaaacaauccaaaaaaaccaaaugaagaaggugauggagcuaaacuagaacaaccaaaugaagaaggggauggagccaaauugaagcaaccaaacgaagaaggagauggagcaaaacucaaacaaccaaacgcagaagggggagcgaaauuaaaacaaccaaaugcagaaggaggagcaaaugcaggacaaccaaacgcggaaggaggagcaaaugcagggcaaccaaaugcagaaggaggagcaaaugcagggcaaccaaaugcaggaggagcuaaugcaggacaaccaaaugcagaaggaggagcaaacgcaggacaaccaaaugcugaaggaggagcaaacgcagggcaaccaaaugcagaaggaggagcaaacgcgggacaaccaaaugcagaagggggagcuaacgcaagacaaccaaaugcggaaggaggagcuaaugcaggacaaccaaaugcggaaggaggagcaaaugcgggacaaccaaaugcagaaggaggagcaaacgcaggacaaccaaaugcagaaggaggagcaaaugcgagacaaccaaacgcagaagggggagcaaaugcgggucaaccaaaugcagaaggaggagcaaaugcaggacaaccaaaugcagaaggaggagcaaacgcgagacaaccacaggcagagggaggaggugcgaaugcaagacaaggaggaaacgaagguaacaaacaagcaggaaaaggacagggacaaaauaaucaaggagcaaaugcaccaaacgaaaaaguaguaaaugauuauuugcaaaaaauuagaucaucagucacaauagaguggacaccauguagcguaacgugcggaaaugggguaagaauaagaagaagagcacacgcagacaaaaaaaaagcugaagacuugacaaugggagauuuagaaguagaagcauguguuauggauaaaugugcaggaguauucaauguaguaagcaauagcuuaggauugguaauacuauuaguauuagcacuauucaauuaa

SEQ ID NO: 5543 - RNA, 1275 nt, Artificial Sequence
  derived and/or modified CDS sequence (opt6) from Pk(prk-1)__ADX31295.1__CSP
augaaaaauuuuauauuauuagcaguaucaucaauuuuauuaguagacuuauuaccaacacauuucgaacacaauguagauuuaaguagagcaauaaauguaaaugggguuucauuuaauaauguagauacuaguagcuuaggagcagcacaaguaagacaaagugcaagcagaggaagaggauuaggugaaaaaccaaaagaaggagacgauaaagaaaaaaaaaaagaaaaagaaaaagaagaagaaccuaaaaaauuaaaugaaaauaacccgaaaaaaccgaaugaggaaggagauggagcaaaacuuaaacaaccagaugaagaaggagauggagcaaaauuaaaacaaccaaaugaagaaggagauggagcaaaauugaaacaaccaaaugcagaaggaggggcuaaauuaaaacaaccaaaugcagaaggaggagcaaaugcaggacaaccaaaugcagaaggaggagccaaugcaggacaaccaaaugcagaaggaggugcaaaugcaggacaaccaaaugcgggaggugcaaacgcaggacaaccaaaugcagagggaggugcgaaugcaggacaaccaaaugcagaaggaggggcaaacgcaggacaaccuaaugcagaaggaggagcuaaugcaggacaaccaaacgcagaagggggagcaaacgcaaggcaaccaaaugcagaagguggggcgaaugcaggacaaccaaaugcagaaggaggagcaaacgcaggacaaccaaacgcagaagggggagcaaaugcaggacaaccaaaugcagaagggggagcaaacgcgaggcaaccuaacgcagaaguagaacaaacacaagauaauagaaugcagaaaguagaacaaaugcaaacaacggaauguagaaguggaacaaaugcaagacaaccacaagcagaaggaggaggggcgaacgcaagacagggcggaaaugaaggaaauaaacaagcaggaaaaggucaaggucaaaacaaucaaggagcuaaugcgccaaaugagaaaguaguaaaugauuacuuacaaaaaauaagaaguucaguaacaauagaauggacaccaugcaguguaacaugugguaaugguguaagaauaagaagaagagcacacgcagauaaaaagaaagcagaagauuugacaauggaugauuuagaaguagaagcaugugugauggauaaaugugcaggaauauuuaauguaguaaguaacagcuuagggcuaguaauuuuguuaguauuggccuuauuuaacuaa

SEQ ID NO: 5544 - RNA, 1251 nt, Artificial Sequence
  derived and/or modified CDS sequence (opt6) from Pk(UM0018C10)__AHF20648.1__CSP
augaaaaauuuuauauuauuagcaguaaguucaauacuacuaguagaucuauuaccaacacauuuugagcauaacguagaucucaguagggcaauaaacguaaacggugugaguuucaauaauguggauacaagcagucuaggagcagcacaaguaagacaaagugcaagccgaggaagaggauuaggagaaaaaccaaaagaaggagaugacaaagaaaaaaaaaaagaaaaagaaaaagaagaagaaccaaaaaaauuaaaugaaaauaaaccgaaacaaccgaauguagagggagauggagcaaaacuaaaacaaccaaacgaggagggagauggagcgaaacuaaaacaaccaaacgaagaaggagauggagcaaaacuaaaacaaccaaaugccgaaggaggagcaaaauuaaaacaaccaaaugcagaaggcggagccaaugcaggacaaccaaaugcggaagggggagcaaacgcgggucagccaaaugcggaaggaggagcaaaugcaggacaaccaaaugcagaagggggagcaaaugcagggcaaccaaaugcagaagguggggcgaaugcaggacaaccaaaugcagaagggggagcaaaugcgggacaaccaaacgcagaaggaggagcaaaugcaggacaaccgaaugcagaagggggagcaaaugcaagacaaccaaaugcggaaggaggagcaaaugcaagacaacccaaugcagaaggaggagcaaaugcgaggcaaccaaaugccgaaggaggagcgaacgcaggacaaccgaaugcagaaggaggcgcaaaugcaggacaaccaaacgcagaagggggagcaaaugcaaggcaaccacaagcggaaggagggggagcaaaugcaagacaaccgcaagcagagggaggaggggcaaaugcaagacaaggagguaaugaaggaaauaaacaagcaggaaaaggacaaggacaaaacaaccaaggagcaaaugcaccaaaugaaaaaguaguaaacgauuacuuacaaaaaauaagaagcaguguaacaacagaauggacaccauguagcguaacaugugguaauggaguaaggauaagaagaagggcacacgcagauaaaaaaaaagcggaagacuuaacaauggaugacuuggaaguagaagcauguguaauggauaaaugugcaggaauauuuaauguaguaucaaauucguuaggauuaguuauacuauuagugcuagcauuauucaacuaa

SEQ ID NO: 5545 - RNA, 1251 nt, Artificial Sequence
  derived and/or modified CDS sequence (opt6) from Pk(UM0018C6)__AHF20646.1__CSP
augaaaaauuucauuuuauuagcaguaaguaguauauuauuaguagacuuguuaccaacgcauuuugaacauaacguggauuugaguagggcaauaaauguaaauggaguaaguuucaauaauguagauacaucaaguuuaggagcagcacaaguaagacaaagugcaaguagaggaagaggauuaggagaaaagccaaaagagggugaugacaaagagaaaaagaaagaaaaagaaaaagaagaagaaccaaagaaauuaaaugaaaauaaaccgaaacaaccaaacguugaaggggauggagcaaaacuaaaacaaccaaaugaagaaggagauggagcaaaauuaaaacaaccgaaugaggaaggagauggagcaaaauuaaaacaaccaaaugcagaaggaggagcgaaauuagaacaaccaaaugcagaaggaggagcaaacgcaggacaaccaaaugcggagggaggggcaaaugcaggacaaccaaaugcugaaggaggggcaaaugcaggacaaccaaaugcggaaggaggagcaaaugcgggacaaccuaacgcagaaggaggggcgaaugcggggcaaccaaaugcagaaggaggagcaaaugcaggacaaccaaacgcagaaggaggagcuaaugcgggacaaccaaaugcagaaggaggagcaaaugcgagacaaccaaaugcagaaggaggagcaaacgcacggcaaccaaaugcagaaggaggagcaaaugcaagacaaccaaaugcagaaggaggagcaaaugcgggucaaccaaaugcagaaggaggagcaaaugcaggacaaccaaaugcagaagggggagcgaaugcaagacaaccgcaagcugaaggaggaggagcaaaugcaagacaaccacaagcagaaggugggggagcaaacgcgagacaaggaggaaaugaagguaauaaacaagcaggaaaaggccaaggacaaaauaaucagggagcaaaugcaccaaaugaaaaagucguuaaugauuaucuacagaaaauacgaucaaguguaacaacugaauggacaccguguaguguaacuugugggaacggaguaagaauaagaaggagggcacaugccgauaaaaagaaagcagaagauuuaacaauggaugacuuagaaguggaagcguguguaauggauaaaugcgcagguauauuuaauguaguaaguaauaguuuagggcuaguaauacuauuaguguuagcuuuauuuaauuaa

SEQ ID NO: 5546 - RNA, 1242 nt, Artificial Sequence
  derived and/or modified CDS sequence (opt6) from Pk(SGEHIH1-im-Y09-95)__AFD97208.1__CSP
augaaaaacuuuauuuuauuagcagugaguaguauauuauuaguagauuuacuaccgacacauuucgaacauaauguagauuuaucaagagcaauaaauguaaacggaguaaguuuaaauaauguagauacuaguagcuuaggagcagcgcaaguaagacaaagugcaaguagaggaagaggacuaggagaaaagccaaaagaaggagaugacaaagaaaaaaaaaaagaaaaagaaaaagaagaagaacccaaaaaauuaaaugaaaauaauccgaaaaaaccaaaugaagaaggggacggagcaaaacuaaaacaaccaaaugcagaagguggagcaaaauuaaaacaaccaaacgcagaaggaggggcaaacgcaggucaaccgaaugcagaaggaggugcaaacgcaggacaaccaaaugcagagggaggagcaaaugcaggacaaccaaacgcaggaggggcaaacgccggccaaccaaaugcagaaggaggagcaaaugcagggcaaccaaaugcagagggaggugcaaacguagggcaaccaaaugcagaaggaggagcaaaugcaagacagccgaaugcagaaggaggagcaaacgcaagacaaccaaaugcagaaggaggagcgaaugcaggacaaccaaaugcagaaggaggagcgaacgccggucaaccuaaugcagaaggaggagcaaaugcaggacaaccaaaugcugaaggaggagcaaaugcaagacaaccaaaugcagaaggaggagcaaacgcuggacaaccaaacgcagaaggaggagcaaaugcaggacaaccgaaugcagaaggaggagcaaacgcaagacaaccacaagcugaaggaggaggagcgaaugcgagacagccacaagcagaaggaggaggagcuaacgcaagacaaggagggaaugaaggaaauaaaagggcaggaaaaggacaaggucaaaauaaucaaggggcuaacgcaccaaaugaaaagguggugaaugauuaucuacaaaaaauaagaagcucaguaacaauagaauggacaccauguagugugacaugcgguaauggaguaagaauaagaagaagggcgcacgcagacaaaaaaaaagcagaagacuuaacgauggaugacuuagaaguagaagcauguguaauggauaaaugcgcaggaauauuuaauguaguaaguaauagccuaggauuaguaauauuauuaguacuagcauuauucaauuga

SEQ ID NO: 5547 - RNA, 1221 nt, Artificial Sequence
  derived and/or modified CDS sequence (opt6) from Pk(KH100)__ADN94497.1__CSP
augaaaaauuucauacuauuagcaguaucaaguauauuguuaguagauuuguuaccaacacacuucgaacauaauguagauuuaaguagagcaauaaacguaaaugguguaaguuucaauaauguagauacgaguaguuugggagcagcacaaguaaggcaaagugcuaguaggggaagaggauuaggagaaaaaccaaaagaaggagaugauaaagaaaagaagaaagaaaaagaaaaagaagaagaaccuaaaaauuuaaaugaaaauaaaccaaaacaaccaaaugcugaaggagauggagcaaaaccaaaacaaccaaaugcagaaggagauggagcaaaauugaaacaaccaaaugcagaaggagauggagcaaaauuaaaacaaccaaaugcggaaggagauggaggaaacgcaagacaaccaaaugcagaaggagauggaggaaacgcaagacaaccaaaugcagaaggagacggaggaaacgcaagacaaccgaaugcggaaggagaugguggaaaugcaagacaaccaaaugcagaaggggauggaggaaacgcgagacaaccgaaugcggaaggagaugguggaaacgcaagacaaccaaaugcagaaggagauggagggaaugcaagacaaccuaaugcggaaggggauggaggaaaugcaaggcaaccaaaugcagaaggagacggaggaaacgcaagacaaccaaacgcagaaggagauggagggaacgcaagacaaccaaaugcugaaggagauggaggaaacgcacgacaaccaaaugcagaaggagauggagcaaaugcaagacagccaaaugcagaaggggauggagcaaaugcgagacaaccacaggcagaaggaggaggagggaaugcaagacaaggaggaaaugaagggaauaaacaagcaggaaaaggacagggucaaaauaaucaaggagcaaaugcaccaaaugaaaaaguaguaaaugauuauuuacagaaaauaaggagcucuguaacaacagaauggacaccuuguaguguaacauguggaaauggaguaagaauaagaaggagagcacacgcagauaagaagaaagcagaagauuugacaauggacgauuuagaaguagaggcuugcguaauggauaaaugcgcaggaauauuuaauguaguaaguaauaguuuagggcuagugauauuacugguguuggcacuauucaauuaa

SEQ ID NO: 5548 - RNA, 1221 nt, Artificial Sequence
  derived and/or modified CDS sequence (opt6) from Pk(KH294)__ADN94542.1__CSP
augaaaaacuuuauauuauuagcagucucaagcauacuauuaguggauuuacugccaacacacuuugaacauaacguagauuuaagcagagcaauaaacguaaacggaguuagcuuuaauaacguagacacaaguaguuuaggagcagcacaagugagacaaagugcaaguagaggaagaggauuaggagaaaaaccaaaagaaggcgaugauaaagaaaagaagaaagaaaaagaaaaagaagaagaaccgaaaaaucuaaaugaaaauaaaccaaaacaaccaaaugcagaaggagauggagcaaaaccaaaacaaccaaaugcagaaggggauggagcaaaauuaaaacaaccaaaugcagaaggagauggggcaaaauuaaaacaacccaaugcagaaggagauggaggaaaugcaagacaaccaaaugcagagggagauggaggaaaugcacgacaaccaaacgcagaaggagacggaggaaacgcgaggcaaccgaaugcagaaggagauggaggaaaugcgcgacaaccaaaugcagaaggagauggaggaaaugcaagacaaccaaaugcagagggagauggaggaaacgcaagacaaccgaaugcggaaggggauggaggcaacgcacgacaaccaaaugcagaaggagacggaggaaaugcaagacaaccaaaugcagaaggagauggaggaaacgcaagacaacccaaugcagaaggagauggaggaaaugcaaggcaaccaaaugcagaaggcgauggagguaaugcaagacaaccaaaugcagaaggagauggagggaaugcaagacaaccaaaugcagaaggagauggagcaaaugcaaggcaaccacaagcagaaggaggaggaggaaacgcaagacaaggaggaaacgaaggaaauaaacaggcagggaaaggacaaggacaaaauaaccaaggagcaaaugcgccaaaugagaaaguaguaaaugauuacuugcaaaagauaagaagcucaguaacaacagaauggacacccugcaguguaacauguggaaauggaguaaggauaagaaggagagcacaugcagacaaaaagaaagcagaagacuuaacaauggaugaucuagaagucgaggcuuguguaauggacaaaugcgcaggaauuuucaauguagugaguaauagccuaggccuaguaauauuauuaguauuggcauuauuuaauuaa

SEQ ID NO: 5549 - RNA, 1218 nt, Artificial Sequence
  derived and/or modified CDS sequence (opt6) from Pk(UM0015C4)__AHF20661.1__CSP
augaaaaacuuuauacuauuagcaguaaguucaauauuauuaguagaucuauuaccaacacauuuugaacauaacguagacuuaaguagagcaauaaauguaaauggaguaagcuuuaacaauguagacacaaguucacuaggagcggcucaaguacgacaaagcgcaaguagaggaagaggauugggggaaaaaccaaaagaaggcgaugauaaagaaaaaaaaaaagaaaaggaaaaagaagaagaaccaaaaaaauuagaugaaaauaaaccaaaacaacccaaugucgaaggagauggagcaaaauuaaaacaaccgaaugaagaaggagauggggcaaaacuaaaacaaccaaaugaagaaggggacggagcaaaauuaaaacaaccgaacgcagagggaggugcaaaauuaaaacaacccaaugcagaagguggagcaaaugcaggacaaccgaaugcagaaggaggagcaaaugcgggacaaccaaaugcagaaggaggagcaaaugcuggacaaccaaaugcagaaggaggagcaaaugcaggacaaccaaaugcagaaggcggggcaaaugcaggacaaccgaaugcagaaggaggagcaaacgcaggucaaccgaaugcagaaggaggagcaaaugcaagacaaccaaaugcagaagggggagcaaaugcaagacaaccaaaugcagaaggaggagcaaaugcaagacaaccaaaugcagaaggaggagcgaaugcaggacaaccgaacgcugaagggggagcaaaugcagggcaaccgaaugcagaaggaggagcaaaugcgagacaaccacaagcagaagguggaggagcgaacgcgagacaaccucaagcagaaggugguggagcaaaugcaaggcaaggaggaaaugaaggaaauaaacaagcagguaaagggcaaggacaaaauaaucaaggggcaaaugcaccgaaugaaaaaguagugaaugauuauuuacagaaaauaagaagcagcguaacaacagaauggaccccauguaguguaacauguggaaauggaguaagaaucagaagaagagcacaugcggauaaaaaaaaagcagaagaccuaacaauggaugauuuagaaguagaagcaugugugauggacaaaugugcaggaauauuuaguguaguaagcaauucacuaggacuaguaauuuuacuaguauuagcauuauuuaacuaa

SEQ ID NO: 5550 - RNA, 1218 nt, Artificial Sequence
  derived and/or modified CDS sequence (opt6) from Pk(UM0015C7)__AHF20662.1__CSP
augaaaaacuucauauuacuagcaguaaguaguauauuauugguagacuuacuaccaacacacuuugaacacaaugucgauuuaagcagagcaauaaacguaaauggaguaaguuucaauaauguggauacaaguaguuuaggugcagcacaagugagacaaucagcgaguagaggaagaggacuaggggaaaaaccaaaagaaggggacgauaaagaaaagaagaaagaaaaagagaaagaagaagaaccgaagaaacuaaaugaaaauaaaccaaaacaaccaaaugucgaaggagauggagcaaaauuaaaacaaccgaaugaagaaggagauggugcgaaacuaaaacaaccaaacgaagaaggagauggggcaaaacuaaaacaaccaaaugcagaaggaggagcaaaauuaaaacaaccaaaugcagaaggaggagcaaaugcaggacaaccaaaugcagaagggggagcaaacgcaggacaaccaaaugcagaagguggagcaaaugcaggacaaccaaacgcagaaggaggagccaaugcaggacaaccaaacgcugaaggaggagcaaaugcaggacaaccaaaugcagaaggaggugcaaacgcagggcaaccaaaugcggaaggaggugcaaacgcaagacaaccaaaugcugaaggaggugcaaaugcaagacaaccaaaugcagaaggaggagcgaaugcaagacaaccaaaugcggaaggaggagcaaacgcaggacaaccgaaugcagaaggaggagcaaaugcaggacaaccaaacgcagaaggaggagcaaaugcaagacaaccacaagcagaagguggcggagcaaaugcacgacaaccacaagcagaaggaggaggagcuaaugcaagacaaggaggaaaugaaggaaacaaacaagcaggaaaagggcaagggcaaaacaaccaaggagcaaacgcaccaaacgaaaaaguaguaaaugauuacuuacagaaaauaagaaguucaguaacaacagaauggacaccuuguucaguaacguguggaaacggaguacgaauaagaaggagagcacaugcggacaaaaagaaagcagaagauuuaacaauggacgaucuagaaguagaagcauguguaauggauaaaugcgcaggaauauuuaauguaguaaguaauagucuaggccuaguaauacuauuaguacuggcauuauuuaacuaa

SEQ ID NO: 5551 - RNA, 1218 nt, Artificial Sequence
  derived and/or modified CDS sequence (opt6) from Pk(UM009C4)__AHF20644.1__CSP
augaaaaauuuuauauuauuggcaguaaguaguauauugcuaguagaucuacuaccaacacacuuugaacauaacguagacuuaaguagagcaauaaaugugaacggaguaaguuuuaauaacguagauacaagcagcuuaggagcugcgcaaguuagacaaagugcaaguagagguagaggauuaggagaaaaaccaaaagagggagaugauaaagagaaaaagaaagaaaaagaaaaagaagaagaaccaaagaaauuaaaugaaaauaaaccaaaacaaccaaacguagaaggagauggagcaaaauuaaaacaaccaaaugaagaaggagauggagcaaaacuaaaaagaccaaacgaagaaggagauggagcaaaacuaaaacaaccaaaugcagaaggaggugcaaaaccaaaacaaccaaaugcagaaggaggagcaaaugcaggacaaccaaaugcagaaggaggagcaaacgcaggacaaccaaaugcugaaggaggagcaaaugcgggacaaccaaacgcugaaggaggagcaaaugcaggacaaccaaaugcagaaggaggagcaaaugcaggacaaccaaacgcagaagggggagcaaaugcaggacaaccgaacgcagaaggaggagcaaaugcaagacagccaaaugcagaaggaggugcaaacgcgaggcaaccgaaugcagaaggaggagcaaaugccagacaaccaaaugcagaaggaggggcaaacgcagggcaaccaaacgcagagggaggagcaaaugcaggacaaccaaacgcagaaggaggagcaaaugcaagacaaccgcaagcggaaggaggaggagcuaaugcaaggagaccacaagcagaaggaggaggggcaaaugcaaggcaagggggaaaugaaggaaauaaacaagcgggaaaaggacaaggacaaaauaaucaaggagcaaacgcaccgaaugaaaaaguaguaaaugacuaccuacagaaaauacgaagcucaguaacaacagaauggacaccaugcaguguaacguguggaaacggaguaagaauaagaagaagggcacaugcagauaaaaagaaagcagaagauuuaacgauggaugauuuagaaguagaagcauguguaauggauaaaugcgcaggaauauuuaauguaguaaguaacagucugggucuaguaauauuauuagcauuagcauuauuuaauuaa

SEQ ID NO: 5552 - RNA, 1212 nt, Artificial Sequence
  derived and/or modified CDS sequence (opt6) from Pk(TN027)__AFG25481.1__CSP
augaaaaacuuuauauuauuagcugucaguucaauacuauugguagaucuauuaccaacucauuucgaacauaacguagacuuaucaagagcaauaaacguaaauggaguaaguuuuaacaacguagauacaucaaguuuaggagcagcacaaguuagacaaagugcaucaagaggaagaggauuaggggaaaaaccaaaagaaggagaugacaaagaaaagaagaaagaaaaagaaaaagaagaagaacccaaaaaucuaaaugaaaauaaaccaaaacaaccaaacgcagaaggagacggagcaaaacuaaaacaaccaaacgcagaaggagacggagcaaaauuaaaacaaccaaaugcagaaggcgauggagcaaaacuaaaacaaccacaagcagaaggagauggagcaaacgcaagacaaccacaagcagaaggcgauggagcaaacgcaagacaaccacaagcagaaggagacggggcuaacgccagacaaccacaagcagaaggagauggagcaaacgcaagacaaccacaagcagaaggagacggugcaaacgcaagacaaccacaagcagaaggagauggagcaaacgcucgacaaccgcaagcugaaggagauggggcaaacgcaagacaaccacaagcagaaggagacggggcaaaugcaagacaaccacaagcagaaggagacggagcaaacgcucgacaaccacaagcugaaggagauggagcaaaugcaagacaaccacaggcagaaggaggaggagcaaacgcaaggcaaccacaagccgaaggggacggagcaaaugcaagacaggcacaagcacaaggagauggaggaaacgcacgacaagggggaaacggaggaggagccccggcaggaggaaaugaaggcaacaaacaagcaggaaaaggacaaggacaaaacaaucaaggagcaaaugcaccuaacgaaaaaguagugaacgacuaucuacagaaaauaagaucgagcguaacaacagaauggacaccaugcucaguaacuugcggaaauggagucagaauuagaagacgagcacaugcagauaaaaagaaagcagaagaucuaacaauggaugacuuagaaguagaagcaugcguaauggauaaaugugcaggaauauuuaauguaguaucaaauagucuaggauuaguaauacuacugguauuagcauuauuuaacuaa

SEQ ID NO: 5553 - RNA, 1188 nt, Artificial Sequence
  derived and/or modified CDS sequence (opt6) from Pk(UM0034C7)__AHF20657.1__CSP
augagaaauuucauacuauuagcaguaaguucaauacuacuaguagaccuauuaccaacacauuucgaacauaauguagaccuaucuagagcuauaaacguaaauggaguaagcuucaacaauguagacacuucaagucuaggagcugcacaaguaagacaaucagccucaagaggaaggggauuaggagaaaaaagaaaagaaggagcggauaaagaaaaaaaaaaagaaaaagaggaagaaccaaaaaaaccaaaugaaaauaaacuaaaacaaccaaauccagaccaaccacaagcacaaggaaauggagcaaaugcaggacaaccacaagcacaaggagauggagcaaacgcaggacaaccacaagcacaaggagauggggcaaaugcuggacaaccacaagcacaaggagauggagcuaaugcaggacaaccacaagcacaaggagauggagcaaaugcaggccaaccacaagcacaaggagauggagcaaacgcaggucaaccacaggcacaaggagauggagcaaacgcaggccagccacaagcacaaggugauggagcaaaugcaggacaaccacaagcccaaggagauggagcaaacgcagggcaaccgcaagcccaaggagauggagcuaaugcaggacaaccacaagcacaaggcgauggagcaaacgcaggucaaccacaagcccaaggagacggagcaaaugcaggacaaccacaagcacaaggagauggagcaaacgcaggccaaccacaagcacaaggagauagagcaaacgcaggacaaccacaagcccaaggagacggagcaaacguaccaaggcaaggaagaaauggaggaggagcaccagcaggaggaaacgaaggaaacaaacaagcaggaaaaggucaaggacaaaauaaccaaggagcaaacgcgccaaaugaaaaaguaguaaacgauuacuuacacaaaauaagaagcucagucacaacagaauggacgccauguaguguaacauguggaaauggaguaagaauaagaagaaaagcacacgcaggaaauaaaaaagcagaagacuuaacaauggacgauuuagaagucgaagcaugugucauggacaaaugcgcuggcauauucaauguaguaagcaauagcuuaggacuaguaauacuauuaguacuagcauuauucaauuaa

SEQ ID NO: 5554 - RNA, 1185 nt, Artificial Sequence
  derived and/or modified CDS sequence (opt6) from Pk(KH225)__ADN94498.1__CSP
augaaaaauuuuauacuacuggcaguaagcaguauucuacuaguagauuuauuaccaacacacuuugaacauaacguagacuuaagcagggcaauaaacguaaacggaguaaguuucaauaacguagacacaucaucauuaggagcagcacaaguaagacaaagugcaaguagaggaagaggauuaggagaaaaaccaaaagaaggggaugacaaagaaaaaaaaaaagaaaaagagaaagaagaagaaccaaaaaaucugaaugaaaacaaaccaaagcaaccaaacgcagaaggagauggagcaaaacuaaaacagccaaaugcagaaggagauggagcgaaauuaaaacaaccaaaugcagaaggagauggaggaaacgcgagacaaccaaaugcagaaggcgauggaggaaacgcaagacaaccaaaugcagaaggagacggaggaaacgcgagacaaccaaaugcagaaggagauggaggaaacgcaagacaaccaaaugcagaaggagacggagggaacgcgagacagccaaaugcggaaggagauggaggaaacgcaagacaaccaaaugcggaaggagauggaggaaaugcacgacaaccaaaugcagaaggagacggaggaaaugcucgacaaccaaacgcagaaggagacggaggaaaugcacgacaaccaaaugcagagggagauggaggaaaugcgagacaaccaaaugcggaaggagauggaggaaaugcaagacaaccaaaugcagaaggagacgggggaaacgcgagacaaccaaacgcggaaggagauggggcgaaugcaagacaaccacaagcagaaggaggaggaggaaacgcaagacaaggaggaaacgaaggaaacaaacaagcagguaaaggacaaggacaaaacaaccaaggggcuaacgcaccaaaugaaaaaguaguaaacgauuauuuacaaaaaauaagaaguaguguaacaacagaauggacaccauguaguguaacauguggaaauggaguaagaauaagaagaagagcacaugcagacaaaaaaaaagcugaagauuuaacaauggacgauuuggaaguagaagcauguguaauggacaaaugcgcagguauauucaauguaguaaguaacaguuuaggacuaguaauauuauuaguguuagcacuauucaauuaa

SEQ ID NO: 5555 - RNA, 1179 nt, Artificial Sequence
  derived and/or modified CDS sequence (opt6) from Pk(UM001C7)__AHF20637.1__CSP
augaaaaacuuuauauuauuagcgguaagcagcauacuguuaguagauuuguuaccuacacauuucgaacauaauguagaucuaaguagagcuauaaacguaaauggaguaaguuuuaauaauguagauacaucaaguuuaggagcagcacaaguaagacaaagcgcaaguagaggaagaggacugggagaaaaaccaaaagaaggagcagauaaagaaaaaaaaaaggaaaaaggaaaagaaaaagaagaagaaccaaaaaaaccaaaugaaaauaaacuaaaacaaccaaacgaaggacaaccacaagcacaaggagauggagcuaaugcuggacaaccacaagcacaaggagauggugcaaacgcaggacaaccacaggcacaaggagauggagcaaaugcaggacaaccgcaggcacaaggagauggagcaaaugcuggacaaccacaagcacaaggagacggagcaaaugcaggacaaccgcaagcacaaggagauggagcaaacgcaggacaaccacaagcacaaggagauggagcaaaugcaggacaaccgcaggcacaaggagauggugcaaauggagauggagcuaaugcaggacaaccacaagcacaaggagauggagcaaacgcaggacaaccgcaagcacaaggagacggugcgaacgcuggacaaccacaagcacaaggcgacggagcaaaugcaggacaaccacaagcacaaggagauggagcgaacgcaggacaaccacaagcacaaggagauagagcgaaugcaggccaaccgcaagcacaaggagacggcgcaaacgugccaagacaaggaaggaauggaggaggagcaccagcgggaggaaaugagggaaacaaacaagcaggaaaagggcaaggacaaaauaaucaaggagcaaaugcuccaaaugaaaaaguaguaaaugauuauuuacauaaaauaagaaguagcguaacaacggaauggacaccauguaguguaacauguggaaauggaguaagaauaagaagaaaagcacaugcuggaaauaaaaaagcagaagauuuaacaauggaugauuuagaaguagaagcguguguaauggauaaaugugcagguauauuuaacguagugucuaauagucuaggacuaguaauauuauuaguauuagcauuauuuaauuaa

SEQ ID NO: 5556 - RNA, 1140 nt, Artificial Sequence
  derived and/or modified CDS sequence (opt6) from Pk(SGEHIWM4-Y09-15)__AFD97227.1__CSP
augaaaaauuuuauauuauuagcagugucaagcauacuauuaguagauuuauuaccaacauauuucgaacauaauguagacuuaagcagagcaguaaauguaaauggaguaagcuucaauaguguugacacaaguaguuuaggggcggcacaaguaagacaaucagcaagcagggggagaggguugggagaaaaaccaaaagaaggagcagauaaagaaaaaaaaaaagaaaaagaaaaagaagaagagccaaaaaaaccaaaugaaaacaaauuaaaacaaccacaaggaaauggaggagcaggucaagcacaacccgaagggaacggaggagcaggacaagcacaaccagaaggaaacggaggagcaggacaagcacaaccagaaggaaaugggggggcaggacaagcacaaccggaaggaaauggaggagcaggacaagcacaaccagaaggaaacggaggugcaggacaagcacaaccugaaggaaauggaggagcaggacaagcacaaccagaaggaaaugguggagcagggcaggcacagccacaaggcaauggaggugcaggacaagcacaaccacaagggaauggaggagcgggacaagcacaaccacaaggaaauggcggggcagggcaagcgcaaccacaaggaaaugguggagcaggacaagcacaaccagaaggaaacggaggagcuggacaagcacaaccacaaggaaauggaggagcaggacaagcacaaccagaaggaaauagagaagcaccggcacagccacaaggaaauggaggagcgggacaagcacaaccacaaaaaaaugagggaggaaaugcaggagcaagaaaaggucaaggacaaaauucacaaggugcaaaugcuccuaaugagaaaguuguaaacgauuauuuacaaaaaauaagaagcucaguuacaacagaauggacaccauguaguguaacuuguggaaacggaguaagaauuagaagaagagcacaugcagauaaaaaaaaagcaggggauuuaacaauggaugacuuagaaguagaagcaugcguaauggauaaaugugcaggaauuuuuaaugcuguaagcaacaguuuaggacuaguaauauuauuaguguuagcauuauucaacuaa

SEQ ID NO: 5557 - RNA, 1140 nt, Artificial Sequence
  derived and/or modified CDS sequence (opt6) from Pk(UM002C3)__AHF20638.1__CSP
augaaaaacuuuauauuauuagcgguaagcaguauucuccuaguagauuuauuaccaacguauuuugaacauaauguggauuuaagcagagcaauaaauguaaacggaguaaguuucaauaauguagacacaucaaguuuaggagcagcacaaguaagacaaagugcaaguaggggaagaggacuaggagagaaaccgaaagaaggagcagauaaagaaaaaaaaaaagaaaaagaaaaagaaaaagaagaggaaccaaaaaaaccaaaugaaaauaaauuaaaacaaccugaaggaaacggaggagcaggaccagcacaaccugaaggaaauggaggagcgggaccugcacaaccagaaggaaauggaggagcaggaccagcacaaccagaaggaaauggaggggcaggaccagcacaaccagaaggaaauggaggagcaggaccggcccaaccagagggaaauggaggagcaggaccagcgcaaccagaagggaauggaggagcaggacccgcacaaccagaaggaaauggaggagcaggaccagcacaaccagaaggaaauggaggagcaggaccugcacaaccagggggacaaguacaacauaauagaaaagaaaugggaggacagguacaacacaauaggaaagaaaugggaggacaaguacaacacaaccauaaagaaaugggaggacaaguacaacauaaucauaaagaaaugggaggagcuggaccagcacagccacaaggaaauggaggagcaggaccagcacaaccacaaggaaacgggggcgcgggacaagcacaaccacaaaaaaaugaaggaggaaaugcaggagcaagaaaaggacaagggcaaaauaaucaaggagcaaaugcgccaaaugaaaaaguaguaaaugacuaccuacagaaaauaagaagcaguguuacaacagaauggacaccauguaguguaacguguggagaugggguaagaauaaaaagaagagcacaugcagacaaaaaaaaagcagaagauuuaacaauggaugaucuagaaguagaagcaugugugauggauaaaugugcaggaauauuuaauguaguaaguaacaguuuaggauuaguaauacuacuaguacuagcacuuuuuaauuaa

SEQ ID NO: 5558 - RNA, 1128 nt, Artificial Sequence
  derived and/or modified CDS sequence (opt6) from Pk(UM0021C6)__AHF20666.1__CSP
augaggaauuuuauauuguuagcaguaucaucaauauuacuaguagauuuauuuccaacacauuuugaacauaauguggauuugaguagagcaauaaauguaaauggaguaagcuuuaauaauguagacacaucaaguuuaggagcagcacaaguaagacaaagugcaaguagaggaagaggauuaggggagaaaccaaaagaaggagcagauaaagaaaaaaaaaaagaaaaaggaaaagaaaaagaagaagaaccaaaaaaaccuaaugaaaacaaauuaaaacaaccaaaugaaggacaaccacaagcgcaaggagauggagcaaaugcaggucaaccacaagcacaaggagauggagcaaaugcaggacaaccacaagcacagggagauggggcaaaugcagggcaaccgcaagcacaaggagauggagcaaaugcaggacaaccgcaagcgcaaggagauggcgcaaacgcagggcaaccacaagcucaaggagauggagcaaacgcaggacaaccacaagcacaaggagauggagcaaacgcaggacaaccacaagcacaaggagacggugcaaaugcaggacagccacaagcacaaggagauggugcaaaugcaggucaaccacaagcgcaaggagauggagcaaacacaggacaaccacaagcacaaggagacggagcaaaugcuggacaaccacaagcgcaaggagauagggcaaaugcaggucaaccacaggcacaaggagacggagcaaauguaccaagacaaggaagaaauggaggaggagcaccagcaggagguaacgaaggaaauaaacaagcaggaaagggccaaggacaaaauaaccaaggagcaaaugcaccaaaugaaaaaguaguaaaugacuaucuacauaaaauaagaucaucaguaacgacagaauggacaccaugcagcguaacauguggaaacggaguaagaauaagaagaaaagcacaugcagguaauaaaaaagcagaagauuuaacaauggaugauuuagaaguagaagcauguguaauggauaaaugcgcaggaauauuuaauguaguuucaaauaguuuaggacuagugauauuauuaguacuagcauuauucaacuaa

SEQ ID NO: 5559 - RNA, 1128 nt, Artificial Sequence
  derived and/or modified CDS sequence (opt6) from Pk(UM0050C2)__AHF20664.1__CSP
augaaaaauuucauacuauuagcaguaaguucaauauuauuaguugaucuauuaccgacacauuucgaacauaauguagauuuaaguagagcaauaaacguaaauggaguaaguuuuaauaauguagauacaucaaguuuaggagcagcgcaaguaaggcaaagugccaguagaggaaggggacucggagaaaaaccaaaagaaggagcagauaaggaaaaaaaaaaagaaaaaggaaaagaaaaagaagaagaaccgaaaaaaccaaaugaaaacaaauuaaaacaaccaaaugaaggacaaccacaagcacaaggagauggggcaaaugcaggacaaccacaagcgcaaggagauggagcaaacgcaggacaaccacaagcucaaggagauggggcaaaugcagggcaaccacaagcacaaggagauggagcaaaugcaggacaaccacaagcacaaggugauggagcaaacgcaggacaaccucaagcacaaggagauggagcaaaugcaggacaaccacaagcgcaaggagauggagcaaacgcaggacaaccacaagcucaaggagauggagcaaaugcaggacaaccucaagcacaaggagacggagcuaaugcaggucaaccgcaagcacaaggagauggagcaaacgcaggucaaccacaagcacaaggagauggcgcuaaugcaggacaaccacaagcacaaggagauagagcaaaugcuggacaaccucaagcgcaaggagauggagcaaauguaccaagacaaggaagaaauggaggaggagcaccggcgggaggaaaugaaggaaauaaacaagccggaaaaggacaaggacaaaauaaucaaggagcaaacgcuccaaaugaaaagguuguaaacgauuacuuacauaaaaucagaaguucagucacaacagaauggacaccauguaguguaacauguggcaauggaguaagaauaaggagaaaagcacacgccggaaauaaaaaagcugaagauuuaacaauggaugaucuagaaguagaagcauguguaauggauaaaugcgcaggaauauucaauguaguaaguaauagucuaggacuaguaauauuauuaguguuagcauuauuuaauuaa

SEQ ID NO: 5560 - RNA, 1128 nt, Artificial Sequence
  derived and/or modified CDS sequence (opt6) from Pk(UMMK569C20)__AHF20669.1__CSP
augaaaaauuucauacuacuugccguuaguucaauauuauuaguagacuuacugccaacacacuuugagcacaauguagauuuaaguagagcaauaaauguuaauggagucaguuuuaacaauguagacacgucaucauuaggagcugcacaagucagacaaagugcaaguagaggaagaggauuaggagaaaaaccaaaagaaggagcagauaaagaaaaaaaaaaagaaaaaggaaaagaaaaagaagaagaaccaaaaaaaccaaaugaaaacaaacuaaaacaaccaaacgagggacaaccacaagcccaaggagauggagcaaaugcaggccaaccacaagcacaaggagauggugcaaacgcgggacaaccacaagcgcaaggagauggggcuaaugcugggcaaccacaagcacaaggagauggagcaaacgcaggacaaccacaagccagaggagauggagcaaaugcaggacagccacaagcacaaggagauggagcaaacgcaggacagccacaagcacaaggcgauggagcaaaugcaggccaaccacaagcacaaggagauggagcaaacgcaggucaaccacaagcacaaggcgauggagcaaaugcaggacaaccacaagcccaaggcgauggagcaaacgcaggccaaccccaagcacaaggagauggagcaaaugcaggccaaccacaagcacaaggagacagagcaaacgcaggccaaccacaggcacaaggagauggagcaaacguaccaagacaaggaagaaauggaggaggcgcaccagcaggaggaaacgagggaaauaaacaagcaggaaaaggacaaggacaaaauaaccaaggagcaaacgcaccaaaugaaaaaguaguaaacgauuaccuacacaaaauaaggaguucaguuacaacagaauggacaccauguagcguaacauguggaaauggcguaagaauaagaagaaaagcacaugccggaaauaaaaaagccgaagacuuaacuauggaugaccuagaaguagaagcaugugucauggauaaaugcgcaggcauauuuaauguuguaagcaauaguuuaggccuaguaauauuacuaguacuagcauuauucaacuaa

SEQ ID NO: 5561 - RNA, 1116 nt, Artificial Sequence
  derived and/or modified CDS sequence (opt6) from Pk(KH433)__ADN94489.1__CSP
augagaaauuucauuuuacuagcaguaaguagcauacuauuaguagaccuacuaccuacacauuuugaacacaauguugauuuaucaagagcaauaaauguaaaugguguaaguuuuaauaauguagauacaaguagcuuaggugcggcucaaguaagacaaagugcaagucgaggaagaggauuaggagaaaaaagaaaagaaggugcagauaaagaaaaaaaaaaagaaaaagaagaagaaccaaaaaaaccuaacgaaaauaaauuaaaacaaccuaacccaggacaaccacaagcacaaggagacggggcaaacgcaggccaaccacaagcacaaggagauggagcaaacgcaggacaaccucaagcucaaggugauggagcaaaugcaggacaaccacaagcucaaggagauggagcaaaugcaggacaaccacaagcacaaggagauggagcaaaugcaggacaaccacaagcacaaggagauggugcaaaugcuggacaaccacaagcccaaggagauggagcaaaugcaggccagccccaagcacaaggcgauggagcuaaugcaggacaaccgcaagcacaaggagauggcgcaaaugcaggccaaccccaagcacaaggagauggagcaaacgcaggucaaccacaagcacaaggggauggagcaaacgcaggucaaccacaagcucaaggagauagagcaaaugcaggacaaccacaagcacaaggagauggcgccaacguaccaagacaagguagaaauggcggaggagcaccagcaggcggaaacgaaggaaauaaacaagcagggaaaggacaaggacaaaauaaccaaggagcaaacgcaccaaaugaaaaaguaguaaaugauuaucuacauaaaauaagaagcucaguaacaacugaauggacaccauguagcguaacauguggaaaugguguaagaauacgaagaaaagcacaugcaggaaacaaaaaagcugaagaucuaacaauggaugaucuagaaguagaagcauguguaauggacaaaugcgcaggaauauucaaugucguaucaaauucauugggacuaguaauacuuuuaguacuagcuuuauucaauuaa

SEQ ID NO: 5562 - RNA, 1116 nt, Artificial Sequence
  derived and/or modified CDS sequence (opt6) from Pk(UM0034C10)__AHF20658.1__CSP
augagaaacuuuauauuauuagcaguaucaaguauuuuauuaguagaucugcuaccaacacauuucgaacacaauguagauuuaucaagagcaauuaauguuaaugguguaagcuuuaacaauguggacacaaguagcuuaggagcagcacaaguaagacaaucagcaaguagaggaaggggacuaggagaaaaaaggaaagaaggagcugacaaagaaaaaaaaaaagaaaaagaagaagaaccaaaaaaaccuaacgaaaacaaauuaaaacaaccaaacccagaucaaccacaagcacaaggugauggcgcaaacgcaggacaaccacaagcacaaggagauggagcaaacgcaggacaaccacaagcacaaggagauggcgcaaacgcaggacaaccucaagcgcaaggagauggagcgaacgccggacaaccacaagcacaaggagacggagcaaaugcaggacaaccacaagcccaaggcgauggagcaaacgcgggacaaccucaagcacaaggagauggagcaaacgcaggacaaccacaagcacaaggagauggagcaaacgcaggacaaccacaagcacaaggagauggagcaaacgcaggccaaccccaagcacaaggagauggagcaaaugcaggacaaccacaagcucaaggagauggggcaaaugcaggacaaccacaagcacaaggugauagagcaaaugcaggacaaccacaagcucaaggagacggagcaaacguacccaggcaaggaagaaacggaggaggugcaccagcaggagggaacgaaggcaauaaacaagcaggaaaaggacaaggacaaaauaaccaaggcgcaaacgcuccgaacgaaaaaguuguaaacgacuaucuacacaaaauaagaaguaguguaacaacagaauggacaccauguagcguaacauguggaaauggcguacgaauaaggagaagacaaaacgcaggaaauaaaaaagcagaagacuuaacaauggaugaucuagaagcagaggcuuguguaauggacaaaugcgcaggaauauuuaacguaguaucaaacagccuaggacuaguaauauuauuaguauuagcacuauuuaauuaa

SEQ ID NO: 5563 - RNA, 1116 nt, Artificial Sequence
  derived and/or modified CDS sequence (opt6) from Pk(UM0034C6)__AHF20656.1__CSP
augagaaauuuuauacuauuagcuguaaguucaauauuauuaguagacuuacuuccaacacacuucgaacacaauguagauuuaucaagagcaaucaauguaaauggaguaaguuuuaauaauguagauacuaguaguuuaggagcagcacaaguaagacaaagugcaaguagaggaaggggacuaggagaaaagagaaaagaaggagcugacaaagaaaaaaaaaaagaaaaagaagaagaaccaaaaaaaccaaacgaaaacaaauuaaaacaaccaaacccagaccaaccacaagcacaaggagauggcgcaaacgcaggacaaccacaggcacaaggagacggagcaaaugcaggacaaccucaagcacaaggagauggagcaaacgccggacaaccacaagcacaaggugauggagcaaaugcaggacaaccacaagcacaaggugacggcgcaaaugcaggacaaccacaagcccaaggugacggagcaaacgcuggacaaccacaggcacaaggagauggagcaaaugcaggacaaccacaagcacaaggagauggagcuaacgcaggacaaccacaagcacaaggagauggagcgaaugcaggacaaccacaagcccaaggcgacggugcaaacgcaggccaaccacaagcacaaggugauggcgcaaacgcaggacaaccacaagcacaaggagauagagcaaacgcaggacaaccacaagcacaaggcgauggagcaaaugugccaagacaaggaagaaauggaggaggagcaccagcaggaggaaaugaaggaaacaaacaagccggaaaaggacaaggacaaaauaaccaaggagcaaacgcaccuaaugaaaaaguaguaaacgauuacuuacacaaaauaagaaguucaguaacaacagaauggacaccauguaguguaacaugcggcaauggcguaagaauuagaagaaaagcccaugcaggaaauaaaaaagcagaagacuuaacaauggacgauuuggaaguagaagcuuguguaauggacaaaugcgcaggaauauucaauguuguaagcaauaguuuaggacuaguaauauuauuaguauuagcauuguucaacuaa

SEQ ID NO: 5564 - RNA, 1107 nt, Artificial Sequence
  derived and/or modified CDS sequence (opt6) from Pk(SGEHIWM16-Y09-85)__AFD97232.1__CSP
augaaaaauuuuauacuauuagcaguaaguaguauauuauuaguagauuuguuaccaacauauuuugaacauaauguagauuuaucaagggcaauaaauguaaaugggguaaguuucaauaguguagauacaaguaguuugggagcagcacaaguaagacaaagugcuaguagaggaagaggauuaggggaaaaaccaaaagaaggagcagauaaagaaaaaaaaaaagaaaaagaaaaagaagaagaaccaaaaaaaccaaacgaaaauaaauuaaaacagccacaaggaaacggaggugcuggacaagcacaaccagaaggaaauggaggcgcaggacaagcacaaccggaaggaaauggaggggcaggacaggcacaaccagaagggaacggaggagcaggacaagcacaaccugaaggaaauggaggagcaggacaagcacaaccagagggaaauggaggagcagggcaagcacaaccagaaggaaaugggggagcaggacaagcgcagccagaagguaauggaggagcaggacaagcgcaaccagaagggaauggaggagcaggacaagcacaaccagagggaaaugggggagcaggacaagcacaaccacaaggaaacggaggagcuggacaagcacaaccucaaggaaauggaggagcaggacaagcacaaccacaaggaaauggaggagcaggacaagcacaaccagaagggaauagagaagcaccugcccaaccacaaggaaauggaggagcgggacaagcacaaccacaaaaaaaugaaggagggaaugcaggagcaagaaaaggacaaggccaaaauaaccaaggagcaaacgcaccaaacgaaaaaguagucaaugacuauuuacaaaaaauaagaucaaguguaacaacggaauggaccccauguagcguaacauguggaaaugguguaagaauaagaagaagagcacaugcagauaaaaaaaaagcagaagaucugacaauggaugacuuagaaguagaagcaugugugauggacaaaugugcaggaauauuuaaugucguaaguaauucacuaggauuaguaauuuuacuaguauuagcauuauuuaauuag

SEQ ID NO: 5565 - RNA, 1107 nt, Artificial Sequence
  derived and/or modified CDS sequence (opt6) from Pk(SGEHIWM4-Y09-13)__AFD97225.1__CSP
augaaaaacuuuauauuauuggcuguaaguaguauauuauuaguagaucuacugccaacauauuuugaacacaacguagauuugaguagagcaauaaauguaaauggaguaaguuuuaauucaguggauacaagcucauuaggagcagcacaaguaagacaaagugcaagcagaggaagaggguuaggugaaaaaccaaaagaaggagcggauaaagaaaaaaaaaaagaaaaagaaaaagaagaagaaccaaaaaaaccaaaugaaaauaaauuaaaacaaccacaaggaaacggaggagcaggacaagcacaaccggaaggaaauggaggagcaggacaagcacaaccagaaggaaauggaggggcaggacaagcacaaccagaagguaaugggggagcaggacaagcacaaccagaagggaauggaggagcagggcaagcacaaccagaaggaaauggcggagcaggacaagcacaaccagaaggaaauggaggagcaggacaagcacaaccagaaggcaauggaggagcaggacaagcacaaccagaaggaaauggaggagcaggacaagcacaaccagaagggaauggaggagcagggcaagcacaaccgcaaggaaauggaggagcaggccaagcacaaccacaaggaaaugggggagcaggacaagcacagccacaagguaauggaggagcaggacaagcacaaccagagggaaauagagaagcaccagcacaaccacaaggaaauggaggagcagggcaagcacaaccacaaaaaaaugaaggaggaaaugcaggagcaagaaaaggacaaggacagaauaaucagggagcaaacgcaccgaaugagaagguaguaaaugauuaucuacaaaaaauaagaaguaguguaacaacagaguggacgccauguaguguaacauguggaaaugggguaagaauaagaagaagagcacaugcagauaaaaaaaaagcagaagauuuaacaguagaugauuuggaaguggaagcauguguaauggauaaaugugcgggaauauuuaaugucgugaguaauagcuuaggucuaguaauauuauugguauuagcauuauuuaauuaa

SEQ ID NO: 5566 - RNA, 1104 nt, Artificial Sequence
  derived and/or modified CDS sequence (opt6) from Pk(KH58)__ADN94493.1__CSP
augaaaaacuuuauauuauuagcaguaucaucaauacuauuaguagaucuauuaccaacacauuuugaacauaacguugaccuaaguagagcaauaaacauaaacggaguaaguuucaauaacguagacacaagcucauuaggagccgcacaagugagacaaagcgcaagcagggguaggggauuaggagaaaaaccaaaagaaggagcagauaaagaaaaaaaaaaagaaaaagaaaaagaagaagaaccaaaaaaaccaaaugaaaauaaacuaaaacagccaaaugcagaaggagauggagcaaacgcaagacaaccaaaugcagaaggcgauggagcaaaugcaagacaaccaaaugccgaaggagauggagcgaacgcaagacaaccaaaugcagaaggagauggagcaaacgcaagacagccaaaugcugaaggagauggcgcaaaugcaagacaaccaaaugcagaaggagacggcgccaaugcaagacaaccaaaugcagaaggagacggcgcaaacgcaaggcaaccaaaugcagaaggagauggagcaaaugcaagacaaccaaaugcagagggagauggagcaaacgcaagacagccaaacgcagaaggagauggagcgaaugcgagacaaccaaaugcugaaggaggaggagcuaacgcacgucaaccaaacgcagagggagauggagcaaaugcgagacaaccacaagcucaaggcgauggaggcaacgcaagacaaggaggaaacggaggcggagcaccagccggagguaaugaaggaaacaaacaagcaggaaaaggacaaggacaaaauaaucaaggagcaaaugcaccaaaugaaaaaguaguaaaugacuaucuacaaaaaauaagaucaagcgugacaacagaauggacccccuguucuguaacaugcggaaauggaguaaggauaagaagaagagcacacgcagauaaaaaaaaagcagaagaccuaacaauggaugauuuagaaguagaagcaugcguaauggauaaaugugcaggaauauuuaauguaguaucaaacagucuaggacuaguaauacuacuaguauuagcacuauuuaacuaa

SEQ ID NO: 5567 - RNA, 1104 nt, Artificial Sequence
  derived and/or modified CDS sequence (opt6) from Pk(UM0029C8)__AHF20651.1__CSP
augaaaaauuuuauacuauuagcaguaaguucaauauuauuaguagauuuauuaccaacccauuucgaacauaauguagauuuaucaagagcaauaaauguaaauggaguaucauuuaauaacguagauaccaguagccuaggagcagcacagguaagacaaagugcaaguagaggaagaggguuaggagaaaaaccaaaagaaggagcagauaaagaaaaaaaaaaagaaaaagaaaaagaaaaagaagaagaaccaaaaaaaccaaaugaaaacaaauuaaaacaaccagaacaaccugcggcaggagcaggaggagaacaaccagcagcaggagcggggggugaacaaccagcagcuggagcaggaggagaacaaccagcggcaggagcuggaggagaacaaccagcugcgggagcaagaggagaacaaccagcagcaggagcaggaggggaacaaccagcagcuggggcaaggggagaacaaccagcugcaggagcaggaggagaacagccagcagcaggagcaggaggagaacaaccggcagcaggagcagguggagaacaaccagcggcaggaggagaacaaccagcagcaggagcagggggagaacaaccagcagcaggagcaagaggagaacaaccagcagcaggagcugguggagaacaaccagcaccugccccaaggagggaacaaccagcagcgggagcaggaggcgaacaaccagcaccagcaccuagaagagaacaaccagcaccaggagcaggagcaggagauggagcgagaggaggcaaugcaggagcaggaaaagggcaagggcaaaauaaucaaggagcaaaugugccuaaugaaaaaguaguaaaugauuauuuacauaaaauaagaaguagugugacgacagaauggacaccauguagcguaaccuguggaaauggaguaagaauaagaagaaaaggucaugcaggaaauaaaaaagcagaagauuuaacaauggaugauuuagaaguagaagcaugcguaauggauaaaugcgcaggaauuuuuaaugugguaagcaauagcuuaggauuaguaauauuauuagugcuagcguuauucaauuga

SEQ ID NO: 5568 - RNA, 1104 nt, Artificial Sequence
  derived and/or modified CDS sequence (opt6) from Pk(UM0032C8)__AHF20655.1__CSP
augaaaaauuuuauacuacuggcaguaucaagcauauuauuaguggaucuauuaccaacacacuuugaacauaacguagacuuaagcagagcaauaaauguaaacggaguaaguuucaauaacguagacacaaguaguuuaggagcagcgcaagugagacaaagugcaagcagaggaaggggauugggagaaaaaccaaaagaaggagcggauaaagagaaaaaaaaagaaaaagaaaaagaagaggaaccgaaaaagccaaaugaaaauaaacuaaaacaacccaaugccgaaggagacggagcaaaugcaaggcaaccaaacgcggaaggagauggagcaaaugcaagacaaccgaaugccgaaggagauggagcaaacgcaagacaaccaaaugcagaaggagacggagcaaaugcaaggcaaccuaaugcagaaggagauggagcaaaugcacgacaaccaaaugcagaaggagauggagcaaacgcacgacaacccaacgcagaaggaaauggcgcgaaugccagacaaccgaaugcagaaggaggaggagcaaacgcgagacaaccaaaugcagaaggagauggagcaaaugcaagacagcccaaugcagaaggagacggagcaaaugcaagacaaccgaaugcagaaggagguggagcaaaugcaagacaaccacaggcagaaggagauggagcaaaugcgagacaaccacaagcacaaggagauggaggaaaugcaagacaaggaggaaacggaggaggagcaccagccggaggaaaugaaggaaacaaacaagcaggaaaaggacaaggacaaaacaaccaaggggcaaaugcaccaaacgaaaaaguaguaaaugauuauuuacaaaaaauaaggucgaguguaacaacagaauggacaccauguucaguaacauguggaaauggaguaagaauaagaagaagagcacacgcggauaaaaaaaaagcagaagaucuaacaauggaugacuuagaaguagaagcaugcguaauggauaaaugugccggaauauuuaauguaguaucaaacagucuaggauucguuauauuauuaguacuagcacuuuucaauuaa

SEQ ID NO: 5569 - RNA, 1101 nt, Artificial Sequence
  derived and/or modified CDS sequence (opt6) from Pk(LT22)__ADN94538.1__CSP
augagaaacuuuauauuacuagcaguuucaucaauauuacuaguagaccuacuaccgacgcauuuugaacauaauguagaucuaaguagagcaauaaauguaaauggaguaaguuucaauaauguagacacaaguaguuuaggagcagcacaaguaagacagucagcaaguaggggacgaggauuaggugaaaaaagaaaagaaggggcagauaaagaaaaaaaaaaagaaaaggaagaagaaccgaaaaaaccaaaugaaaauaaauuaaaacaaccaaacgcagaaggaggagcuaaugcagggcaaccaaaugcagaaggaggggcaaaugccggacaaccaaaugcugaaggaggagcaaacgcaggacaaccuaacgcagaaggaggagcgaaugcaggacaaccaaaugcagaaggaggagcaaacgcaggacaaccaaaugcagaagggggagcaaaugcaggacagccuaacgcagaaggaggagcaaaugcaggacaacccaaugcagaaggaggagcaaaugcaggacaaccaaaugcugaagggggagcaaaugcaggacaaccaaaugcagaaggaggagcaaaugcaggucaaccgaaugcagaaggaggagcaaacgcgcgacaaccaaacgcagaaggaggagcaaaugcgggacaaccaaaugcagaaggaggagcuaacgcaggucaaccaaaugcagaaggaggagcaaaugcaagacaaccccaagcagaaggaggaggagcaaaugcaagacaaggaggaaaugaaggaaauaaacaagcaggaaaaggacaaggacaaaauaaccaaggagcaaaugcaccgaacgaaaaaguaguaaaugauuaucugcaaaaaauaagaucuucaguaacaacagaauggacaccauguucaguaacauguggaaauggagugagaauaagaagaagggcacaugcagauaaaaagaaagcggaagaucuaacgauggaugaucuagaaguagaagccuguguaauggauaaaugugcaggaauauuuaauguaguaagcaauagcuuaggguuaguaauacugcuaguucuagcgcuauuuaacuaa

SEQ ID NO: 5570 - RNA, 1101 nt, Artificial Sequence
  derived and/or modified CDS sequence (opt6) from Pk(LT26)__ADN94539.1__CSP
augaggaauuucauauuacuagcaguaagcucaauauuauuaguagaucuauuaccaacccacuuugaacauaauguagauuuaucaagagcaauaaauguaaauggaguaagcuuuaacaauguagauacaaguaguuuaggagcggcacaaguaagacaaagugcgaguaggggaagaggauuaggagaaaaaagaaaagaaggagcagauaaagaaaaaaaaaaggaaaaagaagaagaaccaaaaaaaccuaaugaaaauaaacuuaaacaaccaaaugcagaaggaggagcaaaugcaggacaaccgaaugcagaaggaggagcaaacgcaggacaaccaaacgcagaaggaggagcaaaugcaggacaaccuaaugcggaaggaggagcaaaugcaggacaaccaaaugcagaaggaggagcaaaugcaggacaaccaaacgcagaaggaggagcaaacgcaggacaaccaaaugcggaaggaggagcaaaugcuggacaaccuaaugcagaaggaggagcaaaugcaagacaaccaaaugcugaaggaggagcaaacgcaggacaaccaaaugcagaaggaggagcaaaugcaggacaaccaaaugcagaaggaggagcaaaugcaggacaaccaaaugcagaaggaggagcgaacgcgggacaaccaaaugcagaaggaggagcgaaugcaggacaaccaaacgcggaaggaggagcaaaugcgagacaaccacaagcagaaggaggaggagcaaaugcaagacaaggaggaaaugagggaaauaagcaagcgggaaaaggacaaggacaaaauaaucaaggagcaaacgcaccaaaugaaaaaguaguaaacgacuauuuacaaaaaauaagaaguaguguaacuaccgaauggacaccaugcaguguaacaugcggaaacggaguaagaauaagaaggagagcucacgcagauaaaaaaaaagcagaagaucuuacaauggaugauuuggaaguagaggcaugcguaauggauaaaugugcaggaauuuuuaaugugguaaguaacaguuuaggauuaguaauauuauuaguacuagcauuauucaauuaa

SEQ ID NO: 5571 - RNA, 1101 nt, Artificial Sequence
  derived and/or modified CDS sequence (opt6) from Pk(TB013)__AFG25472.1__CSP
augagaaauuuuaucuuacuagcgguaaguaguauuuuguuaguagauuuacuaccaacacacuuugaacauaacguagauuuaaguagagcaauaaauguaaaugguguaaguuuuaauaacguagauacaaguagucuaggugcagcacaaguaagacaaucagcaggaagaggaaggggauuaggugagaaaagaaaagaaggagcagauaaagaaaaaaaaaaagaaaaagaagaggaaccaaaaaaaccaaaugaaaauaaauuaaaacaaccaaaugcugaaggaggagcaaaugcuggacaaccgaaugcagaaggaggagcaaaugcuggacaaccaaaugcagaaggaggagcuaaugcaggacaaccaaaugcagaagggggagcaaacgcaggacaaccaaacgcagaaggaggagcgaaugcaggacaaccaaaugcagaaggaggagcgaaugcggggcaaccuaacgcagaaggaggagcaaaugcgggacaaccaaaugcagagggcggagcaaaugcaggacaaccgaaugcagaaggaggagcuaaugcuggacaaccaaacgcagaaggaggagcuaaugcucgacaaccaaaugcagaaggaggagcaaacgcaagacaaccgaaugcagaaggaggugcaaaugcaggacaaccgaaugcagaaggaggagcaaaugcaggacaaccaaaugcagaaggaggagcaaaugcaagacaaccacaagcagaagggggaggagcaaaugccagacaaggaggaaaugaggggaauaaacaagcuggaaaaggacaaggacaaaauaaucaaggagcaaacgcaccaaaugaaaaaguagugaaugauuauuuacagaaaauaagaagcaguguaacaacagaauggacaccaugcaguguaacauguggaaacggagugagaauaagaagaagagcacaugcagauaaaaaaaaagcagaagacuuaacaauggaugauuuagaaguagaagcauguguaauggauaaaugcgcgggaauauuuaauguaguaaguaauagucuaggauuagugaucuuauuaguacuagcguuauuuaacuaa

SEQ ID NO: 5572 - RNA, 1101 nt, Artificial Sequence
  derived and/or modified CDS sequence (opt6) from Pk(TB049)__AFG25474.1__CSP
augagaaacuucauacuacuagcaguaaguaguauauuauuaguagaucuauuaccaacacauuuugaacauaauguagaucuaaguagagcaauaaauguaaacggaguaaguuucaacaauguagauacgaguucauuaggagcagcacaaguaagacaaagcgcaaguagaggaagaggacuaggugaaaaaagaaaagaaggagcagauaaagaaaaaaagaaagaaaaagaagaagaaccaaaaaaaccuaaugagaauaaacuaaaacaaccuaaugcggaaggaggagcaaaugcaggacaaccaaaugcagaaggaggagcaaaugccggucaaccgaaugcggaaggaggggcgaacgcaggacaaccaaaugcagaaggaggagcaaaugcgggacaaccgaaugcggaaggaggagcaaacgcaggacaaccaaaugcagaagggggggcaaaugcaggacaaccaaaugcagaaggaggggcaaaugcaggacaaccaaaugcagaaggaggagcaaacgcaagacaaccuaaugcggaaggaggggcaaaugcaggacaaccaaacgcagaaggaggagcaaaugcaggacaaccaaaugcagaaggaggagcuaacgcaagacagccaaaugcagaaggaggagcgaaugcaagacaaccgaacgcagaaggaggagcaaaugcagggcaaccaaacgcagaaggaggagcaaaugcaaggcaaccacaagcagaaggaggaggagcuaaugcaaggcaaggaggaaaugaaggaaauaaacaagcagguaaaggccagggacaaaauaaucaaggagcaaaugcgccgaaugaaaaaguaguaaaugauuauuuacaaaagauaagaaguaguguaacaacagaauggacaccaugcagcguaacauguggaaacgggguaagaauaagaagaagagcacaugcagauaaaaaaaaagcagaagauuuaacaauggaugauuuggagguggaagcaugcguaauggauaaaugcgcgggaauauuuaauguaguaaguaacagucuaggauuaguaauauuauuaguauuagcauuauuuaacuaa

SEQ ID NO: 5573 - RNA, 1101 nt, Artificial Sequence
  derived and/or modified CDS sequence (opt6) from Pk(TN024)__AFG25479.1__CSP
augagaaauuuuauauuauuagcaguaaguagcauauuauuaguagacuuacuaccgacacauuuugaacauaauguagauuuaucaagagcaauaaauguaaauggaguaaguuuuaauaauguagauacaaguucauuaggggcggcgcagguuagacaaagugcaaguaggggaagaggucuaggggaaagaagaaaagaaggagcugauaaagaaaaaaaaaaagaaaaagaggaagaaccaaaaaaaccaaaugaaaacaaauuaaaacaaccaaaugcagaagguggagcaaaugcggggcagccaaaugcagaagggggagcaaaugcaggacaaccaaaugcagaagggggagcgaaugcaggacaaccaaacgcagaagguggggcaaaugcaggacaaccaaaugcugaagggggagcaaaugcaggacaaccaaaugcagaaggaggagcaaaugcaggacagccaaaugcagaaggaggagcaaaugcaggacaaccaaaugcagaaggaggagcgaaugcaagacaaccaaaugcggaaggaggagcaaaugcaggacaaccaaaugcagaaggaggagcaaaugcaggacaaccgaacgcagaaggaggagcaaaugcaagacagccgaaugcagaaggcggagcaaaugcaagacaaccaaaugcagaaggaggagcaaacgcagggcaaccaaaugcggaaggaggggcaaaugcaagacaaccacaagcagaaggaggaggagcaaaugcaaggcaaggaggaaaugaagguaauaaacaggcaggaaaaggacaaggacaaaauaaucaaggagcaaaugcaccaaaugaaaaaguaguaaaugauuaucuacaaaaaauaagaaguucaguaacaacagaauggacaccauguagcguaacaugugguaaugggguaaggauaaggagaagggcacaugcagauaaaaaaaaagcagaagaccuaacaauggaugaucuagaaguagaagcaugcgugauggauaagugugcaggaauauuuaauguagugaguaauagucuaggauuaguaauauuacuaguauuagcauuguuuaauuaa

SEQ ID NO: 5574 - RNA, 1095 nt, Artificial Sequence
  derived and/or modified CDS sequence (opt6) from Pk(KH369)__ADN94494.1__CSP
augaaaaauuuuauacuacuagcaguaagcaguauauuacuaguagauuuauucccaacacauuucgaacauaauguagaccugucaagggcuauaaauguaaauggugugaguuuuaauaauguagauacaaguucguuaggagcagcacaaguaagacaaagugcaaguagagggagaggauuaggagaaaaacccaaagaaggagccgauaaagaaaaaaaaaaagaaaaagaagaaccaaaaaaaccaaaugaaaauaaauuaaaacagccgcaggcagaaggagauggagcaaacgcaagacaaccacaagcagaaggagauggagcaaacgcacgacaaccacaagcagaaggagauggagcaaaugcaaggcaaccucaagcagaaggagauggagcaaacgcaagacaaccacaagcagaaggagauggagcaaacgcaagacaaccgcaagcagaaggagauggagcaaacgcaagacaaccacaagcggaaggagauggagcaaaugcaaggcaaccgcaagcagaaggagauggagcaaacgcaagacaaccacaagcagaaggggauggagcgaaugcaagacaaccacaagcagaaggagauggagcaaacgcaagacaaccacaagcagaaggaggaggagcaaaugcaagacaaccacaagcagaaggagauggagcuaaugcaagacagccacaagcgcaaggagauggaggaaacgcaagacaaggaggaaacggaggaggagcaccagcaggagggaacgaaggaaacaaacaagcgggaaaaggacaaggacaaaacaaccaaggagcuaaugcaccaaacgaaaaaguuguaaaugacuaucuacaaaaaauaaggucaagcguaacgacagaauggacaccuugcaguguaacaugcggaaacgguguaagaauaagaagaagagcccaugcagauaaaaaaaaagcagaagaucuaacaauggaugacuuagaaguagaagcaugcguaauggauaaaugugcagguauauuuaacguaguaucaaauagccuaggacuaguuauacuauuaguuuuagcacuauuuaacuaa

SEQ ID NO: 5575 - RNA, 1095 nt, Artificial Sequence
  derived and/or modified CDS sequence (opt6) from Pk(LT48)__ADN94507.1__CSP
augaaaaacuuuauauuauuagcgguaaguaguauauuacuaguagacuuacugcccacgcauuucgaacacaauguagaucuaucaagagcaauaaauauaaauggaguaagcuuuaacaauguagauacaaguagcuuaggagcagcgcaaguaagacaaagugcaagcaggggaagaggauuaggagaaaaaccaaaagaaggagcagauaaagaaaaaaaaaaagaaaaagaagaaccaaaaaaaccaaaugaaaauaaauuaaagcaaccgcaagcagaaggagauggagcaaacgcaaggcaaccacaagcagaaggagauggugcaaacgcuaggcaaccacaagcagaaggagauggagcaaacgcaagacaaccgcaagcagaaggcgauggagcaaacgcaagacaaccacaagcagaaggagauggagcaaaugcaagacagccacaagcagaaggagauggagcuaaugcaagacaaccacaggcagaaggagauggagcaaacgcaagacaaccacaagcagaaggagauggagcaaacgcaagacaaccacaagcagaaggcgauggagcaaacgcaagacaaccacaagccgaaggagauggagcaaacgcacgccaaccacaagcggaaggaggaggagcuaaugcaagacaaccacaagcagaaggagacggagcaaaugcaagacaaccacaagcacaaggagauggagggaacgcaagacaaggaggaaauggagggggagcaccggcaggagguaaugaagguaacaaacaagcaggaaaaggacaaggacaaaacaaccaaggugcaaaugcaccaaacgaaaaagugguaaaugauuacuuacaaaaaauaagaucaaguguaacaacagaauggacaccauguagugugacauguggaaacgguguaagaauaagaaggagagcacaugcagauaaaaaaaaagcagaagauuuaacaauggaugacuuagaaguagaagcaugugugauggauaaaugugcaggaauauuuaauguaguaaguaacucauuaggacuaguaauauuacuaguacuagcguuauuuaacuaa

SEQ ID NO: 5576 - RNA, 1092 nt, Artificial Sequence
  derived and/or modified CDS sequence (opt6) from Pk(LT22)__ADN94522.1__CSP
augagaaauuuuauacuauuagcaguaaguaguauacuauuaguagauuuauuaccaacacacuuugaacauaauguagauuugucaagagcgauaaauguaaacggaguaagcuuuaauaauguagacacaaguaguuuaggagcagcacaaguuagacaaagugcgagcagaggaagagguuuaggagaaaaaagaaaagaaggagcagauaaagaaaaaaaaaaagaaaaagaagaagaaccaaagaaaccaaaugaaaauaaauugaaacaaccagaucaagcagguccaggaggagaacaggcaggaccaggaggagaacaagcuggaccaggaggagaacaagcaggaccaagaccaggaggagaacaggcaggaccaggaggagaacaagcaggaccgagaccagguggagaacaggccggaccuggaggagaacaagcaggaccaagaccaggaggagaacaagcaggaccgggaggagaacaagcaggaccaggaggagaacaagcaggaccaagaccaggaggggaacaagcaggaccgggaggagaacaagcaggaccaagaccgggaggagaacaagcggggccagguggagaacaagcaggaccaaggccaggaggagaacaagcaggaccaggaggagaacaaccagcgccaagaccaggaggagaacaaccagcaccagcaccaagaagggaacaaccagcaccagcgccuggaggagaacaaccagcuccaggagcgggugcaggggauggggcaagaggaggaaauccgggagcaggaaaaggacaaggucaaaauaaccaaggagcaaauguaccaaacgaaaaaguaguaaacgacuaucuacauaaaauaagaaguucaguaacaacugaauggacaccauguagcguaacaugcgguaaugggguaaggauaagaagaagacaaaaugcuggaaauaaaaaagcagaagaucuaacaauggacgauuuagagguggaagcauguguaauggauaaaugcgcaggaauauuuaauguaguaucaaacaguuuaggacuaguaauacuuuuaguauuagcauuauuuaacuaa

SEQ ID NO: 5577 - RNA, 1092 nt, Artificial Sequence
  derived and/or modified CDS sequence (opt6) from Pk(UM0020C1)__AHF20649.1__CSP
augaaaaauuucauacuauuagcaguaagcagcauauuacucguagaucuacuaccgacccauuucgaacacaauguagaucuaaguagagcaauaaauguaaacggaguaucauuuaacaauguagauacaucgucacuaggagcaagccaaguaagacaaagugcaaguagaggaagaggauuaggugaaaaaccaaaagaaggagcagacaaagaaaaaaaaaaagaaaaaggaaaagaaaaagaagaagaaccaaaaaaaccaaacgaaaacaaauuaaaacaaccaaacgaaggacaaccacaagcacaaggagauggagcaaaugcaggacaaccacaagcacaaggagauggagcaaacgcaggacaaccacaagcacaaggcgauggagcuaacgcaggccaaccacaagcacaaggagauggagcaaacgcaggacaaccucaagcacaaggagauggcgcaaaugcaggacaaccacaggcacaaggagauggagcgaacgcaggccaaccacaagcacaaggcgauggagcaaaugcaggucaaccacaagcacaaggagauggagcuaacgcaggacaaccacaagcacaaggagauggagcaaacgcaggccagccacaagcacaaggagauggagcaaacgcaggucaaccacaagcccaaggagauagggcaaacgccggacaaccacaagcucaaggagauggagcgaacguaccaaggcaaggaagaaacggaggaggagcaccagcaggaggaaaugaaggcaauaaacaagcaggaaaaggucaaggacaaaacaaucaaggagcuaacgcaccaaaugaaaaaguaguaaacgauuacuuacacaaaaucagaucaucuguaacaacugaauggacaccauguagcguaaccuguggaaauggcguaagaauaagaagaagacaaaacgcaggaaauaaaaaggcagaagaucuaacaauggacgaccuagaaguagaagcauguguaauggacaaaugcgcaggaauauucaauguaguaagcaauagcuuaggacuaguaauacuauuaguauuagcauuauuuaauuaa

SEQ ID NO: 5578 - RNA, 1092 nt, Artificial Sequence
  derived and/or modified CDS sequence (opt6) from Pk(UM0020C3)__AHF20650.1__CSP
augaaaaauuuuauauuacuagcaguuaguaguauacuacuaguagauuuacuaccgacgcacuucgaacauaauguagauuuaucaagggcaauuaauguaaauggaguaggauuuaauaauguagauacaaguagcuuaggcgcaagccaaguaagacaaucagcaaguagaggacgaggauuaggagaaaaacccaaagaaggugcagauaaagaaaaaaaaaaggaaaaaggaaaagaaaaagaagaagaaccaaaaaaaccaaaugaaaauaaauugaaacaaccaaaugaaggacaaccacaagcacaaggagauggggcaaaugcaggacaaccucaagcacaaggagauggagcaaacgcuggacaaccacaagcacaaggagacggagcaaacgcaggacaaccgcaagcacaaggagauggggcaaacgcaggacaaccacaagcacaaggagauggagcaaaugcaggacaaccacaagcacaaggagauggagcaaaugcaggacaaccacaagcacaaggggacggagcaaacgcaggacaaccacaagcucaaggagauggugcaaaugcaggacaaccgcaagcacaaggagauggagcuaaugcagggcaaccacaagcacaaggagacggagcuaaugcaggacaaccgcaagcacaaggagauagagcaaacgcagggcaaccacaagcacaaggagacggcgcgaacguaccaagacaaggcagaaauggaggaggugcaccagcaggaggaaaugaagguaauaaacaagcuggaaaaggacagggacaaaauaaccaaggagcaaaugcaccaaaugaaaaaguaguaaaugauuacuuacacaaaauaaggaguucagugacaacagaauggacaccauguaguguaacauguggaaauggaguaagaauaagaagaaaagcacacgcaggaaauaaaaaagcagaagacuuaacaauggaugauuuagaaguagaagcaugugugauggauaaaugcgcugguauauucaauguagugaguaacucacuaggauugguaauauuacuaguacuagcauuauuuaacuaa

SEQ ID NO: 5579 - RNA, 1092 nt, Artificial Sequence
  derived and/or modified CDS sequence (opt6) from Pk(UM0021C19)__AHF20668.1__CSP
augagaaauuucauauugcuugcaguaagcagcauuuuauuaguagacuuauuccccacacauuuugaacauaauguagacuuaaguagagcaauaaauguaaacggaguuaguuuuaauaauguagacacaaguaguuuaggagcagcacaaguaaggcaaagcgcaagcagaggaagaggauuaggagaaaagagaaaagaaggggcugauaaagaaaaaaaaaaagaaaaagaagaagaaccaaaaaagccaaaugaaaauaaacuaaaacaaccggaccaagcaggaccaggaggugaacaagcagggccgggaggagaacaggcaggaccaggaggagaacaggcaggaccagggggagaacaagcaggaccaagaccgggcggagaacaagcaggaccaggaggagaacaagcaggaccaagaccaggaggagaacaagcaggaccaagaccaggaggagaacaagcaggaccacgaccugggggggaacaagcaggaccaggaggggaacaagcgggaccaggaggagaacaggcaggaccaggaggagagcaagcaggaccaagaccgggaggggaacaagcaggaccaggaggagaacaagcaggaccaagaccaggaggagaacaagcaggacccggaggagaacaaccagcgccaagaccuggaggagaacaaccagcaccagcaccaagaagagaacaaccugcacccgggccaggaggagaacagccagcaccaggagcaggagccggagauggagcaagaggaggaaacccaggagcgggaaaaggacaaggacaaaauaaucaaggagcaaauguaccaaaugaaaaaguaguaaaugauuauuuacauaaaauaagaaguaguguaacaacagaauggacaccauguaguguaacaugcgggaauggaguaagaauaaggagaagacaaaaugcgggaaauaaaaaagcagaagauuuaacgauggaugaucuugaaguggaagcauguguaauggauaaaugcgcagguauauuuaauguuguaaguaauagucuaggacugguaacauuacugguauuagcacuauucaauuaa

SEQ ID NO: 5580 - RNA, 1092 nt, Artificial Sequence
  derived and/or modified CDS sequence (opt6) from Pk(UMGAC7)__AHF20617.1__CSP
augaaaaauuucauacuacuagcaguaagcucgauacuacuaguagaccuacuaccaacacauuuugaacacaauguggauuuaucacgagcaauaaauguaaauggaguaaguuuuaacaauguagauacaaguagcuuaggagcagcacaggucagacaaagugcaucaagaggaagaggacuaggagaaaaaccgaaagaaggagcagauaaagaaaaaaaaaaagaaaaaggaaaagaaaaagaagaagaaccaaaaaaaccaaacgaaaauaaauuaaaacaaccuaacgaaggacaaccacaagcacaaggagauggagcaaacgcuggacaaccacaagcucaaggagauggagcaaacgccggacaaccacaagcacaaggcgauggagcaaacgcaggccaaccacaagcacaaggagauggagcuaacgcaggacaaccacaagcacaaggagauggagcaaaugcaggacaaccacaagcccaaggagauggagcaaacgcaggccaaccacaagcacagggagauggagcaaacgcaggacaaccacaagcacaaggagauggagcaaacgcaggacaaccacaagcacaaggagauggagcaaacgcaggccaaccacaagcacaaggagauggagcaaacgcuggacaaccacaagcacaaggagaucgagcaaacgcaggacaaccacaagcgcagggagacggagcaaacguacccagacaagguagaaacggaggaggagcaccagcaggaggaaacgaaggaaauaaacaagcaggaaaaggacaaggacaaaauaaccagggagcaaacgcaccaaaugaaaaaguaguaaacgauuauuugcacaaaauaagaagcagcguaacaacagaauggacucccuguagcguaacaugcggaaauggaguaagaauaagaagaaaagcacacgcaggaaauaaaaaagccgaagauuuaacaauggacgauuuagaaguggaagccuguguaauggauaaaugcgcaggaauauuuaauguaguaucaaauaguuuaggacuaguaauccuauuaguaccagcauuauuuaauuaa

SEQ ID NO: 5581 - RNA, 1092 nt, Artificial Sequence
  derived and/or modified CDS sequence (opt6) from Pk(UMMK566C6)__AHF20670.1__CSP
augaaaaauuucauauuacuagcaguaucauccauauuacuaguagacuuauuaccaacacacuucgaacauaauguugauuuaucaagagcuauuaauguaaauggaguaagcuuuaacaauguagauacaucaagccuaggagcagcacaaguaagacaaucagccucaagaggaagaggacuaggagaaaaaccuaaagaaggagcagauaaagaaaaaaaaaaagaaaaaggaaaagaaaaagaaggagaaccaaaaaaaccaaacgaaaacaaauuaaaacaaccaaacgaaggacaaccccaagcacaaggagauggagcaaacgcaggacaaccacaagcucaaggagauggagccaacgcaggccaaccacaagcucaaggagauggagcaaacgcaggacaaccccaagcacaaggcgauggagcaaacgcaggacaaccacaagcccaaggagauggagcaaacgcaggacaaccacaagcacaaggagauggagcaaacgcaggacaaccacaagcacaaggagauggagcaaacgcaggacaaccacaagcccaaggagauggcgcaaacgcaggacagccucaagcccaaggagacggagcaaacgcaggacaaccacaagcacaaggagauggggcaaacgcaggccaaccacaagcacaaggagaucgagcaaacgcaggucaaccacaagcacaaggagauggagcaaacguaccgagacaaggaaggaauggaggaggagcaccagcaggaggaaacgaaggaaauaaacaagcaggaaaaggacaagggcaaaacaaccaaggagcaaacgcaccaaaugagaaaguaguaaaugauuacuuacacaaaauaagaagcagcguaacaacagaauggacuccauguaguguaacauguggaaauggcguacgaauuagaagaaaagcacacgcaggaaacaaaaaagcagaagaccuaacaauggacgaucuagaaguagaggcaugcguaauggacaaaugcgcaggaauauucaauguaguaucaaacagccuaggcuuaguaauuuuauuaguuuuagcauuauucaauuaa

SEQ ID NO: 5582 - RNA, 1089 nt, Artificial Sequence
  derived and/or modified CDS sequence (opt6) from Pk(UMGAC1)__AHF20615.1__CSP
augaaaaauuuuauauuacuagcaguaucaaguauauuauuaguagauuuacuaccaacacauuuugaacauaacguagauuugaguagagcaauaaauguaaauggaguaaguuuuaauaacguugauacaagcaguuuaggagcagcacaaguaagacaaucagcaaguagaggaagagguuuaggagaaaaaccaaaagaaggagcagacaaagaaaaaaaaaaagaaaaaggaaaagaaaaagaggaaccaaaaaaaccaaaugaaaauaaauuaaaacaaccaaaugaaggucaaccacaagcacaaggugauggagcaaaugcaggacaaccacaagcacaaggagacggagcgaaugcaggacaaccccaagcacaaggcgauggagcaaaugcaggucaaccacaagcacaaggcgauggagcaaaugcaggacaaccacaagcacaaggagauggagcaaacgcaggacaaccaagagcacaaggagauggagcaaacgcaggucaaccacaagcacaaggagauggagcaaaugcaggacaaccacaagcacaaggagauggagcaaacgcaggacaaccucaagcacaaggagauggugcaaacgcaggccaaccacaggcgcaaggugauggcgcaaacgcaggacaaccucaagcacaaggagaucgagcaaaugcaggacaaccacaagcucaaggugacggagcaaauguacccagacagggacgaaaugguggaggagcaccagcagguggaaaugaaggaaauaaacaagcaggaaaaggacaaggacaaaauaaucaaggggcaaaugcaccaaaugaaaaaguaguaaaugacuaucuacauaaaauaagaaguaguguaacaacggaauggacacccuguagcguaaccuguggaaauggaguaagaauaagaagaaaagcacaugcagguaacaaaaaagcagaagauuuaacuauggaugauuuagaaguagaagcaugcguaauggacaaaugugcaggaauauuuaacguaguaaguaauucauuaggauuaguaauacuacuaguauuagcacuauuuaauuaa

SEQ ID NO: 5583 - RNA, 1086 nt, Artificial Sequence
  derived and/or modified CDS sequence (opt6) from Pk(NB032)__AFG25470.1__CSP
augaaaaauuuuauauuauuagcagugaguaguauacuauuaguagacuuauuuccaacacauuucgaacauaauguagauuuaucacgagcgauaaaugugaauggaguaagcuucaauaauguagauacaaguucauuaggugcagcacaaguaagacaaucggcgaguagagggagaggacuaggggaaaaaccaaaagaaggagcagauaaagagaaaaaaaaagaaaaagaaaaagaaaaagaaaaagaagaagaaccuaaaaaaccaaaugaaaauaaauuaaaacaaccggaaggaaaucaagauggaagagcacaaccagaaggaaaucaagauggaagggcucaaccagaaggaaaucaggauggaagagcacaaccggaaggaaaucaggauggaagagcacaaccagaggguaaccaagaugggagagcacaaccugaaggaaaucaagauggaagagcucaaccagaaggaaaucaagaugggagagcacaaccagaaggaaaucaagauggaagagcacaaccagaaggaaaucaagauggaagagcacaaccagaaggaaacagagaagcaccagcacaaccacaaggaaauggaggagcaggacaggcacaaccagaaggaaauagagaagcaccagcacaaccucaaggaaauggaggggcaggacaagcacaaccagaaggaaauagagaagcuccagcacaaccacaaggaaauggaggagcaggacaagcacaaccgcaaaaaaaugaaggaggaaaugcaggagcgagaaaaggacaaggacaaaauaaucaaggagcgaaugcaccaaaugaaaaaguaguaaaugauuacuugcauaaaauaagaaguucaguaacaacggaauggacaccaugcaguguuacauguggaaaugggguaagaauaagaaggaaagcacaugcggauaaaaaaaaggcagaagaccuaacaauggaugauuuagaaguagaagcaugcguaauggauaaaugugcaggaauauuuaauguaguaucaaauagcuuaggauuaguaauauuauuaguauuagcguuauuuaauuaa

SEQ ID NO: 5584 - RNA, 1083 nt, Artificial Sequence
  derived and/or modified CDS sequence (opt6) from Pk(UM002C4)__AHF20639.1__CSP
augaaaaauuucauauuacuagcggugucaagcauauuacuaguagauuuacuaccgacauacuuugaacauaauguagauuuaaguagggcgauaaacgugaauggaguaaguuuuaauaauguagauacaaguucuuuaggagcugcacaaguaagacaaagugcaaguagaggaagaggauuaggugaaaaaccaaaagaaggagcagauaaggaaaaaaaaaaagaaaaagaaaaagaaaaagaagaagaaccaaaaaaaccaaacgagaauaaauuaaaacaaccagaaggaaauggaggagcagguccagcacaaccugaaggaaacggaggagcugguccagcacaaccagaaggaaauggaggagcaggaccagcacaaccggaaggaaauggaggcgcaggaccagcacaaccagaaggaaauggaggagcaggaccagcacaaccagaaggaaauggaggagcagguccggcacaaccagaaggaaaugggggagcgggaccagcacaaccagaaggcaauggaggagcgggaccagcacaaccagaagggaauggaggagcagggccagcacaaccggaagguaauggaggagcgggaccagcacaaccgcaaggaaauggaggagcaggaccugcucaaccacaaggaaauggaggagcaggaccagcacaaccacaaggaaauggaggagcagguccagcacaaccacaaggaaauggaggggcaggacaagcacaaccacaaaagaaugaaggaggaaaugcaggagcgagaaaaggacaaggacaaaauaaucaaggagcaaaugcaccaaaugaaaaaguaguaaaugacuauuuacaaaagauaagaaguucaguuacaacggaauggacaccauguagugugacaugcggaaauggaguaagaauaaaaagacgagcacaugcagauaaaaaaaaagcagaagauuuaacaauggaugaucuagaaguagaagcaugcguaauggauaaaugugcaggaauauuuaauguagugaguaauaguuuaggauuaguaauauuauuaguauuagcauuauuuaauuaa

SEQ ID NO: 5585 - RNA, 1080 nt, Artificial Sequence
  derived and/or modified CDS sequence (opt6) from Pk(CDK162)__ADN94495.1__CSP
augagaaauuuuauauuacuagcagugaguaguauauuauuaguagauuuacuaccaacacauuuugaacauaauguagaucuaucaagagcaauaaauguaaauggaguaucauuuaauaauguagauacaaguucgcuaggagcagcucaaguacgacaaagugcaaguaggggaagaggacuuggagaaaaaaggaaagaaggagcagauaaagaaaaaaaaaaagaaaaggaagaagaaccaaaaaaaccaaacgaaaauaaauuaaaacagccaaacccagaucaaccacaagcacaaggagacggagcaaaugcaggacaaccacaagcacaaggugauggagcaaaugcaggacaaccacaagcacagggagauggugcaaaugcaggacaaccgcaagcacaaggggauggagcaaaugcagggcaaccacaagcgcaaggagacggagcaaaugcaggacaaccacaagcacaaggagauggagcaaaugcaggacaaccacaagcacaaggagauggagcaaacgcaggacaaccacaagcacaaggggauggagcuaaugcagggcaaccacaagcacaaggggauggugcaaacgcaggacaaccacaagcacaaggugauggagcaaacgcaggacaaccacaagcacaaggagauagagcaaaugcuggacaaccacaagcacaaggagauggggcaaacguacccagacaaggaagaaacggaggaggagcaccagcaggagguaaugaaggaaacaaacaagcaggaaaaggacaaggacaaaauaaucaaggagcaaaugcaccaaaugaaaaaguaguuaaugauuaucuacauaaaauaagaucaucagugacaacugaauggacaccauguucaguuacaugugguaauggaguaagaauaagaagaagacaaaaugcaggaaauaaaaaagcagaagacuuaacaauggaugauuuagaaguggaagcuuguguaauggacaaaugugcaggaauauucaauguaguaagcaauagccuaggacuagugauauuauuaguauuagcguuauuuaauuaa

SEQ ID NO: 5586 - RNA, 1080 nt, Artificial Sequence
  derived and/or modified CDS sequence (opt6) from Pk(KN010)__AFG25463.1__CSP
augagaaauuucauacuauuagcgguaaguucaauacuauuaguagacuuauuaccaacacacuucgaacacaacguggacuuaucaagagcaauaaauguaaauggaguaagcuuuaacaauguagacaccucaaguuuaggagcagcacaagucagacaaagugcaucaagaggaagaggauuaggagaaaaaagaaaagaaggagcagauaaagaaaaaaaaaaagaaaaagaagaagaaccaaaaaaaccaaacgaaaacaaacuaaaacaaccaaacccagaccaaccccaagcucaaggcgauggagcaaacgcuggccaaccccaagcacaaggagacggcgcaaacgcaggacaaccacaagcacagggagauggcgcaaacgcaggacaaccccaagcacaaggagauggagcuaacgcaggacaaccacaggcacaaggcgauggagcaaacacuggacaaccacaagcucaaggcgacggagcaaaugcaggacaaccacaagcacaaggcgauggcgcaaacgcaggacaaccacaagcccaaggagauggagcaaacgcaggccaaccgcaagcacaaggagauggagcaaacgcaggacaaccacaagcacaaggagauggugcuaacgcaggacaaccucaagcacaaggcgauagagcaaaugcgggacaaccacaagcacaaggagacggcgcaaacguaccaagacaaggaagaaauggagggggagcaccagcaggaggaaacgaaggaaauaaacaagcaggaaaaggacaaggacaaaauaaccaaggagcaaaugcgccaaacgaaaaaguaguuaaugauuacuuacacaaaauaagaaguucaguaacagcggaauggacuccaugcaguguuacauguggaaaugggguaagaauuagaaggaaagcacaugcaggaaauaaaaaagccgaagacuuaacaauggaugaucuagaaguugaagcauguguuauggauaaaugcgcaggaauauucaauguaguaucgaauagcuuaggauuaguaauacuauuagucuuagcauuauucaauuaa

SEQ ID NO: 5587 - RNA, 1080 nt, Artificial Sequence
  derived and/or modified CDS sequence (opt6) from Pk(KN013)__AFG25464.1__CSP
augagaaauuucauucuuuuagccguaucaucaauacuacugguagacuuauuaccaacacauuucgaacauaauguggaucuaucaagagcaaucaauguaaacggcguuaguuuuaacaacguagauacaucaucacuaggcgcugcacaaguaagacaaucagcaucaagaggaagaggacuaggagaaaaaagaaaagaaggagcagauaaagaaaaaaaaaaagaaaaagaagaagaaccaaaaaagccaaaugaaaacaaauuaaaacaaccaaacccgggacaaccacaagcacagggagauggagcgaacgcaggacaaccccaagcacaaggagacggagcuaacgcaggacaaccucaagcucaaggagauggagcaaacgcaggacaaccacaggcgcaaggugauggagcaaaugcaggacaaccacaagcacaaggagacggagcaaacgcaggacaaccacaagcacaaggggauggagcaaacgcuggacaaccacaagcacaaggagacggcgcaaacgcaggacagccacaagcacaaggagauggagcaaacgcuggacaaccacaagcacaaggagauggcgcaaacgcgggacaaccucaagcacaaggugacggcgcaaacgcaggacaaccucaagcccaaggagauagagcaaacgcaggacagccucaagcacagggagacggagcaaacguaccaagacaaggacgaaauggagguggggcacccgcaggaggaaacggagggaauaaacaagcaggaaaaggacaaggacaaaauaaccaaggcgcaaacgcaccaaaugaaaaaguaguaaacgauuacuuacacaaaauaagaaguucaguaacaacagaauggacaccaugcagcguuacauguggaaauggaguaagaauaagaaggaaagcacaugcuggaaauaaaaaagcagaagacuuaacaauggacgaucuagaaguagaagcauguguaauggauaaaugcgcaggaauauuuaacguaguaagcaauaguuuaggauuaguaauacuacuaguuuuagcauuauuuaauuaa

SEQ ID NO: 5588 - RNA, 1080 nt, Artificial Sequence
  derived and/or modified CDS sequence (opt6) from Pk(LT57)__ADN94508.1__CSP
augaaaaacuuuauauuauuagcuguaucaaguauacuauuaguagaucuauuuccaacucauuucgaacauaauguagauuuaucaagagcaauaaauguaaauggaguaucauuuaauaacguagauacaucgagucuaggagcagcgcaaguaagacaaucagcaucaagaggcagaggacuaggggaaaaaccaaaagaaggagccgauaaagaaaaaaaaaaagaaaaagaaaaagaaaaagaagaagaaccaaagaaaccgaaugaaaacaaacuaaaacaaccagaaggaaaucaagauggaagggcacaaccagaagggaaucaggauggaagagcacaaccagaagggaaucaagauggacgagcacaaccagaaggaaaucaagacggaagagcacaaccggaaggaaaucaagauggaagagcacaaccagaaggaaaucaagacgggagagcacaaccagaaggaaaucaagauggacgagcacaaccagaaggaaaucaggauggaagagcacaaccagaaggaaaucaggauggaagagcucaaccagaagggaauagggaagcaccggcgcaaccacaagggaauggaggagcaggacaagcacaaccugaaggaaauagagaagcuccagcacaaccucaaggaaauggaggagcaggacaagcacaaccagaaggaaauagagaagcaccagcacaaccacaaggaaauggaggagcaggacaagcacaaccacaaaaaaaugaaggagggaaugcaggagcaagaaaaggacaaggacaaaauaaucaaggagcaaacgcaccaaaugagaaaguaguaaacgauuauuuacauaaaauaagaaguagcguaacaacagaauggacaccauguaguguaacauguggaaacggaguaagaauuagaagaaaagcgcaugcagacaaaaaaaaagcagaagauuuaacaauggaugacuuagaaguagaagcaugcguaauggauaaaugugcaggaauauuuaacguaguaaguaauagcuuaggauuagugauacuacuaguauuagcauuauuuaauuaa

SEQ ID NO: 5589 - RNA, 1080 nt, Artificial Sequence
  derived and/or modified CDS sequence (opt6) from Pk(NB046)__AFG25471.1__CSP
augaggaauuuuauacucuuagcgguaagcaguauauuauuaguugacuuauuaccaacacauuuugaacauaauguagaccuaaguagagcaauaaacguaaauggaguaucauucaauaauguagauacaaguagucuaggcgcugcucaaguaagacaaagugcaucaagaggaagaggauuaggagaaaaaagaaaagaaggagcagauaaagaaaaaaaaaaagaaaaagaagaagaaccaaaaaaaccgaaugaaaacaaacuaaaacagccaaacccagaccaaccgcaagcgcaaggugauggagcaaaugcuggacaaccacaagcacaaggugauggagcaaaugcaggacaaccacaagcacaaggagacggcgcaaaugcaggacaaccacaagcacaaggagauggagcaaaugcaggacaaccacaagcacaaggggauggagcuaaugcuggacaaccacaagcacaaggugauggagcaaaugcaggacaaccacaagcacaaggagauggagcaaacgcaggacaaccacaagcacaaggagauggagcaaacgcaggacaaccgcaagcgcaaggagauggcgcaaaugcaggacaaccucaagcacaaggugauggggcaaaugcaggacagccacaagcacaaggagauagagcaaaugcaggacaaccacaagcacaaggagacggagcuaauguaccaagacaaggaagaaacggaggaggagcaccggcaggaggaaaugaaggaaauaaacaagcaggaaaagggcaaggacaaaauaaucaaggagcaaaugcaccaaaugaaaaaguaguaaaugauuauuuacauaaaauaagaagcagcguaacaacagaauggacaccauguagugugacauguggaaauggaguuaggauaaggagaaaagcacaugcaggaaauaaaaaagcggaagaucuaacaauggacgauuuagagguagaagcauguguaauggauaaaugugcaggaauauuuaauguaguaaguaauaguuuaggauuaguaauuuuauuaguacuagcguuauuuaauuaa

SEQ ID NO: 5590 - RNA, 1080 nt, Artificial Sequence
  derived and/or modified CDS sequence (opt6) from Pk(TN023)__AFG25478.1__CSP
augagaaacuucauauuacuagcaguaagcagcauauuacuaguagaucuacuaccaacacacuuugaacauaauguagaucuaucacgagcaauaaacguaaauggaguuagcuuuaacaauguagacauaaguagucuaggagcagcacaaguaagacagucagcaaguagaggaagaggacuaggagaaaaaagaaaagaaggagcagacaaagaaaaaaaaaaagaaaaagaagaagaaccgaaaaaaccaaacgaaaacaaacuaaaacaaccaaauccagaccaaccacaagcacaaggagacggagcaaaugcaggacaaccccaagcacaaggagauggagcaaacgcaggucaaccacaagcucaaggagauggagcaaacgcuggacaaccacaagcacagggagauggagcaaaugcgggacaaccacaagcccaaggagauggagcaaaugcaggacaaccacaagcacaaggagauggagcaaacgcaggacaaccacaagcacaaggcgauggagcaaacgcagggcaaccacaagcacaaggagauggagcuaacgcaggacaaccacaagcccaaggagauggagcaaacgcgggacaaccacaagcacaaggagauggagcuaacgcaggacaaccacaagcucaaggagacagagcaaaugcaggccaaccacaagcacaaggagauggagcuaacguuccaagacaaggacgaaauggaggaggagcaccagcaggaggaaacgaaggaaauaaacaagcaggaaaaggacaaggacaaaauaaucaaggagcaaacgcucccaaugaaaaaguaguaaacgauuacuuacauaaaauaagaaguucaguaacaacagaauggacuccauguaguguaacauguggaaauggaguaaggauaagaagaaaagcucacgcuggcaauaaaaaggcagaagacuuaacaauggaugauuuagaaguagaagcauguguaauggacaaaugugcuggaauauucaauguaguaaguaacagcuuagguuuaguaauacuacuaguauuagcauuauuuaauuaa

SEQ ID NO: 5591 - RNA, 1080 nt, Artificial Sequence
  derived and/or modified CDS sequence (opt6) from Pk(UM0016C2)__AHF20663.1__CSP
augaaaaacuuuauacuacuagccguaucaaguauauuacuaguagaucuauuaccaacacauuuugaacauaauguagaucuuucaagagcaauaaauguaaauggaguaagcuuuaacaacgucgauacaucaucauuaggagcagcacaaguaaggcaaucagcuaguagaggaagaggacuaggggaaaaaccaaaagaaggagccgauaaagagaaaaaaaaagaaaaagaaaaagaaaaagaggaagaaccaaaaaaaccuaaugaaaauaaauuaaaacaaccagaaggaaaccaagacgggagagcacaaccagaaggaaaucaggaugguagagcacaaccagaaggaaaccaagauggaagagcacaaccagaaggaaaucaagauggacgagcacaaccugaaggaaaucaggauggaagagcacaaccugaaggaaaucaggaugggagagcgcaaccggaagguaaucaagaugggcgagcacaaccagaaggaaaucaagauggaagagcgcaaccagaaggaaaucaagauggacgagcacaaccagaaggaaauagagaagcgcccgcacaaccacaaggaaauggaggcgcaggucaagcacaaccagaaggaaauagagaagcaccagcacaaccacaaggaaauggaggagcagggcaagcacaaccagaaggaaauagggaagcaccugcacaaccacaagggaauggaggagcaggacaagcacagccacaaaaaaaugaaggaggaaaugcaggagcaagaaaaggacaaggacaaaacaaucaaggagcaaaugcaccaaacgaaaaagugguaaaugacuacuugcaaaaaauaagaaguucaguaacaacagaauggacaccauguucaguaacauguggaaauggaguaagaauuagaagacgagcucaugcagauaagaaaaaagcagaggacuuaacaauggacgauuuagaaguagaagcauguguaauggauaaaugugcgggaauauucaacguaguaaguaauucauuaggacuaguaauauuauuaguauuagcauuauuuaauuaa

SEQ ID NO: 5592 - RNA, 1077 nt, Artificial Sequence
  derived and/or modified CDS sequence (opt6) from Pk(LT48)__ADN94519.1__CSP
augagaaauuucauacuauuagcaguaagcaguauacuacuaguagacuuauuaccaacacauuuugaacauaauguagauuuaucacgagcaauaaacguaaauggcguuucauuuaacaauguagauacaucaagcuuaggcgcagcacaaguaagacaaagugcaucuagaggaagaggauuaggagaaaaaagaaaagaaggagccgauaaagaaaaaaaaaaagaaaaagaagaagaaccuaaaaaaccaaacgaaaacaaacuaaaacaaccaaauccugaccaaccacaagcacaaggagacggagcaaaugcaggacaaccacaagcacaaggagauggagcuaacgcgggacaaccacaagcacaaggcgauggagcaaacgcaggccaaccacaagcacaaggagauggagcaaaugcaggacagccacaagcacaaggugauggagcaaacgcagggcaaccucaagcccagggagauggcgcaaacgcagggcaaccacaagcacaaggagauggagcaaaugcaggacaaccacaagcacaaggcgauggagcaaacgcaggacaaccacaagcucaaggagauggagcaaacgcaggacaaccacaagcacaaggagauggagcuaacgcaggacaaccccaagcacaaggagacagaggaaugcaagacaaucacaaacacaaagaaaugggacaaauguaucacgauaaggaagaaacaggagaaguccaucaacaagaagaaaugagagguauaaauaaacaagaaaaagcaagagauaaaacaauaagaguagaauguccaaaagaaaaaguaguaaaugauuauuuacauaaaauaagaucaagcguaacaacagaauggaccccaugcucuguaacauguggaaacggaguaagaauaagaagaaaagcacaugcaggaaacaaaaaagcugaagauuuaacaauggaugacuuagaaguagaagcaugcguaauggacaaaugugccggaauauuuaacguaguaucaaauucacuaggacuaguuauauuacuaguacucgcauuauuuaacuga

SEQ ID NO: 5593 - RNA, 1077 nt, Artificial Sequence
  derived and/or modified CDS sequence (opt6) from Pk(SGEHIWM4-Y09-9)__AFD97223.1__CSP
augaaaaauuuuauauuacuggcaguaucaagcauacuacuaguagaucuauugccaacauauuuugaacauaauguagauuugaguagagcaauaaaugugaauggaguaaguuuuaauaguguagauacaagcagcuuaggugcggcacaaguaagacaaagugcaaguagaggaagaggacuaggagaaaaaccaaaagaaggagcagauaaagaaaaaaaaaaagaaaaggaaaaagaagaagaaccaaagaaaccgaaugaaaauaaacuaaaacaaccacaaggcaauggaggagcaggacaagcacagccggaaggaaacgguggagcuggacaagcacaaccagaaggaaaugggggagcaggacaagcacaaccagaaggaaacggcggagcaggacaagcucagccagaaggaaaugggggagcgggacaagcacaaccagaagguaauggaggagcaggacaagcacaaccugaaggaaacggaggagcaggacaagcacaaccugagggaaauggaggagcaggacaggcacaaccagaagggaaugggggagcagggcaagcacaaccggaaggaaauggaggagcaggacaagcacaaccagaaggaaauggaggagcaggacaagcacaaccagaaggaaauggaggagcaggacaagcacaaccagaaggaaacggaggagcaggccaagcacaaccacaaggaaauggaggugcaggacaagcacaaccccaaaaaaaugagggaggaaaugcaggagcaagaaaaggucaaggacaaaauaaucaaggugcaaaugcaccaaaugaaaaaguaguaaaugauuauuuacaaaaaauaagaaguaguguaacaacagaguggacaccauguucaguaacaugcgggaauggaguaagaauaagaagaagagcacaugcagauaaaaaaaaagcagaagaccuaacaauggaugauuuagagguagaagcauguguaauggauaaaugcgcaggaauauuuaauguaguaaguaacaguuuaggacuaguaauauuauuaguacuagcauuauuuaauuaa

SEQ ID NO: 5594 - RNA, 1071 nt, Artificial Sequence
  derived and/or modified CDS sequence (opt6) from Pk(LT15)__ADN94525.1__CSP
augagaaauuuuauauuauuggcgguuaguaguauacuauuaguagauuuauuaccaacacacuuugaacauaauguggauuuaaguagagcgauaaauguaaauggcguaucauuuaauaaugucgauacaaguucacuaggagcagcucagguaagacaaagcgcaaguagaggaagaggauuaggagaaaaaaggaaagaaggagcggauaaagaaaaaaaaaaagaaaaagaagaagaaccaaaaaagccaaaugaaaauaaauuaaaacaaccagaacaagcagcuccaggugcaggaggugaacaaccagcaccaggggcaggaggagaacaaccggcaccaggagcgggaggagaacagccagcaccaggagcagggggagaaagaccagcaccaggagcaggaggggaacaaccagcaccaggugcaggaggagaacaaccagcaccuggugcgggaggagaaagaccagcgccgggggcuggaggagaacaaccagcgccaggagcaggaggagaacaaccagcaccaggagcaggaggggaacaaccagcaccaggagcagggggagaacaaccugcaccaggagcaggaggagaaagaccugcaccuggagcaggaggagaaagaccagcaccaggugcugguggagaacaaccagcaccaggagcaggaggagaacaaccagcgccagcaccaagaagagaacagccagcuccaggaccaggagcaggagauggcgcaagagguggaaaugcaggagcaggaaaaggacaaggucaaaacaaucaaggagcaaauguaccaaacgaaaaaguugugaaugauuauuugcauaaaauaaggaguagcguaacaacagaauggacaccuuguaguguaacauguggaaauggagugagaauaagaaggagacaaaaugcaggaaauaaaaaagcagaagauuuaacaauggaugauuuagaaguagaggcauguguaauggauaaaugcgcagguauauuuaauguaguaaguaauaguuuagguuuaguaauauuauuaguauuagcacuauucaauuaa

SEQ ID NO: 5595 - RNA, 1071 nt, Artificial Sequence
  derived and/or modified CDS sequence (opt6) from Pk(LT57)__ADN94503.1__CSP
augaaaaauuucauauuauuagcaguaaguaguauauuacuaguagauuuauucccaacacacuucgaacauaauguagauuuaaguagagcgauaaaugugaauggaguaaguuuuaauaauguagauacgaguaguuuaggagcagcacaaguaagacaaagugcaucaaggggcagaggacucggugaaaaaccaaaagagggagcagacaaagaaaaaaaaaaagaaaaagaaaaagaagaaccaaaaaaaccgaaugaaaacaaauuaaaacaaccagaaggaaaucaggauggaagggcucaaccagaaggaaaccaagauggaagagcacaacccgaaggaaaucaagacggaagagcacaaccagaaggaaaucaagacggaagagcacaaccagaagggaaccaagauggaagagcacaaccagaaggaaaucaagauggaagagcacaaccggaagggaaucaggauggaagagcacaaccagaaggaaaucaagaugguagagcacaaccagaagguaaccaagaugggagagcacaaccagaaggaaacagagaagcaccagcacaaccacaaggaaacggaggagcaggacaagcacaaccagagggaaaccgcgaagcaccagcacaaccacaaggaaauggaggagcaggacaagcacaaccagaaggaaauagagaagcgccagcacagccacaagggaauggaggagcaggccaagcacaaccacagaaaaaugaaggaggaaaugcaggugcaagaaaaggacaaggccaaaauaaucaaggagcaaaugccccaaacgagaaaguaguaaaugauuauuuacaaaaaauaaggucaucaguuacaacagaguggacgccuuguagugucacauguggaaauggaguaagaauaagaagaagagcacaugcggauaaaaaaaaagcagaagauuuaacuauggaugacuuagaaguagaagcauguguaauggauaaaugcgcagguauauucaaugcaguaaguaacaguuuaggauuaguaauacuauuaguauuagcacuauucaauuaa

SEQ ID NO: 5596 - RNA, 1068 nt, Artificial Sequence
  derived and/or modified CDS sequence (opt6) from Pk(UMHIC2)__AHF20634.1__CSP
augaaaaauuuuauucuacuagcaguuagcagcauacuguuaguugacuuguuaccaacacauuucgaacauaauguagauuuauccagagcaauaaacguaaauggaguuagcuuuaauaacguagauacaaguucauuaggagcggcacaaguaaggcaaagcgcaagcagaggaaggggauuaggagaaaaaccaaaagaaggggcagauaaagaaaaaaaaaaagaaaaagaaaaagaagaagaaccaaaaaaaccgaaugaaaauaaauuaaaacaaccggaaggaaaucgagaagcgccuggccagccagaaggaaauagagaagcaccaggacaaccagaaggaaauagggaagcgccaggacaaccggaaggaaauagagaagcaccaggacaaccggaaggaaauagagaagcaccagggcaacccgaaggaaauagagaagcaccaggacaaccagaaggaaauagagaagcaccaggacaaccagaaggaaacagagaagcaccaggacaaccagaaggaaauagggaagcaccaggacaaccggaaggaaauagagaagcaccaggacaaccagaaggaaauagagaagcgccagcgcaaccagaagguaauagagaagcaccaggacaaccggaagguaacagagaagcaccagcacaaccagaaggaaauagagaagcaccggcacaaccccaagguaauggaggagcaggacaagcacaaccacaaaaaaaugaaggaggaaacgcaggagcaagaaaagggcaaggacaaaauaaucagggagcaaaugcgccaaacgaaaaaguuguaaaugauuauuuacaaaaaauacguagcaguguaacaacagaauggacaccaugcaguguaacauguggaaauggaguaagaauaaaacgaaaagcacaugcagacaaaaaaaaagcagaagaucuaacaauggacgacuuagaaguagaagcauguguaauggauaaaugcgcaggaauauuuaauguaguaagcaauaguuuaggguuaguaauacuuuuaguauuagcauuauucaauuaa

SEQ ID NO: 5597 - RNA, 1068 nt, Artificial Sequence
  derived and/or modified CDS sequence (opt6) from Pk(UMHIC6)__AHF20635.1__CSP
augaaaaauuuuauacuauuagcaguaaguucaauauuauuaguagauuuauuaccaacacauuuugaacacaacguagauuuaagcagggcaauaaauguaaacggagugaguuuuaauaauguagacacaaguagucuaggagcagcacagguaagacaaagugcaagcagaggaagaggacuaggagaaaaaccaaaggaaggggcagauaaagaaaaaaaaaaagaaaaagaaaaagaagaagaaccaaaaaaaccaaaugaaaauaaauuaaaacaaccagaaggaaauagagaagcaccaggacaaccagagggaaauagagaagcaccaggacaaccagaaggaaauagagaagcaccaggacaaccagaagggaauagagaagcuccaggacaaccagaaggaaacagagaagcgccaggacaaccagaaggaaacagagaagcaccaggacaaccagaaggaaauagagaagcaccaggacaaccagaaggaaauagagaggcuccaggacaaccagaaggaaauagagaagcaccagggcaaccagaaggaaauagagaagcaccagggcaaccggaaggaaauagagaagcgccuggacagccggaaggaaauagagaggcaccaggccaaccugaaggaaauagggaagcgccagcacaaccggaaggaaauagagaagcaccagcacaaccacaaggaaauggaggagcgggacaagcacaaccacaaaaaaaugaaggaggaaacgcuggagcaagaaaaggacaaggacaaaacaaucaaggagcgaaugcaccaaacgaaaaaguaguaaaugacuaucuacaaaaaauaagaagcaguguaacaacagaauggacaccguguaguguaacaugcggaaauggggucagaauaaaaaggaaagcacaugcagauaagaaaaaagcugaagaucugacaauggaugacuuagaaguagaagcauguguaauggauaaaugugcaggaauauuuaacguaguaaguaacagccuaggacuaguaauacuacuaguauuagcacuauuuaauuaa

SEQ ID NO: 5598 - RNA, 1068 nt, Artificial Sequence
  derived and/or modified CDS sequence (opt6) from Pk(UMJUC1)__AHF20630.1__CSP
augaaaaacuuuauacuauuagcuguaaguagcauacuauuaguagauuugcuaccaacacacuuugaacauaacguugauuuaaguagggcaauuaauguaaacggagugaguuugaauaacguagacacaagcucuuuaggugcagcacaaguaagacaaagugcuagcagaggaagaggauuaggagaaaaaccaaaggaaggugcagacaaagaaaaaaaaaaagaaaaagaaaaagaagaagagccaaaaaaaccaaacgaaaacaaauuaaaacaaccagaaggaaauagagaagcaccaggacaaccagaaggaaauagagaagcaccaggccaaccagaaggaaacagagaagcaccaggacaaccagaagggaauagagaagcaccaggacaaccggaaggaaauagagaagcaccaggacaaccagaaggaaauagagaagcaccaggacaaccagaaggaaauagagaagcaccaggacaaccagaaggaaauagggaagcaccggggcaaccggaaggaaauagagaagcaccaggccaaccagaaggaaauagggaagcaccaggacagccagaaggagauagagaagcaccagcacaaccagaaggaaauagagaagcuccagggcaaccagaaggaaacagagaaguaccagcacaaccagaaggaaauagagaagcaccagcucaaccacaaggaaauggaggagcaggacaggcccaaccacaaaaaaacgaaggagggaacgcaggagcaagaaaaggacaaggacaaaauaaccaaggagcaaaugcaccaaacgaaaaaguaguaaacgacuaucuacaaaaaauuaggagcagcguaacaacugaauggacaccauguaguguaacaugcggaaacggaguaagaauaaaaagaaaagcacaugccgauaaaaaaaaagcagaagauuuaacaauggaugacuuggaaguagaagcaugcguaauggauaaaugcgcaggaauauuuaauguaguaucaaauucacuaggauuaguaauauuauuaguacuggcacuauuuaacuaa

SEQ ID NO: 5599 - RNA, 1062 nt, Artificial Sequence
  derived and/or modified CDS sequence (opt6) from Pk(TN026)__AFG25480.1__CSP
augaaaaauuuuauauuauuagcgguuagcucaauacuauuaguagacuuauuaccaacacacuuugaacauaauguagauuuaaguagagcaauaaaugugaauggaguaaguuuuaauaauguagauacaagcagucugggagcagcacagguuagacaaagugcgaguagaggacgaggauuaggagaaaaaccaaaagaaggagcggacaaagaaaaaaaaaaagaaaaagaaaaagaaaaagaaaaagaagaagagccaaaaaaaccaaaugaaaauaaacuaaaacaaccagaacaaccggcagcgggagcaggaggagaacaaccagcagcaggagcaggaggagaacaaccagcagcaggagcaggaggagaacaaccagcagcuggggcaggaggagaacaaccagcagcaggagcaggaggagaacaaccagcagcaggugcagggggagaacagccagcggcaggggcaagaggagaacaaccagcagcaggagcaggaggagaacaaccagcagcaggagcgggaggagaacaaccagccgcaggagcaagaggcgaacaaccagcagcaggagcagggggagaacaaccagcagcaggugcaagaggugaacaaccagcagcaggggcaggaggagaacaaccagcagcaggagcgggaggagaacaaccagcgccagcaccaagaagagaacagccagcaccgggagcaggagcaggagacggagcaagaggaggaaacgcaggagcaggaaaaggacaaggacaaaacaaccaaggagcaaauguaccaaaugaaaaagugguaaaugauuauuuacauaaaauaagaaguaguguuacaacagaguggacaccguguagcguaacguguggaaauggaguaagaauaagaggaaaaggacaugcgggaaauaaaaaagcagaagaucuaacaauggaugauuuagaaguagaagcauguguaauggauaagugugcaggaauauuuaauguaguaaguaauagcuuaggauuaguaauauuauuaguauuagcacuauuuaauuaa

SEQ ID NO: 5600 - RNA, 1056 nt, Artificial Sequence
  derived and/or modified CDS sequence (opt6) from Pk(F08B49-1)__AHH02601.1__CSP
augaaaaauuuuauccuauuagcaguuucaagcauacuauuaguugauuuauuacccacacauuuugaacauaauguagauuuaaguagagcaauaaauguaaauggaguaaguuuuaauaacguagauacaucaaguuuaggagcugcucagguaagacaaagugcaagucgaggcagaggacuaggagaaaaaccaaaagaaggagcagauaaagaaaaaaaaaaagaaaaagaaaaagaaaaagaagaagaaccaaaaaaaccaaaugaaaauaaauuaaaacaaccagaacaaccggcggcaggggcaggaggagaacaaccagcagccggagcaggaggagaacaaccagcagcaggagcaggaggagaacaaccagcagcuggagcaagaggagaacaaccagcagcaggggcggguggugaacaaccugcagcuggagccggaggagaacaaccugcagcaggagcaggaggagaacaaccagcagcaggagcaggaggagaacaaccagcagcaggagcaggaggagaacaaccagccgcaggcgcaagaggagaacaaccagcagcuggagcaggaggagaacaaccagcagcaggagcaggaggagaacaaccagcggcaggagcaagaggagaacaaccugcagcaggagcugguggagaacaaccagcaccagcaccaagaagagaacagccagcaccaggagcgggagcaggagauggagcaagaggaggaaacgcaggagcaggaaaaggucaaggacaaaauaaucaaggagcaaauguaccaaaugaaaaaguaguaaacgauuaccuacauaaaaucagaaguucagugacaacagaauggacaccaugcaguguaacuuguggaaaugguguaagaauuagaagaaaaggucaugcaggaaauaaaaaagcugaagacuuaacaauggacgauuuagaaguagaagcaugcguaauggacaaaugugcaggaauuuuuaauguaguaucaaauaguuuaggauuaguaauauugcuaguuuuagcauuauuuaauuaa

SEQ ID NO: 5601 - RNA, 1056 nt, Artificial Sequence
  derived and/or modified CDS sequence (opt6) from Pk(F08B69-1)__AHH02602.1__CSP
augaaaaacuuuauauuauuagcaguaucaaguauacuacuaguagauuuauuaccgacacauuucgaacacaauguagaucuaaguagagcaauaaacguaaauggaguaucauuuaauaauguagauacaucgucacuaggagcagcacaaguaagacaaagugcaucaagaggaagaggauuaggagaaaaaccaaaagaaggagcagauaaagaaaaaaagaaagaaaaagaaaaagaaaaagaagaagaaccaaaaaaaccaaaugaaaauaaauuaaagcaaccggagcaaccagcagcaggagcaggaggagaacaaccggcagcgggagcagguggagaacaaccagcagcaggagcaggaggugaacaaccagcagcaggcgcuagaggagagcaaccagcagcaggagcgggaggggaacaaccagcagccggggcgggaggagaacaaccagcagcaggagcaggaggagaacaaccagcagccggggcaggaggagaacaaccagcagcuggagcaggaggggaacaaccagcagcaggagcuaggggggagcaaccagcagcaggagcaggaggugaacaaccagcagcaggagcuggaggagaacaaccagcagcaggggcaagaggagaacaaccagcagcaggugcaggaggagaacaaccagcaccagcaccuagaagagaacaaccagcaccgggagcaggagcaggugauggagcuagaggaggaaaugcaggugcaggaaaaggucaaggacaaaauaaucaaggagcgaauguaccaaaugaaaaagugguaaaugauuauuugcacaaaauaagaagcaguguaacaaccgaauggacgccguguaguguaacaugugggaauggaguaagaauacgaagaaaaggacaugcaggaaacaaaaaagcagaagacuuaacaauggaugauuuagauguggaagcauguguaauggauaaaugugcaggaauauuuaauguaguuaguaauagccuaggauugguaauauuauuaguacuagcauuauuuaauuaa

SEQ ID NO: 5602 - RNA, 1056 nt, Artificial Sequence
  derived and/or modified CDS sequence (opt6) from Pk(LT51)__ADN94540.1__CSP
augaaaaauuuuauauuauuagcaguaaguucaauuuuacuaguagauuuacuaccaacucauuucgaacauaauguagaucuaaguagggcuauaaauguaaauggaguaaguuuuaauaauguagauacaaguucauuaggagcagcacaaguaagacaaucagcaucaagaggaagaggauuaggagaaaaaccaaaagaaggugcagauaaagaaaaaaaaaaagaaaaagagaaagaaaaagaagaagagccgaaaaaaccgaaugaaaauaaauuaaaacaaccugaacaaccugcagcaggagcgggaggagagcaaccagcagcaggagccgggggagaacaaccggcagcgggagcagggggagaacaaccagcagcaggugcaggaggagaacaaccagcagcaggagcgggaggagaacaaccagcagcaggagcgggaggugaacaaccggcagcaggagcaagaggagaacaaccagcagcgggagcaggaggagaacaaccagcggcaggagcggggggagaacaaccagccgcaggagcaagaggagaacaaccggcagcaggagcaggaggagaacaaccagcagcaggagcugguggagaacagccagcaccagcaccaagaagagaacaaccagcagcaggugcagguggagaacaaccagcaccagcaccaagaagagaacaaccagccccaggagcaggcgcaggagauggagcaagaggaggaaaugcaggagcaggaaaaggacaaggacaaaauaaccaaggagcaaauguaccaaaugaaaaaguaguaaaugauuauuuacauaaaauaagaaguaguguaacaacagaauggacaccauguagugugacauguggaaauggaguaagaauaagaaggaaagggcaugcaggaaauaaaaaggcggaagauuuaacaauggacgacuuagaaguugaagcauguguaauggauaaaugugcaggaauauuuaacguaguaaguaauucauuaggcuuaguaauacuauuaguauuagcauuauuuaauuaa

SEQ ID NO: 5603 - RNA, 1056 nt, Artificial Sequence
  derived and/or modified CDS sequence (opt6) from Pk(UM0029C9)__AHF20652.1__CSP
augaaaaauuuuauauuauuagcagugagcaguauauuacuaguagaucuauuaccaacucauuucgaacacaauguugaucuaucaagagcaauaaauguaaacggaguaucauuuaauaauguagacacaaguagucuaggagcagcucaaguaaggcaaagugcaaguagaggaagagguuuaggagaaaaaccaaaagaaggagcagacaaagaaaaaaaaaaagagaaagaaaaagaaaaagaagaagaaccaaaaaaaccgaaugaaaauaaacuaaaacaaccagagcaaccugcagcaggagcaggaggagaacaaccagcggcaggagcagggggagaacaaccagcagcaggagcaggaggagaacaaccugcagcaggagcgggaggagaacaaccugcagcaggagcaagaggggaacaaccagcagcaggagcaggaggagaacaaccugcagcaggagcaagaggagagcaaccggcugcaggagcuggaggugaacaaccagcagcaggggcagggggagaacaaccagcugcgggagcaggaggagaacaaccagcugcaggagcaagaggagaacaaccagcagcaggagcaggaggagaacaaccagcaccagcaccaagaagagaacaaccagcagcaggagcagggggagaacaaccugcaccagcaccaagaagagaacaaccagcaccaggagcaggagcaggugauggagcuagagaagggaaugcaggggcgggaaaaggacaaggacaaaauaaucaaggagcaaaugugccaaaugaaaaaguuguaaaugauuauuuacauaaaauaagaaguaguguaacaacagaauggacaccaugcagcguuacauguggaaauggaguaagaauuagaagaaaaggacaugcuggaaauaaaaaagcagaggauuugacaauggaugaucuagaaguagaagcauguguaauggauaaaugugcaggaauauucaauguuguaagcaauagcuuaggguuagugauauuauuaguauuagcacuauuuaauuaa

SEQ ID NO: 5604 - RNA, 1056 nt, Artificial Sequence
  derived and/or modified CDS sequence (opt6) from Pk(UM0050C7)__AHF20665.1__CSP
augaaaaauuuuauauuacuagcaguaucaaguauauuacuaguagauuuacuaccaacacauuuugaacauaacguagauuuaaguagagcgauaaaugugaauggaguaagcuucaauaauguagauacgucaaguccaggagcggcacaaguaagacaaagugcaaguagaggaagaggacuaggagaaaaaccaaaagaaggagcagacaaagaaaaaaaaaaagaaaaagaaaaggaaaaagaagaagaaccaaaaaagccaaaugagaacaaauugaaacaaccagaacaaccagcagcgggagcaggaggagaacaaccagcagcaggagcaggaggagaacaaccagcagcuggggcaggaggagaacagccggcggcaggggcaggaggagaacaaccagcagcaggagcaagaggagaacaaccagcagcgggugcaggcggagaacaaccagcggcgggagcaaggggagagcaaccagcagcaggagcagggggagaacaaccugcagcgggagcaggaggagaacaaccagcagcgggagcaggaggagaacaaccagcagcaggagcgggaggagagcaaccagcagcgggugcaggaggggaacaaccagcaccugcaccaagaagagaacaaccagcagcaggagcaggaggagagcaaccagcacccgcaccaagaagagaacaaccagcuccaggugcaggagcaggagauggagcaagaggaggaaacgcaggagcagggaaaggacaaggacaaaauaaucaaggagcaaauguaccaaaugaaaaaguuguaaaugauuauuuaaggaaaauaagaaguaguguaacaacggaauggacaccgugcaguguaacauguggaaaugguguaagaauaagaagaaaagggcaugcagggaacaaaaaagcagaagaccuaacaauggaugaucuagaaguagaagcauguguaauggauaaaugugcaggaauauuuaacguaguaaguaauucacuaggauugguaauacuauuagucuuggcauuauuuaauuaa

SEQ ID NO: 5605 - RNA, 1056 nt, Artificial Sequence
  derived and/or modified CDS sequence (opt6) from Pk(UMHEC1)__AHF20620.1__CSP
augaaaaacuuuauauuauuagcaguaaguaguauacuauuaguagauuuauuaccaacacauuuugaacacaauguagauuuaaguagagcaauaaauguaaauggcguaaguuuuaauaauguggauacuucgaguuuaggagcagcgcaaguaagacaaagugcaaguagaggaagaggauuaggcgaaaaaccaaaagaaggggcagacaaagaaaaaaaaaaagaaaaagaaaaagaaaaagaagaagaaccuaaaaaaccaaaugaaaacaaauugaaacaaccagaacaaccagcagcaggagcaggaggagaacaaccagcagcaggagcaggaggugaacaaccagcagcaggagcaggaggagaacaaccagcagcaggagcaggaggagaacaaccagcagcaggggcagggggagaacagccagcagcgggagcuagaggcgaacaaccagcagcaggagcagggggagaacagccagcggcaggagcaggaggggagcagccagcagcaggagcagggggagaacagccagcagcaggagcaagaggagaacagccggcagcaggagcuggaggggaacaaccagcagcaggagcagguggggaacaaccugcaccagcaccaagaagagaacaaccagcagcaggugcaggaggagaacaaccugcaccagcuccuaggagagaacagccagcaccgggagcaggagcaggagauggagcaagagguggaaaugcgggagcagguaaaggacaaggacaaaacaaucaaggagcaaacguaccuaaugaaaaaguaguaaaugauuauuuacauaaaauaagaaguucaguaacaacagaauggacaccauguaguguaacguguggaaauggaguuagaauuaggagaaaaggacaugcaggcaauaaaaaagcagaagauuuaacaauggaugacuuagaaguagaagccuguguaauggauaaaugcgcaggaauauuuaauguaguaagcaacagcuugggauuaguaauauuauuaguauuagcauuauucaauuaa

SEQ ID NO: 5606 - RNA, 1056 nt, Artificial Sequence
  derived and/or modified CDS sequence (opt6) from Pk(UMMAC4)__AHF20621.1__CSP
augaaaaauuucauauuacuagcaguaaguaguauauuacugguagauuuauuaccuacacauuuugaacacaauguagauuuaucaagagcaauaaauguaaauggaguaaguuuuaauaauguagacacaucaaguuuaggagcagcacagguaagacaaucggcaagcaggggaagaggauuaggagaaaaaccaaaagaaggagcagauaaagaaaagaaaaaaggaaaagaaaaagaaaaagaagaagaaccaaaaaaaccaaaugaaaauaaauuaaaacaaccagagcaaccagcagcgggagcaggaggggaacaaccagcagcgggagcagggggagaacaaccagcagcaggagcaggaggagaacaaccagcagcaggagcaggaggggaacaaccagcagcgggagcaggaggagaacaaccggcggcaggugcaagaggagaacaaccagcagcgggagcaggaggagaacaaccagcagcaggagcaggaggagaacaaccagcagcaggagcaggaggagaacaaccagcagcaggagcaagaggugaacagccagcagcgggagcagggggagaacaaccagcagcgggugcugguggagaacaaccagcaccagcaccgaggagagaacaaccagcggcaggggcaggaggggagcaaccagcaccagcaccaagaagggaacaaccagcaccaggagcaggagcaggagacggagcgagaggaggaaaugcaggagcaggaaaaggacaaggacaaaauaaucaaggagcaaauguaccgaaugagaaaguggugaaugauuauuuacauaaaauaaggaguucaguaacaacagaauggacuccauguaguguaacauguggaaauggaguaagaauuagaaggaaagggcacgcaggaaacaaaaaagcagaagaucuaacaauggaugauuuagaaguagaagcauguguaauggauaaaugugcuggaauauuuaauguaguaucaaauagcuuaggauugguaauauuauugguauuagcacuauuuaauuaa

SEQ ID NO: 5607 - RNA, 1056 nt, Artificial Sequence
  derived and/or modified CDS sequence (opt6) from Pk(UMMEC8)__AHF20623.1__CSP
augaaaaacuuuauauuauuagcaguaaguaguauacuauuaguagauuuauuaccgacucauuuugaacauaauguagauuuaaguagagcaauaaauguuaacgggguaucauuuaauaauguagauacaucaagucuaggagcagcacaaguaagacaaagugcaaguagaggaagaggauuaggagagaaaccaaaagaaggagcagauaaagaaaaaaagaaagagaaagaaaaagaaaaagaagaagaaccaaaaaaaccaaacgaaaacaaauuaaaacaaccagaacaaccagcagcuggugcaggaggagaacaaccagcagcaggcgcagguggagaacaaccagcggcaggagcagggggagaacaaccagcagcaggagcaggaggagaacaaccagcagcaggagcaggaggagaacaaccagcagcaggagcaagaggggaacaaccagcagcaggagcugggggagaacaaccagcagcaggagcaggaggagaacaaccagcagcaggagcaggaggagaacaaccagcagcuggagcaagaggagaacaaccagcagcaggagcaggaggggaacaaccagcagcaggagcaggaggagaacaaccagcgccagcaccaagaagagaacaaccagccgcaggagcaggaggagaacaaccagcaccggcaccaagaagagaacaaccugcaccaggcgcuggugcaggagauggugcaagaggagggaaugcuggagcaggaaaaggacaaggacaaaauaaucaaggagcaaacguaccgaaugaaaaaguaguaaaugacuauuuacauaaaacaagaaguucaguaacaacagaauggacaccaugcaguguaacaugcggaaauggaguaaggauaagaagaaaagggcacgcaggaaauaaaaaagcugaagacuuaacaauggacgauuuagaaguagaagcauguguaauggacaaaugugcaggaauauuuaacguaguaagcaauaguuuaggauuaguaauauuacuaguauuagcacuauuuaauuaa

SEQ ID NO: 5608 - RNA, 1050 nt, Artificial Sequence
  derived and/or modified CDS sequence (opt6) from Pk(MPG45)__ACD86467.1__CSP
augaaaaauuuuauuuuauuagcaguaucaaguauauuauuaguugaccuauuaccaacacauuuugaacauaauguagaccuaucaagagcaauaaauuuaaacggaguaaguuuuaauaauguagauacaaguucacuaggagcagcacaaguaagacaaagugcgucaagaggaaggggacuuggagaaaaaccaaaagaaggagcagauaaagaaaaaaaaaaagaaaaagauaaagaggaagaaccaaaaaaaccaaaugaaaauaaauuaaaacaaccaaaugcaggacaaccgcaagcacaaggagauggagcaaacgcaggacaaccucaagcacaaggagauggugcgaacgcaggacaaccacaggcacaaggagacggagcaaacgcaggacaaccacaagcacaaggagauggcgcaaaugcaggacaaccacaagcacaaggagauggagcaaacgcaggacaaccgcaagcccaaggagauggagcaaaugcaggacaaccacaagcacaaggagacggagcaaaugcaggacaaccacaagcacaaggggauggggcaaaugcagggcaaccacaagcgcaaggagacggagcaaaugcaggacaaccacaagcacaaggagauagagcaaacgcaggacaaccacaagcacaaggagauggagcaaauguaccaagacaaggaaggaauggaggaggagcaccagcaggaggaaaugaaggaaauaaacaagcaggaaagggacaaggacaaaauaaucaaggagcaaaugcaccaaaugaaaaaguaguaaaugacuauuuacaaaaaauaaggaguaguguaacaacggaauggacaccauguaguguaacguguggaaaugguguacggauaaggagaagagcacacgcagacaaaaaaaaagcagaagaucuaacaauggaugauuuagaaguagaagcaugcguaauggacaaaugugcaggaauauucaauguagugaguaauaguuuaggauuaguaauauuauuaguauuagcauuauuuaauuaa

SEQ ID NO: 5609 - RNA, 1044 nt, Artificial Sequence
  derived and/or modified CDS sequence (opt6) from Pk(KH462)__ADN94491.1__CSP
augagaaauuuuauauuacuagcaguaucaucaauauuauuaguagauuuacuaccaacacauuuugaacacaauguagacuuaucaagagcaauuaauguaaauggugugaguuuuaauaauguagauacaaguaguuugggagcagcacaaguaagacaaucagcaucgagaggucgaggacuaggagaaaaaagaaaagaaggagcagauaaagaaaaaaaaaaagaaaaagaagaagaaccaaaaaaaccaaacgaaaauaaauuaaaacaaccagaacaagcagcaccuggagcaggaggagaacaaccagcaccaggagcaggaggagaaagaccagcaccaggagcaggaggagaacaaccagcaccaggugcaggaggagaacaaccagcaccaggagcaggaggagaacaaccagcaccaggagcaggaggagaacaaccugcaccaggagcaggaggugaaagaccagcaccuggagcaggaggagaacaaccagcaccuggagcaggaggagaaagaccagcaccuggugcagggggagaacaaccagcaccaggagcagguggagaaagaccagcaccaggggcaggaggagaacaaccagcaccuggagcaggaggggaacaaccugcaccaggagcaggaggagaacaaccugcaccagcaccgagacgcgaacaaccagcaccagcacccggagcaggagacggagcaagaggagguaaugcaggagcaggaaaaggacaaggacaaaacaaucaaggagcaaacguaccgaaugaaaaaguaguaaaugauuaucuacacaagauaaggaguaguguaacaacagaauggacaccuuguagcgucacauguggcaauggaguaagaauuagacgaaaagcacacgcagauaaaaaaaaagcagaagaucuaacaauggaugacuuagaaguagaagcauguguaauggauaaaugugcaggaauauucaaugugguaaguaauagcuuaggacuaguuauauuguuaguguuagcauuauuuaauuaa

SEQ ID NO: 5610 - RNA, 1044 nt, Artificial Sequence
  derived and/or modified CDS sequence (opt6) from Pk(LT3)__ADN94521.1__CSP
augagaaauuuuauauuauuagcuguaaguaguauauuauuaguagauuuauuaccaacacauuuugaacacaacguagauuuaucaagagcaauaaauguaaaugggguaagcuuuaauaauguagauacaaguaguuuaggagcagcacaagugcgacaaagugcaaguagagggagaggauuaggggaaaaaagaaaagaaggugcagauaaagaaaaaaaaaaagaaaaagaagaagaacccaaaaaaccaaacgaaaauaaauuaaaacagccagaacaagcagcaccgggugcagggggagaacaaccugcaccaggagcaggaggagaacaaccagcaccaggagcaggaggagaaagaccagcaccaggagcgggaggagaacaaccugcgccaggggcgggaggagaacagccggcaccaggagcuggaggagaaaggccagcuccaggagcggguggggaacaaccugcaccuggagcaggaggagaacaaccagcaccaggagcgggaggagaacaaccagcaccaggagcaggaggagaacaaccagcaccaggagcuggaggugaauuaccagcaccaggagcaggaggugaaagaccagcuccaggagcagguggagaacaaccugcaccaggagcaggaggagaacaaccagcuccagcaccaagaagagaacaaccagcaccgggaccaggagcaggcgauggagcaagagguggaaaugcaggagcaggaaaaggacaaggacaaaauaaccaaggagcuaauguaccaaaugaaaaaguaguaaaugauuauuuacauaaaauaagaaguaguguaacaacggaauggacuccguguagugugacauguggaaacgggguaagaauaagaagaagacaaaaugcaggaaauaaaaaagcggaagaucuaacaauggaugauuuagaaguagaagcauguguaauggauaaaugugcaggaauauucaauguaguaaguaauucguuaggauuagucauauuauuaguacuagcacuauuuaauuaa

SEQ ID NO: 5611 - RNA, 1044 nt, Artificial Sequence
  derived and/or modified CDS sequence (opt6) from Pk(LT33)__ADN94529.1__CSP
augagaaauuucauauuauuagcaguaaguucaauauuauuaguggauuuauuaccaacacauuuugaacauaauguagacuuaaguagagcaauaaauguaaauggaguaaguuuuaauaauguagauacaucaagcuuaggugcagcgcaaguaaggcaauccgcaucaagagggagaggacuaggagaaaaaagaaaagaaggagcagauaaagaaaaaaaaaaagaaaaagaagaagaaccaaaaaaaccaaaugaaaacaaacuuaaacaaccagaacaagcagcaccaggagcagggggagaacaaccagcaccaggagcagguggugaaaggccagcgccaggagcaggaggagaacaaccagcaccaggagcaggaggagaacaaccagccccaggagcaggaggagaacaaccagcuccaggagcaggaggagaacaaccugcaccaggagcaggaggagaaagaccagcaccaggagcaggaggagaacaaccagcaccaggagcaggaggagaacaaccagcaccaggugcaggaggagaacaaccagcaccaggugcaggaggugaaagaccagcaccaggagcaggaggugaacaaccagcaccaggagcaggaggggaacgaccagccccaggagcaggaggugaacaaccagcaccagcaccuaggagagaacaaccagcaccagguccgggugcaggagauggagcacgaggaggaaaugcaggagcagggaaaggacaaggacaaaauaaucaaggagcaaacguaccaaacgaaaaaguaguaaaugacuacuuacauaaaauuagaaguaguguaacuacggaauggacaccauguaguguaacauguggaaauggaguucguauaagaaggagacaaaaugcaggaaauaaaaaggcagaggauuuaaccauggaugauuuagaaguagaagcaugcguaauggauaaaugugcaggaauauuuaauguaguaagcaauagccuaggacuaguuauacuguuagugcuagcauuauuuaauuaa

SEQ ID NO: 5612 - RNA, 1044 nt, Artificial Sequence
  derived and/or modified CDS sequence (opt6) from Pk(LT33)__ADN94527.1__CSP
augaaaaauuucauauuauuagcaguaucaaguauauuauuaguagauuuauuaccaacacauuucgaacauaauguagauuuaaguagagcaauaaauguaaauggaguaagcuuuaauaauguagauacaaguucauugggagcggcacaaguuaggcaaucagcuucaagaggaagaggauuaggagaaaaaaggaaagaaggagcagauaaagaaaaaaaaaaagaaaaagaagaagaaccaaaaaaaccaaaugaaaauaaacuaaaacaaccagaacaagcagcaccuggagcaggaggggagcaaccagcaccaggagcaggcggcgaaagacccgcaccaggggcaggaggugaacaaccagcaccuggagcaggaggagaacaaccagcaccaggagcugggggagaacaaccagcaccuggggcggggggagaacaaccagcgccaggagcaggaggagaaagaccagcgccuggagcaggaggagaacaaccagcaccaggagcagggggagaacaaccagcaccuggagcaggaggagaacaaccugcaccaggagcagggggagaaagaccagcaccuggagcaggaggagaacaaccagcuccaggagcuggaggggaaagaccagcaccaggagcaggaggugaacaaccagcgccagcgccaagaagagaacaaccagcaccaggaccaggagcaggagauggagcgagaggaggaaaugcaggggcagggaaaggacaaggacagaauaaucaaggugcaaauguaccaaaugaaaaagugguuaacgauuacuuacauaaaauaagaaguaguguaacaacagaauggacaccauguaguguaacauguggaaauggagugagaauaagaagaagacaaaaugcagggaauaaaaaagcagaagauuuaacaauggaugauuuagaaguugaagcauguguaauggauaaaugugcuggaauauucaauguuguaagcaauaguuuaggauuaguaauucuauuaguauuagcauuauuuaauuaa

SEQ ID NO: 5613 - RNA, 1044 nt, Artificial Sequence
  derived and/or modified CDS sequence (opt6) from Pk(TN029)__AFG25482.1__CSP
augagaaauuuuauauuauuagcaguaagcagcauuuuauuaguagauuuauuaccaacacauuuugaacauaauguagaucuaaguagggcuauaaacgugaacggagugaguuuuaauaacguagauacaaguaguuuaggagcggcacaaguaaggcaaagugcaaguagaggaagaggauuaggagaaaaaagaaaagaaggagcggacaaagaaaaaaaaaaagaaaaagaggaagagccaaaaaaaccgaacgaaaauaaauuaaaacaaccagaacaagcggcgccaggagcaggaggagaacaaccagcaccaggggcagggggggaacaaccggcaccaggagcaggaggagaaagaccagcaccaggagcaggaggagaacaaccggcaccaggugcaggaggagaacaaccagcaccaggggcaggaggagaaagaccggcuccaggagcaggaggagaacaaccagcaccaggagcaggaggagaacaaccagcaccaggagcaggaggugaacaaccagcgccaggagcaggaggagaacaaccggcaccaggagcaggaggagaaagaccagcacccggagcagguggagaaagaccagcaccaggggcaggaggagaacaaccagcaccaggugcaggaggagaacaaccagcaccagcaccaagaagggaacaaccagcaccaggaccaggagcaggagacggagcaagaggagguaaugcaggcgcagggaaaggacaaggacaaaauaaucaaggagcuaauguaccaaaugaaaaaguaguaaacgauuaucuacauaaaauaagaucaaguguaacaacagaauggacaccauguucagugacgugcgggaauggaguaagaauaagaagaagacaaaaugcaggaaauaaaaaagcggaagauuuaacgauggaugauuuagaaguggaagcauguguaauggauaaaugcgcagguauauuuaacguaguaagcaauaguuuaggauuaguuauacucuuaguguuagcauuauuuaauuaa

SEQ ID NO: 5614 - RNA, 1041 nt, Artificial Sequence
  derived and/or modified CDS sequence (opt6) from Pk(LT53)__ADN94501.1__CSP
augaagaauuuuauauuauuagcaguaagcagcauacuauuaguagauuuauuaccaacacauuuugaacauaauguugacuuaucaagagcgauaaacguaaacggaguaaguuucaauaacguagacacaucaucacuaggagcggcacaaguaagacaaucagcaagcagaggaagaggacuaggagaaaaaccaaaagaaggagaugacaaagaaaaaaaaaaagaaaaagagaaagaagaagaaccaaaaaauuuaaaugagaacaaaccaaaacaaccgaaugcagaaggagauggagcaaaaccuaaacaaccaaaugcugaaggagauggagcaaaauuaaaacaaccaaaugcagaaggagauggagcaaaauuaaaacaaccaaacgcggaaggggauggaggaaacgcaagacaaccaaaugcagaaggagauggaggaaacgcaagacaaccaaaugcugaaggagacggaggaaacgcaagacaaccaaaugcagaaggagauggaggaaaugcuagacaaccaaaugcagaaggagauggaggaaaugcaaggcaaccaaaugcagaaggagauggagggaaugcaagacaaccaaaugcagaaggagauggcggaaaugcaagacaaccaaaugcagaaggagauggcgcaaaugcaagacaaccacaggccgaaggaggaggagggaacgcaagacaaggagguaaugaagggaacaaacaagcaggaaaaggacaaggacaaaauaaccaaggagcaaacgcuccaaaugaaaaagugguaaaugauuacuuacaaaaaauaagaaguagcguaacaacagaauggacaccauguaguguaacauguggaaauggaguaagaauaagaagaagggcacacgcggauaaaaaaaaagcagaagauuuaacaauggaugaccuagaaguagaagcgugcguaauggacaaaugugcaggaauauuuaauguaguaagcaauagcuuaggauuaguaauacuacuaguccucgcacuauuuaauuaa

SEQ ID NO: 5615 - RNA, 1041 nt, Artificial Sequence
  derived and/or modified CDS sequence (opt6) from Pk(UMOTC3)__AHF20624.1__CSP
augaaaaauuuuauauuacuggcugugucaaguauacuauuaguagaucuauuaccaacacacuuugagcauaauguagauuuaagucgagcaauuaacguaaacggaguaaguuuuaauaauguagauacaucaucacuaggagcagcacaaguaagacaaagugcaaguagagggagaggauuaggagaaaaaccaaaagaaggggcagauaaagaaaaaaaaaaagaaaaagaaaaagaagaagaaccaaaaaaaccaaacgaaaauaaauuaaaacaaccggaggggaauagagaagcaccaggacagccagaaggaaacagagaagcaccaggucaaccagaagggaauagagaagccccaggacaaccagaaggaaaucgagaagcgccaggacaaccggaaggaaaucgagaagcaccagggcaaccagaaggaaauagagaagcuccaggacaaccggaaggaaacagagaagcgccaggacaaccagaagggaauagagaagcaccaggacagccagaagggaacagagaagcaccagcacaaccagaaggaaauagagaagcaccaggacaaccagaaggaaauagagaagcaccagcacaaccacaaggaaauggaggagcaggacaagcacaaccagaagaaaauagagaagcaccggcacaaccgcaaggaaauggaggagcaggacaagcacaaccgcaaaaaaaugaaggcggaaaugcgggagcaagaaaaggacaaggacaaaauaaccaaggcgcaaauguaccaaaugaaaaaguaguuaaugauuauuugcacaaaauaagaaguaguguaacaacagaauggacaccguguaguguuacauguggaaauggaguaagaauaaggagaaaaggacaugcaggaaacaaaaaagcagaagacuuaacaauggaugauuuagaaguggaagcauguguaauggauaaaugugcaggaauauucaauguaguaucaaacaguuuaggauuaguaauauuacuaguaccagcacuauuuaauuaa

SEQ ID NO: 5616 - RNA, 1038 nt, Artificial Sequence
  derived and/or modified CDS sequence (opt6) from Pk(UMSY2C2)__AHF20625.1__CSP
augaaaaacuuuauacuacuagcaguaaguaguauacuauuaguagauuuauuaccgacacacuuugaacauaacguugauuuaagcagagcaauaaauguaaauggugugagcuuuaauaacguagacacaaguucucuaggagcagcacaaguaagacaaagcgcuaguagaggcagaggacuaggagaaaaaccaaaagaaggagcagauaaagaaaaaaaaaaagaaaaagagaaagaagaagaaccaaaaaaaccaaacgaaaauaaauuaaaacaaccagaaggaaauagagaagcaccaggacaaccggaaggaaauagagaagcgccaggacaaccagaaggaaauagagaagcaccaggacaaccagaaggaaacagagaggcaccaggacaaccagaaggaaauagagaagcaccaggacaaccagaagguaauagagaagcaccaggacaaccagaaggaaacagagaagcaccaggacaaccggaaggaaauagagaagcaccaggacagccggaaggaaacagagaagcaccaggacaaccagaaggaaaucgggaagcaccagcacaaccagaaggaaacagagaagcaccuggacaaccugaaggaaaucgagaagcaccagcacaaccagaaggaaauagagaagcaccagcacaaccacaaggaaauggaggggcaggacaagcacaaccucaaaaaaaugaagggggaaaugcaggagcaagaaaaggacaaggacaaaacaaucaaggcgcaaaugcaccaaacgaaaaaguaguaaaugauuaucuacaaaaaauaaggucaagugugacaacagaauggacaccuuguucaguaacaugcggaaacggaguaagaauaaaaagaaaagcacaugcagauaaaaaaaaggcugaagaucuaacaauggaugacuuagaaguagaagcaugcguaauggauaaaugugcgggaauuuuuaacguagugaguaacaguuuaggacuaguaauauuauuaguacuagcauuauuuaacuaa

SEQ ID NO: 5617 - RNA, 1029 nt, Artificial Sequence
  derived and/or modified CDS sequence (opt6) from Pk(KN045)__AFG25467.1__CSP
augaaaaauuuuauauuacuugcaguaucaaguauauuauuaguagacuuauuaccgacacauuuugaacauaauguagacuuaaguagagcuauaaacguuaacggaguaaguuuuaauaauguagauacaaguagcuuaggagcagcgcagguaagacaaagugcgaguagagguagagguuuaggagaaaaaccaaaagaaggagcagauaaagaaaaaaaaaaagaaaaagaaaaagaaaaagaagaagaaccgaaaaaaccaaaugaaaauaaguugaaacaaccagaacaaccagccgcaggagcaggaggagaacaaccggcagcaggugcuggaggagaacaaccagcagcaggagcgggaggagaacaaccagcagcaggagcaggaggagaacaaccagcagcaggagcagggggugaacaaccagcagcaggagcaaggggggaacaaccagcagcaggagcaggaggugaacaaccagcagcaggagcgggcggagaacaaccagcagcgggagcaagaggagaacaaccagcagcaggagcaggaggugaacaaccagcagcaggagcaggaggagaacagccagcaccagcaccgagaagagagcaaccagcagcaggagcaggaggagaacaaccggcgccagcaccaagaagagaacaaccagcaccaggggcaggggcaggagauggugcacgagguggaaaugcaggagcaggaaaagggcaaggacaaaacaaucaaggagcaaacguaccaaaugaaaaaguaguaaaugauuauuuacauaaaauaagaaguaguguaacgacggaauggacaccguguaguguaacaugcggaaauggagugagaauaagaagaaaaggucaugcaggaaauaaaaaagcagaagauuuaacaauggaugauuuagaaguagaagcauguguaauggauaaaugugcaggaauauuuaauguaguaaguaacaguuuaggacuaguaauauuauuaguauuagcacuauucaauuaa

SEQ ID NO: 5618 - RNA, 1029 nt, Artificial Sequence
  derived and/or modified CDS sequence (opt6) from Pk(LT48)__ADN94515.1__CSP
augaaaaauuucauauuauuagcgguaucaaguauauuauuaguagaucuacuaccaacacauuuugaacauaauguagauuuaagcagagcaauaaauguaaauggaguaaguuuuaauaauguagauacaaguucauuaggagcagcgcaaguaagacaaagugcgaguagaggaagaggauuaggagaaaaaccaaaagaaggagcagacaaagaaaaaaaaaaagagaaagaaaaagaaaaagaagaagaaccaaaaaaaccaaacgaaaauaaauuaaaacaaccagagcaaccagcugccggagcaggaggagaacaaccagcagcaggagcaggaggagaacaaccugcagcaggugcaggaggggaacagccagcggcuggagcuggaggagaacaaccagcagcaggagcaggaggagaacaaccagcugcaggagcagggggagaacaaccagcagcaggagcagguggagaacaaccagcugcaggagcagggggagaacaaccagcagcuggagcaagaggagaacaaccggcagcuggugcuggaggagaacaaccagcagcaggagcaggaggagaacagccagcuccagcaccaagaagggaacagccagcagcaggagcagggggagaacaaccagcaccagcaccgagaagagaacaaccagcuccaggagcgggagcaggagauggagcaagaggaggaaaugcaggagcaggaaaaggacaaggacaaaauaaucaaggagcaaauguaccaaaugaaaaaguuguaaaugauuauuuacacaaaauaagaaguucuguaacaacagaauggacaccuugcaguguaacaugcggaaacgguguacgaauaagaaggaagggacaugcgggaaauaaaaaagcagaagauuuaacgauggaugauuuagaaguagaggcauguguaauggacaaaugugcaggaauauuuaauguaguuucaaauucauuaggguuaguaauauuauuaguauuagcuuuauuuaauuaa

SEQ ID NO: 5619 - RNA, 1029 nt, Artificial Sequence
  derived and/or modified CDS sequence (opt6) from Pk(TB073)__AFG25476.1__CSP
augaggaauuuuuuuuuuuuagcaguaucaagcauauuauuaguagauuuauuaccaacacauuuugaacauaauguggauuugagcagagcaauaaacguaaauggaguuaguuucaauaacguagauacaagcagcuugggagcagcgcaaguuagacaaagugcaaguagaggaagaggauuaggagaaaaaagaaaagaaggagcagauaaagaaaaaaaaaaagaaaaagaagaagaaccaaaaaaaccaaacgaaaauaaauuaaaacaaccagaacaggcaagagcaggaggagaacaaccagcagcaggcggagaacaaccagcagcagggggagaacaaccagcggcuggaggggaacaaccagcagcaggaggagaacaaccagcagcaggaggagaacaaccagcugcaggaggagaacaaccagcagcagguggagaacaaccagcagcaggaggagaacaaccugcugcgggaggagaaagaccggcggcagggggagaacaaccagcagcaggaggagaaagaccugcagcagguggagaacaaccagcagcaggaggagaacaaccagcaccagcaccaagaagagaacaaccggcagcaggaggagaacaaccagcaccagcaccaagaagagaacaaccugcagcaggaggagaacaaccagcaccaggagcuggagcaggugauggagcaagaggaggaaacgcaggagcaggaaaaggacagggacaaaauaaucaaggagcaaacguaccuaacgaaaaaguaguaaaugauuauuuacauaaaacaagaaguaguguaacgacagaauggacaccaugcucaguaacauguggaaauggaguaagaauaagaagaaaagcacaugccgauaaaaaaaaagcagaaaauuuaacaauggaugauuuagaaguggaagcauguguaauggauaaaugugcaggaauauuuaauguaguaucuaauucauuaggguugguaauauuauuaguacuagcgcuauuuaauuaa

SEQ ID NO: 5620 - RNA, 1026 nt, Artificial Sequence
  derived and/or modified CDS sequence (opt6) from Pk(SGEHIWM26-Y09-60)__AFD97238.1__CSP
augaaaaacuuuauuuuauuagcaguuaguagcauacuauuaguagauuuauuaccaacacauuuugaacacaauguagauuuaucaagagcuauaaauguaaauggaguaaguuuuaacaauguggauacuucaaguuuaggagcagcgagaguaaggcaaagugcaucaagaggaagaggacuaggugaaaaaccaaaagaaggagcugauaaagagaaaaagaaagaaaaagaaaaagaaaaagaagaaccaaagaaaccaaaugaaaauaaacuaaaacaaccagaacaaccagcagcaggagccggaggagaacaaccagcagcaggagcaggaggagaacaaccagcagcaggagcaggaggagaacaaccggcugcaggagcaggaggagaacaaccugcggcaggagcaggaggagaacaaccagcagcaggagcaggaggugaacaaccagcagcaggagcaggaggugaacaaccagcagcaggagcaggaggagaacaaccggcagcaggagcgggaggugaacaaccagcagcaggagcaggaggagaacaaccagcagcuggugcaggaggggaacaaccagcaccagcaccaagaagagaacaaccagcagcaggagcaggcggggaacaaccagcaccagcaccgagaagggaacaaccggcaccaggugcuggagcaggagauggagcaagaggaggaaaugccggugcaggaaaaggacaaggacaaaauaaccaaggagcaaauguaccaaacgaaaaaguaguaaaugauuaucuacauaaaauaagaaguaguguaacaacggaauggacaccauguucaguaacauguggaaauggaguaagaauuagaagaagacaaaaugcaggaaacaagaaagcagaggauuuaacgauggacgaccuagaaguagaagcaugcguaauggauaaaugcgcaggaauauuuaacguagugucaaauaguuuagguuuaguuauauugcuaguacuagcacuauuuaauuaa

SEQ ID NO: 5621 - RNA, 1026 nt, Artificial Sequence
  derived and/or modified CDS sequence (opt6) from Pk(SGEHIWM35-Y09-74)__AFD97243.1__CSP
augaaaaauuucauauuauuggcaguaaguucaauacuauuaguagacuuauuaccaacacauuuugaacauaauguagauuuaaguagggcaaucaauguaaacggaguaucauuuaauaauguugauacaucaucguugggagcggcacaggugagacaaagugcaaguagaggaagaggauuaggagaaaaacccaaagaaggagcagauaaagaaaaaaaaaaagaaaaagaaaaagaaaaagaagaaccaaaaaaaccaaaugaaaauaaacuaaaacaaccagaacaaccagcagcaggagcaggaggagaacaaccagcggcgggagcaggaggagaacaaccagcagcaggagcaggaggagaacaaccagcagcaggagcaggaggagagcaaccagcagcaggagcaggaggagaacaaccggcagcaggagcagguggagaacaaccagcagcaggagcaggaggagaacaaccagccgcuggagcagggggagaacaaccagcagcaggagcaggaggagaacaaccggcagcaggagcuggaggagaacaaccggcagccggggcaggaggagaacaaccagcgccagcaccaagaagagaacaaccagcagcaggagcaggaggagaacaaccagcgccagcaccaagaagggaacaaccagcaccaggggcaggagcaggugauggagcaagaggaggaaaugcaggugcaggaaaaggacaaggacaaaacaaucaaggggcaaauguaccaaaugaaaaaguagugaaugauuacuuacacaaaauaagaaguucaguuacaacagaauggacgccaugcaguguaacauguggaaauggaguaagaauaagacgaagacaaaacgcaggaaauaaaaaagcagaagauuugacaauggaugauuuagaaguugaagcaugcguaauggauaaaugugcaggaauauucaauguaguaaguaauagccuaggauuaguaauacuauugguauuagcacuauuuaauuaa

SEQ ID NO: 5622 - RNA, 1023 nt, Artificial Sequence
  derived and/or modified CDS sequence (opt6) from Pk(UM0014C4)__AHF20645.1__CSP
augaaaaauuuuauauugcuagcaguaaguaguauuuuauuaguagauuuacuaccaacacauuuugaacauaauguggacuuaaguagagcaauaaacguaaauggaguaaguuuuaauaauguagauacaaguucauuaggagcugcacaaguuagacaaagugcaucaagaggaagaggucuaggagaaaaaccgaaagaaggugcagauaaagaaaaaaaaaaagaaaaagaaaaagaagaagaaccaaaaaaaccaaaugaaaauaaauuaaaacaaccagaacaagcgcgaccaggagcaggaggagaacaaccagcgccgggagcagguggagaacaaccagcaccaggagcaggaggggagcaaccagcaccaggagcaggaggagaacaaccagcaccaggagcaggaggagaacaaccagcaccaggagcuggaggagaacaaccagcaccaggagcgggaggagaacaaccagcaccaggggcaggaggagagcaaccagcuccaggagcgggaggagggcaaccagcaccgggagcaggaggagaacaaccagcaccaggagcagguggagaacaaccagcaccagcgccaagaagagaacaaccagcaccaggaccaggaggggaacaaccagcaccagcaccuagaagagaacaaccagcaccgggagcgggagcaggagauggagcaagaggaggaaaugcaggagcuggaaagggacaaggacaaaauaaucaaggagcaaaugugccaaaugaaaaaguaguaaaugauuauuuacacaaaauaagaaguucaguaacaacagaauggacaccauguaguguaacaugugguaacggaguaagaauaagaagaaaaggacacgcagguaacaaaaaagcagaagacuuaacaauggaugaucuagaaguugaggcauguguaauggauaaaugcgcagguauauucaauguaguaagcaauagccuaggauuaguaauacuacugguauuagcauuauucaauuaa

SEQ ID NO: 5623 - RNA, 1020 nt, Artificial Sequence
  derived and/or modified CDS sequence (opt6) from Pk(LT57)__ADN94510.1__CSP
augaaaaauuuuauacugcuagccguaucaucgauauuauuaguagacuugcuaccuacgcauuucgaacacaauguagaucuaagcagagcgauaaauguaaauggaguaaguuuuaauaauguagauacaaguaguuuaggagcagcacagguaagacaaagcgcaagcagaggaagaggauuaggagaaaaaagaaaagaaggagcagauaaagaaaaaaaaaaagaaaaagaagaaccaaaaaaaccaaaugaaaauaaauuaaaacaaccagaacaagcgagagcaggaggagaacaaccagcagcaggaggggaacaaccagcagcaggaggagaacaaccagcagcaggaggagaacaaccagccgcaggaggagaacaaccagcagcaggaggagaacaaccagcggcaggaggagaacaaccagcagcaggaggagaacaaccagcagcagggggagagagaccagcagcaggaggagaacaaccagccgcaggaggagaacaaccagcagcuggaggagaacaaccugcagcagggggagaaagaccagcagccgggggagaaagaccagcagcuggaggagaacaaccagcagcagggggagaacaaccagcgccggcaccaagaagagaacaaccagcagcaggaggagaacaaccggcgccuggagcaggagcaggagauggagcaaggggaggaaaugcuggagcaggaaaaggacaagggcaaaauaaccaaggggcaaauguaccaaaugaaaaaguaguaaaugauuaucuacacaaaauaagaucaaguguaacaacagaauggacaccaugcaguguaacauguggaaauggagugagaauaaggagaaaagcacaugcagauaaaaaaaaagcagaaaauuuaacaauggaugauuuagaaguagaagcauguguuauggauaaaugugcaggaauauucaauguaguaagcaauucauuaggacuaguaauacuauuaguauuagcauuauuuaauuaa

SEQ ID NO: 5624 - RNA, 1020 nt, Artificial Sequence
  derived and/or modified CDS sequence (opt6) from Pk(SGEHIWM17-Y09-4)__AFD97233.1__CSP
augaaaaacuucauuuuacuagcaguaaguaguauuuuacuaguagauuuauuaccaacacacuuugaacauaauguagaucuaaguagagcaauuaauguaaaugguguaaguuuuaauaaugccgauacaaguagccuaggagcagcacaaguuagacaaagugcaaguagagguagaggucuaggugaaaaaccuaaagaaggagcagauaaagaaaaaaaaaaagagaaagaagaagaaccaaaaaaaccaaaugaaaauaaacuaaaacaaccagaugcaguuccaggaggagaagaaccugcaccaggaagagaacaaccagcaccagggagggaagaaccugcaccaggcagagaacaaccagcaccaggaagagaagaaccagcaccaggaagagaacaaccagcaccaggaagagaagaaccggcaccaggaagagaacaaccagcgccgggcagagaacaaccagcaccagggagagaagaaccagcaccaggaagagaacaaccagcaccaggaagagaagaaccagcaccaggaagagaacaaccggcaccaggaagagaacaaccagcaccuggaagggaacaaccugcaccgggaggagaacaaccagcaccaggaagagaacagcccgcaccaggaggagaacagccggcaccagcaccaggagcaggagcaggagauggagcaagaggaggaaaugcaggagcaggaaaaggacaaggacaaaauaaucagggagcaaauguaccaaaugaaaaaguaguaaaugauuauuuacauaaaauaagaucaaguguuacaacagaauggacaccauguaguguuacaugcggaaaugguguaagaauaagacgaaaaggacaugcggggaauaaaaaagcagaagauuuaacaauggaugaucuagaaguugaagcauguguuauggauaaaugugcaggaauauuuaauguaguaucaaacagcuuaggauuaguaauucuauuaguauuagcauuguuuaauuaa

SEQ ID NO: 5625 - RNA, 1020 nt, Artificial Sequence
  derived and/or modified CDS sequence (opt6) from Pk(SGEHIWM26-Y09-123)__AFD97240.1__CSP
augaaaaauuuuauauuauuagcuguaaguaguauacuauuaguagacuuauuaccaacacauuucgaacauaauguagauuuaaguagagccauuaauguaaacggaguaaguuuuaauaauguggacacaaguagucuaggagcagcacaagucagacaaagugcaaguagaggaagagguuuaggugaaaaaccaaaagaaggggcagauaaagaaaaaaaaaaagaaaaagaagaagaaccaaaaaaaccaaaugaaaauaaauuaaaacagccagacgcaguaccaggaggagaagaaccagcaccggguagggaacaaccagcaccaggacgagaagaaccagcaccaggaagagaacaaccagcaccaggaagagaagaaccagccccagguagagaacaaccagcaccaggacgagaagaaccagcuccgggaagagaacaaccagcaccaggaagagaacaaccagcaccuggaagagaagaaccagcaccaggaagagaacaaccagcaccagggagagaagaaccggcaccgggaagagaacaaccagcaccaggaagagaacaaccagcaccaggaagagagcaaccagcaccaggaggagaacaaccagcaccaggaagagaacaaccagcgccuggaggagaacaaccagcaccagcaccaggagcaggagcaggagauggagcaagaggaggaaaugcaggagcagguaaaggacaaggacaaaauaaucaaggagcaaauguaccaaaugaaaaaguaguaaaugacuaucuacauaaaauaagaaguucaguaacaacagaauggacuccauguaguguaacuuguggaaauggaguaagaauaaggagaaaaggacaugcgggaaauaagaaggcagaagaucugacaauggaugauuuagaaguagaagcauguguaauggauaaaugugcaggaauauuuaacguggugaguaacagcuugggauuaguaauauuacuaguacuagcauuauucaauuaa

SEQ ID NO: 5626 - RNA, 1020 nt, Artificial Sequence
  derived and/or modified CDS sequence (opt6) from Pk(TN003)__AFG25477.1__CSP
augaaaaauuucauacuacuagcaguaaguucaauauuauuaguagacuuauuuccaacgcacuuugaacauaauguagaccugagcagagcaauaaauguuaauggaguaaguuuuaauaauguagacacgaguucauuaggagcagcacaaguaaggcaaagugcaucaagaggacgaggacuuggagaaaaaccaaaggaaggagcagauaaagaaaaaaaaaaagaaaaagaagaaaaaccaaaaaaaccaaaugaaaauaaauuaaaacaaccagcagcaggaggagaacaaccagcagcaggaggagaacagccugcagcaggaggggaacaaccagcagcaggaggagaacaaccagcagcaggaggagaacaaccggcagcaggaggagaacaaccagcagcaggaggagaaagaccagcagcaggaggagaacagccagcagcaggaggagaacagccagcagcagggggagaaagaccagcggcaggaggagagcaaccugcagcaggaggggaaagaccggcagcgggaggagaacaaccagcagcagguggggaacaaccagcggcgggaggcgagcaaccagcaccagcaccaagaagagaacaaccaguagcaggaggagaacaaccugcaccggcaccaagaagagaacagccagcaccaggagcaggagcaggagacggagcaagagggggaaacgcaggagcaggaaaaggacaaggacaaaauaaccaaggagcaaauguaccaaaugaaaaaguaguaaaugauuauuuacauaaaauaagaaguagcguuacaacagaauggacaccaugcaguguaacauguggaaauggaguaagaauaagaagaagacaaaaugcaggaaacaaaaaagcggaagaucuaacaauggaugauuuagaaguagaagcaugcguuauggauaaaugugcaggaauauuuaauguuguaagcaacaguuuaggauuaguaauauuauuaguauuggcauuauuuaauuaa

SEQ ID NO: 5627 - RNA, 1017 nt, Artificial Sequence
  derived and/or modified CDS sequence (opt6) from Pk(LT53)__ADN94524.1__CSP
augagaaauuuuauacuauuagcaguaagcucaauacuacuaguagacuuacuuccaacacauuuugaacauaauguagacuuaaguagagccauaaauguaaacggaguaaguuuuaacaauguugauacaaguaguuuaggagcagcacaaguaagacaaucagcaucaagagguagaggacuaggagaaaaaagaaaagaaggagcagacaaagagaaaaaaaaagaaaaagaagaagaaccaaagaaaccaaacgaaaauaaauuaaaacaaccagaacaagaaagaccaggaggagaacaaccagcacccggaccaggaggagaacaaccggcaccaggaccaggaggagagcaaccagcaccaagaccaggaggagaacaacccgcaccaggaccaggcggagaacaaccugcaccaggaccaggcggagaacaaccagcaccaggaccaggaggagaacaaccagcaccuagaccaggaggagaacaaccagcaccuggaccaggaggugaacaaccugcuccaagaccgggaggagaacagccagcgccaggaccaggaggagaacaaccagcaccaagaccagguggagaacaaccugcaccaggaccaggaggagaacaaccagcaccggcaccuagaagagaacaaccagcuccagcuccaggagcaggagcgggagauggugcaagggguggaaacgcaggagcaggaaaaggacaaggacaaaauaaucaaggagcaaauguaccaaaugaaaagguaguaaaugacuauuuacauaaaauaaggucuucagugacuacagaauggacaccauguucaguaacuugugggaaugguguaagaauaagaagaaggcaaaaugcagguaacaaaaaagcagaagacuuaacaauggaugacuuggagguagaagcaugcguaauggacaaaugugcaggaauauuuaauguaguuaguaauucacuuggauuaguaauauuguuaguauuagcucuauucaauuaa

SEQ ID NO: 5628 - RNA, 1014 nt, Artificial Sequence
  derived and/or modified CDS sequence (opt6) from Pk(KH229)__ADN94485.1__CSP
augcgaaauuuuauacuacuagcaguaaguaguauucugcuaguagauuuauuaccgacucauuucgaacauaauguagauuuaaguagagcaauaaauguaaauggaguaagcuuuaacaauguugauacaaguagucuaggagcagcacaaguaagacaaagcgcaaguagaggaagaggauuaggagaaaaaccaaaagaaggagcagauaaggaaaaaaaaaaagaaaaagaggaaaagccaaaaaaaccaaacgaaaauaaacuaaaacaaccuggaggagaacagccagcggcaggaggugaacaaccagcagcaggaggcgaacaaccagcagcuggaggagaacagccagcugcaggaggagaaagaccugcggcagggggagagcaaccggcagcaggaggagaacaaccagcagcaggaggagaacaaccagcagcaggaggagaacagccggcggcagggggggaaagaccggcagcaggaggagaacagccagcagcuggaggagaacaaccagcagcaggaggagaacaaccagcagcaggaggagaaagaccagcagcaggaggagaacaaccugcaccggcaccaagaagagaacaaccagcagcaggaggggaacaaccagcaccugcaccaagaagagaacaaccagcuccgggggcaggagcgggagacggcgcgagaggaggaaaugcgggagcaggaaaaggacaaggacaaaauaaucaaggagcaaauguaccuaaugaaaaaguuguaaaugauuauuuacacaaaauaagaaguucagugacaacagaauggacaccauguaguguaacaugcggaaacggaguaagaauaagaagaagacaaaaugcgggaaacaaaaaagcagaagauuuaacaauggaugauuuagaaguagaagcuuguguaauggauaaaugugcaggaauauuuaacguaguaaguaauagucugggauuagucauauuacuaguauuagcacuauuuaauuaa

SEQ ID NO: 5629 - RNA, 1014 nt, Artificial Sequence
  derived and/or modified CDS sequence (opt6) from Pk(KH468)__ADN94487.1__CSP
augaaaaauuuuauucuauuagcaguaagcaguauacuauuaguggauuuauucccgacgcauuucgaacauaauguagauuuaaguagagcuauaaauguaaacggcguaaguuuuaauaauguagauacaaguagccuaggagcagcacaaguaagacaaagugcuaguagaggaaggggauuaggagaaaaaccaaaagaaggagcugauaaagaaaaaaaaaaagaaaaagaagaaaaaccaaagaaaccaaaugaaaauaaauuaaaacaaccuggcggagaacaaccagcagcgggaggagaacaaccagcagcaggaggggaacaaccagcagcaggaggcgaacaaccggcggcuggaggagaaagaccagcggcaggaggagaacaaccagcagcggguggagaacaaccagcagcagguggagaacaaccagcagcaggaggagaacaaccagcagcaggaggugaaagaccagcagcagguggagaacaaccagcagcaggaggugaacaaccugcugcaggaggagagagaccagcagcaggaggagaacaaccagcagcaggaggagaacaaccagcaccugcaccaaggagagaacaaccagcagcagggggggaacaaccagcaccagcgccaagaagagaacaaccagcaccaggagcaggagcaggagauggagcaagaggaggaaacccaggagcuggaaaaggacaaggacaaaauaaucaaggagcaaauguaccuaaugaaaaaguaguaaaugauuauuuacauaaaauaagaucaucaguaacaacagaauggacaccauguaguguaacuugugggaauggcguaagaauaagaagaagacagaaugcaggaaauaaaaaagcagaagauuuaacaauggaugauuuagaagucgaagcauguguaauggauaagugugcaggaauauuuaauguaguaaguaacagcuuaggacuaguaauacuauuaguauuagcauuauuuaauuaa

SEQ ID NO: 5630 - RNA, 1014 nt, Artificial Sequence
  derived and/or modified CDS sequence (opt6) from Pk(LT33)__ADN94523.1__CSP
augagaaacuuuaucuuacuagcaguaaguucgauacuauuaguagaucuauuaccaacacauuuugaacauaauguagaccuaucuagagcaauaaauguaaaugggguaucauuuaauaauguagauacaucaagccuaggagccgcacaaguuagacaaucagcaaguagaggaagaggauuaggagagaaaagaaaagaaggagcugauaaagagaaaaagaaagaaaaagaagaagaaccaaagaaaccaaaugaaaauaaauuaaaacaaccaggaggagaacaaccagcagcaggaggagaacaaccagcagcaggaggugaacaaccagcagcaggaggugaacaaccagcagcaggaggagaaagaccagcggcaggaggagaacaaccagcagccggaggagaacaaccagcagcaggaggggaacaaccggcugcaggaggagaacaaccagcugcaggaggugaaagaccugcugcaggaggagaacaaccagcagcaggaggagaacaaccagcggcugguggagaaagaccugcagcaggaggagaacaaccagcagcaggaggagagcaaccagcaccagcaccaagaagagaacaaccagcagcaggaggagaacaaccagcaccagcaccaagaagagaacaaccagcaccaggagcaggagcaggagauggggcaagaggaggaaauccaggagcgggaaaaggacaaggacaaaauaaucaaggagcaaauguaccaaaugaaaaaguaguuaaugauuauuuacacaaaauaaggaguucaguaacgacggaauggacaccauguaguguaacauguggaaauggagugagaauaagaagacgacagaaugcaggaaauaaaaaggcagaagauuugacaauggaugauuuagaaguagaagcauguguaauggacaaaugugcagggauauuuaauguaguaucaaauucauuaggauuaguaauauuauuaguauuagcauuauuuaauuga

SEQ ID NO: 5631 - RNA, 1014 nt, Artificial Sequence
  derived and/or modified CDS sequence (opt6) from Pk(LT64)__ADN94520.1__CSP
augaaaaauuucauauuauuagcaguaaguucaauauuacuuguagauuuauuuccaacucauuuugaacauaauguagauuuaaguagagcaauaaauguaaauggaguaaguuuuaacaacguagauacaucaucauuaggagcagcacaaguaagacaaagugcaaguaggggaagaggacugggagaaaaaccaaaagaaggagcugauaaagaaaaaaaaaaagaaaaagaagaaaaaccaaaaaaaccaaaugaaaacaaacuaaaacaaccuggaggagagcaaccggcagcaggaggagaacaaccagcagcaggaggagaacaaccagcagcaggaggugaacaaccagcagcaggaggagaacaaccugcagcaggaggagaacaaccagcugcaggaggagaaagaccagcagcagggggagaacaaccagcggcagggggagaacaaccggcagcaggaggagaaaggccagcagcagggggagaacaaccagcugcaggaggagaaagaccagcagcaggaggagaacagccagcggcaggaggagaacaaccagcagcgggaggagaacaaccugcaccagcaccaagaagggaacaaccugcagcaggcggagaacaaccggcaccagcaccaagaagagaacaaccagcaccaggagcaggagcaggggauggagcaagaggagguaaugcaggggcaggaaaagggcaaggacaaaacaaucaaggagcaaauguaccaaaugaaaaaguaguaaaugauuacuuacauaaaauaagaaguucagugacaacugaauggacaccaugcucaguaacauguggaaauggaguaagaauuaggaggaggcaaaaugcaggcaacaaaaaagcagaagacuuaacaauggaugaccuggaaguagaagcaugcguaauggauaaaugugcaggaauauuuaauguaguaucaaauaguuuaggacuaguaauacuauuaguuuuagcguuauuuaauuaa

SEQ ID NO: 5632 - RNA, 1014 nt, Artificial Sequence
  derived and/or modified CDS sequence (opt6) from Pk(TB016)__AFG25473.1__CSP
augaaaaauuucauauuauuagcaguaagcaguauauuauuaguagauuuauuuccaacacauuuugaacauaauguagauuuaagcagagcaauaaacguaaauggaguuaguuuuaauaauguagauacaucaaguuuaggagcagcacaaguaagacaaucagcuaguagagguagagguuuaggagaaaaaccaaaagaaggagcagauaaagaaaaaaaaaaagaaaaagaagaaaaaccaaaaaaaccaaaugaaaauaaauuaaaacaaccaggaggagaacaaccagcggcaggaggagaacaaccagcagcgggaggggaacaaccagcagcaggaggggaacaaccagcagcaggaggagaaagaccagcagcuggaggagaacaaccagcagcgggaggagaacaaccagcagcaggaggcgaacaaccggcugcaggaggagaacaaccagcagcaggaggagaaagaccagcagcaggaggggaacagccagcagcaggaggagaacaaccagcugcaggaggagaaaggccagcagcaggcggagaacaaccagcagcaggaggagaacaaccagcaccagcaccaagaagagaacaaccagcagcagggggugaacaaccagcaccagcaccgcgaagagaacaaccagcaccaggagcuggagcaggagauggagcaagggggggaaaugcaggagcaggaaaagggcaaggacaaaauaaucaaggagcaaacguaccaaaugaaaaaguaguaaaugauuauuuacauaaaauuagaaguagugugacaacagaauggacaccaugcaguguuacauguggaaauggaguaaggauaagaagaagacaaaaugcaggaaauaaaaaagcagaagauuuaacaauggaugauuuagaaguagaagcauguguaauggauaaaugugcaggaauauuuaaugugguaucaaauaguuuaggauuaguuauauuacuagucuuagcuuuguuuaauuga

SEQ ID NO: 5633 - RNA, 1014 nt, Artificial Sequence
  derived and/or modified CDS sequence (opt6) from Pk(UM0021C10)__AHF20667.1__CSP
augaaaaauuuuauuuuacuagcaguaagcucaauauuacuaguagaucuauuuccaacacauuucgaacauaacguagaucuaagcagagcaauaaacguaaauggaguaagcuuuaauaauguagauacaucaagcuuaggagcggcacaaguaaggcaaagugcaucaagaggaagaggauuaggagaaaaaccaaaagaaggagcagauaaagaaaaaaaaaaagaaaaagaagaaaaaccaaaaaaaccaaaugaaaauaaacuaaaacaaccuggaggugaacaaagugcagcuggaggagaacaaccagcagcaggaggcgaacaaccugcagcagguggagaacaaccagcagcaggaggagaacaaccagcugcaggaggagaacaaccagcagcaggaggagaaagaccagcagcaggaggagaacaaccugcugcgggaggagaacaaccagcagcuggaggagaaagaccagcagcaggaggagaacaaccagcugcaggaggagaaagaccagcagcaggaggagaacaaccggcagcaggaggagaacaaccagcagcaggaggugaacaaccagcgccagcuccaagaagagagcaaccagcagcugggggagaacaaccugcaccagcaccgagaagagaacaaccagcaccuggagcaggggcaggagauggagcaagaggaggaaaugcaggagcgggaaaaggacaaggacaaaauaaucaaggagcaaaugugccgaaugaaaaaguuguaaaugauuauuuacauaaaauaagaaguucaguaacaacagaauggacaccgugcagugugacauguggaaauggaguaagaauaagaagaagacaaaaugcaggaaauaaaaaagcagaagaucuaacaauggacgaucucgaaguugaagccugcguaauggauaaaugugcaggaauuuucaauguaguaaguaacagcuuaggacuuguaauacuccuaguguuagcacuauuuaacuaa

SEQ ID NO: 5634 - RNA, 1011 nt, Artificial Sequence
  derived and/or modified CDS sequence (opt6) from Pk(UMRAC2)__AHF20618.1__CSP
augaaaaacuuuauacuauuagcaguaaguaguauauuauuaguagauuuauuaccuacacauuuugaacauaauguagaccuaaguagagcaauaaauguaaacgguguuucauuuaauaauguagauacaucaaguuuaggagcagcacaaguaaggcaaagugcaaguaggggaagaggacuaggagaaaaaccaaaagaaggagcagacaaagaaaaaaaaaaagaaaaagaaaaagaagaagagccaaaaaaaccaaacgaaaacaaauuaaaacaaccagaaggaaacagagaagcaccaggacaaccggaagguaauagagaagcaccugggcaaccagaaggaaauagagaagcaccuggacaaccagaaggaaauagagaagcaccaggacaaccagaaggaaauagagaagcaccaggacagccagaagguaacagagaagcaccaggacaaccugaagggaauagagaagcgccaggacaaccagaaggaaauagagaagcaccagcacaaccagaagggaauagagaagcaccaggacaaccggaaggaaauagagaagcuccagcacaaccacaaggaaauggaggagcaggacaagcacagccagaagguaauagagaagcaccagcacaaccucaaggaaauggaggagcaggacaagcacaaccacaaaaaaaugaaggaggaaaugcaggggcaagaaaaggacaaggacaaaauaaccaaggagcaaauguaccaaaugagaaagugguaaaugauuaucuacacaaaauaagaagcaguguaacaacagaauggacaccaugcaguguaacauguggaaauggaguaagaauaaggagaaaaggacaugcagggaauaaaaaagcagaagauuuaacaauggaugauuuggagguagaagcgugugugauggauaaaugcgcaggaauauucaauguaguuagcaauagccuaggauuaguuauacuacuaguccuggcauuauuuaauuaa

SEQ ID NO: 5635 - RNA, 1008 nt, Artificial Sequence
  derived and/or modified CDS sequence (opt6) from Pk(UMANC1)__AHF20619.1__CSP
augaaaaacuuuauauuacuagcaguaucuagcauacuguuaguagaucuauuaccaacucacuuugaacauaacguagaucuuagcagagcaauaaacguaaacggaguaucauucaauaauguagacacaaguagucuaggagcagcacaaguaagacaaucagcaagcagagggagaggauuaggagaaaaaccaaaagaaggagcagacaaagaaaaaaaaaaagaaaaagaaaaagaagaagaaccaaaaaaaccaaacgaaaauaaauuaaaacaaccagaaggaaauagagaagcaccaggacaaccagaaggaaacagagaagcaccaggacaaccagaaggaaauagagaagcaccaggacaaccagaagguaauagagaagcaccuggacaacccgaaggaaacagagaagcaccaggacaaccagaaggaaauagagaagcaccaggacaaccggaaggaaauagagaagcaccgggacaaccagaagggaauagggaagcaccaggacaaccagaaggaaauagggaagcaccaggacaaccagaaggcaauagagaagcuccagggcaaccagaaggaaauagggaagcaccggcacaaccagaaggaaauagagaagcaccagcacaaccacaaggaaauggaggagcaggucaagcacaaccgcaaaaaaacgaaggagggaacgcaggagcaagaaaaggacaaggacaaaacaaucaaggagcaaaugcaccaaacgaaaaaguaguaaaugauuaucugcaaaaaauaagaaguaguguaacuacagaauggacaccaugcaguguaacaugcggaaauggaguaaggauaaaaaggaaagcacaugcagauaaaaaaaaagcagaagaucuaacgauggaugauuuagaaguagaagcaugcguaauggauaaaugugcaggaauauucaauguagugagcaauaguuugggauuaguaauauuauuaguacuagcacuauuuaauuaa

SEQ ID NO: 5636 - RNA, 1002 nt, Artificial Sequence
  derived and/or modified CDS sequence (opt6) from Pk(LT48)__ADN94505.1__CSP
augagaaacuuuauauuacuagcaguaagcucuauauuguuaguagauuuauuaccaacacauuuugaacauaacguagauuuaaguagagcaauuaauguaaauggaguaagcuuuaacaauguugauacaucaucauuaggagcagcacaaguaaggcaaagugcaaguagagggagaggacuaggagaaaaaagaaaagaaggggcagauaaagaaaaaaaaaaagaaaaagaagaagaaccaaaaaaaccaaaugaaaacaaauuaaaacaaccaaacgcagaaggaggagcaaacgcaggacaaccaaaugcagaaggaggagcaaaugcagggcaaccaaacgcagaaggaggagcaaacgcggggcaaccgaaugcagaaggaggagcaaaugcaggacaaccgaaugcagaagguggagcaaaugcaggacaaccaaaugcugaaggaggagcaaaugcaggucaaccaaaugcagaaggaggagcaaaugcaggacaaccaaaugcagaaggaggagcgaacgcaggacaaccaaaugcagaaggaggagcaaaugcgggacaaccaaaugcagaaggaggagcaaaugcgggacaaccaaaugcggaagggggagcaaaugcaagacaaccacaggcagaaggaggaggagcaaaugcaagacaaggaggaaaugaaggaaacaaacaagcaggaaaaggacaaggacaaaauaaucaaggagcgaaugcaccaaaugaaaaaguaguaaaugacuaucugcaaaaaauaagaaguucagugacaacagaguggacaccguguagugugacauguggaaauggaguaagaauaaggagaagagcacaugcagauaaaaaaaaagcugaagaccuaacaauggaugauuuagaaguagaagcauguguaauggacaaaugugcaggaauauuuaauguaguaagcaauaguuuaggauuagugauauuauuagugcuagcauuauuuaauuaa

SEQ ID NO: 5637 - RNA, 993 nt, Artificial Sequence
  derived and/or modified CDS sequence (opt6) from Pk(KH176)__ADN94486.1__CSP
augaaaaauuuuauauuacuagcaguaucaaguauccuacuagucgauuuauuuccaacacacuucgaacauaauguagauuuaaguagagcuauaaauguaaauggaguuucauuuaauaauguugauacaaguaguuuaggagcagcccaaguaagacaaagugcaucaagaggaagaggauugggagaaaaaccaaaagaaggagcggauaaagaaaaaaaaaaagaaaaagaagaaaaaccaaaaaaaccaaaugaaaauaaacuaaaacaaccggggggugaacaaccagcagcaggaggagaacaaccagcagcgggaggagaacaaccggcagcaggaggagaacaaccagcagcaggaggagaacaaccugcagcaggaggagaacgaccagcagcaggaggagaacaaccagcagcggguggagaacaaccagcagcaggaggagaaagaccagcagcgggaggagaacaaccggcagcaggaggugaaagaccggcagcaggaggagaacaaccugcagcaggaggagaacaaccagcagcgggaggagaacaaccagcaccagcgccaaggagggaacaaccugcagcaggaggagaacaaccagcaccagcaccgagaagagaacaaccagcaccaggagcaggagcaggagauggagcaagaggaggaaaugcaggagcagguaaaggacaagggcaaaauaaucaaggagcaaacguaccgaaugaaaaaguaguaaaugauuaucuacauaaaauaaggagcaguguaacgacagaauggacaccauguaguguaacauguggaaauggaguaagaauuagaagaagacaaaaugcaggaaauaaaaaagcagaagaccuaacaauggaugauuuagaaguagaagcaugcgucauggauaaaugugcaggaauauuuaauguaguaaguaacaguuuaggauuaguaauauuacuaguacuagcauuguuuaauuaa

SEQ ID NO: 5638 - RNA, 993 nt, Artificial Sequence
  derived and/or modified CDS sequence (opt6) from Pk(LT36)__ADN94511.1__CSP
augcgaaauuuuauauuauuagcagugaguagcauauuguuaguagauuuauuaccaacacauuucgaacauaauguagaucuaucaagagcaauaaacguaaauggaguaaguuuuaacaauguagacacaucaagcuuaggagcagcacaaguaagacaaagcgcaagcagaggaagaggacuaggagaaaaaagaaaagaaggagcagauaaagagaaaaaaaaagaaaaagaggaaaaaccaaaaaaaccaaaugaaaauaaauuaaaacaaccaggaggagaacaaccagcugcaggaggagaacaaccagcugcaggaggagaacaaccagcagcaggaggagaacaaccagcagcaggaggagaacagccagcagcaggaggagaacaaccagcggcaggaggagaacaaccagccgccggaggggaacaaccagcagcagguggagaacaaccagcagcaggaggagaacaaccagcagcaggaggugaacaaccagcagcaggaggagaacaaccagcaccagcaccaagaagagaacaaccagcagcaggaggagaacaaccagcagcuggaggagaacaaccagcaccagcaccaagaagagaacaaccagcaccaggaggagaacaaccagcgccaggagcaggagcaggagauggagccagaggaggaaauccaggagcaggaaaaggacaaggucaaaauaaucaaggagcaaauguaccuaacgaaaaagugguaaaugacuacuugcauaaaauaagaucaagcguaacaacagaauggacaccauguaguguaacaugcggaaauggaguaagaauaagaaggaaggcacaugcagauaaaaaaaaagcagaaaaucugacaauggacgacuuagaaguagaagcaugcguaauggauaaaugugcaggaauauuuaauguuguaucaaauaguuugggacuaguaauacuauuagugcuagcauuguuuaauuaa

SEQ ID NO: 5639 - RNA, 993 nt, Artificial Sequence
  derived and/or modified CDS sequence (opt6) from Pk(TB066)__AFG25475.1__CSP
augaaaacacuauucuuauuagcagugagcaguauacuauuaguugacuuauuuccuacacauuuugaacauaacguagacuuaaguagagcaauaaauguuaacggaguuaguuuuaauaauguggauacaaguaguuuaggagcagcacaaguaagacaaagcgcaagcagaggaagaggauuaggagaaaaaagaaaagaaggagcagauaaagaaaaaaaaaaagaaaaggaagaaaaaccaaaaaaaccuaaugaaaauaaacugaaacaaccaggaggagaacaaccugcagcuggaggggaacaaccagcggcgggaggagaacaaccagcagcagguggagaacaaccagcagcagguggagaacaaccagcagcaggaggagaacaaccagcagcaggaggagaacaaccagcagcaggaggggaacaaccagcagcaggaggagaacaaccggcagcggguggagaacaaccagcagcaggaggagaacaaccagcagcaggaggagaacaaccagcaccagcaccaagaagagaacaaccagcagcaggaggagaacaaccagcagcuggaggagaacaaccagcaccagcaccaagaagagaacaaccagcagcaggaggggaacagccagcaccaggagcaggagcaggagauggagcaagaggagguaauccaggagcaggaaaaggacaaggacaaaauaaucaaggagcaaauguaccaaaugaaaaaguagugaaugauuaccuacauaaaauaagaaguaguguaacaacagaauggacaccguguagugugacuuguggaaauggaguaaggauaagaagaaaagcacaugcagauaaaaaaaaagcggaaaauuuaacaauggaugacuuggaaguagaagcguguguaauggauaaaugcgcaggaauauuuaauguaguaucaaauucauuaggacuaguaauacuauuaguauuagcauuauuuaauuaa

SEQ ID NO: 5640 - RNA, 993 nt, Artificial Sequence
  derived and/or modified CDS sequence (opt6) from Pk(UM006C6)__AHF20642.1__CSP
augaaaaacuuuauauuauuagcaguaucuaguauauuauuaguagaucuauuacccacacacuuugaacacaauguagauuuaaguagagcaauaaacguaaauggaguaucauuuaauaauguagauacgaguagccuuggagcagcacaaguaagacaaagugcaaguagaggaagaggacuaggagaaaaaccaaaagaaggagcugauaaagaaaagaaaaaagaaaaggaagaagaaccuaaaaaaccaaauggaaauaaacuaaaacaaccagcaccaggaggagaacaaccagcaccaggaggagaacaaccagcaccaggaggagaacaaccagcaccaggaggugaacaaccagccccaggaggugaacaaccagcaccgggaggagaacaaccagcaccaggaggugaacaaccagcaccaggaggggaacaaccagcaccagggggagaacaaccagcaccaggaggagaacaaccagcaccuggaggagaacaaccagcaccagguggagaacaaccagcaccaggaggagaacaaccagcaccagcaccaagaagagaacaaccagcaccagggggagaacaaccagcgccagguggagaacaaccagcaccaagaagagaacaaccagcuccuggggcaggagcaggagauggagcaagaggaggaaacgcaggagccggaaaaggacaaggacaaaauaaccaaggagcaaguguaccaaaugaaaaaguagucaaugacuauuuacauaaaauaagaaguucaguaacaacagaauggacccccuguaguguaacauguggaaauggaguacggauaagaagaaaagcacaugcugauaaaaaaaaagcagaagaucuaacaauggaugacuuagaaguagaagcuugcguaauggauaaaugcgcagguauauucaaugucgugagcaauagucugggacuaguaauacuacuaguauuagcacuuuucaauuaa

SEQ ID NO: 5641 - RNA, 984 nt, Artificial Sequence
  derived and/or modified CDS sequence (opt6) from Pk(UM004C4)__AHF20641.1__CSP
augaaaaauuucauauuauuagcaguaagcaguauauuauuaguagacuuacuaccaacgcauuucgaacacaauguagauuuaucaagagcaauaaauguaaauggaguaucauuuaacaauguagauacaaguagcuuaggagcagcacaaguaagacaaagugcaaguagagguagaggauugggagaaaaaccaaaagaaggagcagauaaagaaaaaaaaaaagaaaaaggaaaagaaaaagaagaagaaccaaaaaaaccaaacgaaaacaaacuaaaacaaccaaacgaaggacaaccacaagcacaaggagauggagcaaaugcagggcaaccacaagcccaaggagauggagcaaacgcgggacaaccacaagcacaaggagauggagcaaacgcaggacaaccacaagcacaaggagauggagcaaaugcaggacaaccacaagcacaaggagauggagcaaacgcagggcaaccacaagcacaaggagauggagcaaacgcagggcaaccgcaagcgcaaggagauggagcaaaugccggacaaccacaagcacaaggagauagagcaaacgcggggcaaccacaagcacagggagacggggcaaauguacccagacaagguagaaauggagguggagcuccagcaggagggaaugaagggaacaaacaagcaggaaaaggacaaggacaaaauaaucaaggagcaaacgcaccaaaugaaaaaguaguaaaugacuaucuacauaaaauaagaaguagcguaacaacagaauggacaccauguaguguaacguguggaaauggaguaagaauaagaagaaaagcgcacgcaggaaauaaaaaagccgaagacuuaacaguagacgaccuagaaguagaagcauguguaauggacaaaugcgcaggaauauuuaauguagugagcaauucauuaggauuaguaauacuauuaguauuagcauuauucaauuaa

SEQ ID NO: 5642 - RNA, 978 nt, Artificial Sequence
  derived and/or modified CDS sequence (opt6) from Pk(UMHAC5)__AHF20632.1__CSP
augaaaaacuuuauauuauuagcuguaaguaguauacuacuaguagaccugcuaccaacgcacuuugagcauaacguggacuuaaguagagcaauaaauguaaauggaguaaguuucaauaacguagacacaucaagucuaggagcagcacaaguaagacaaagcgcaaguagagggagaggauuaggggaaaaaccaaaagaaggagcagacaaagaaaaaaaaaaagaaaaagaaaaagaggaagaaccaaaaaaaccaaaugaaaauaaauuaaagcaaccggaagguaauagggaagcgccaggacaaccagaaggaaauagagaagcaccaggacaaccggaaggaaauagagaagcaccaggacaaccagaaggaaauagggaagcaccaggacaaccagaaggaaacagagaagcaccaggacaaccagaaggcaauagagaagcaccaggacaaccagaaggaaaucgagaagcaccaggacaaccagaaggaaacagagaagcaccagcacaaccagaagggaauagagaagccccaggacaaccagaaggaaauagagaagcaccagcccaaccagaaggaaauagagaaacaccagcacaaccacaaggaaauggcggagcaggacaagcacagccacaaaaaaacgaaggaggaaaugcaggagcaagaaaaggacaaggacaaaacaaucaaggagcaaaugcaccuaaugaaaaaguuguaaaugacuauuuacaaaaaauaagaaguuccguaacaacggaauggacaccauguaguguaacaugcggaaacgguguaagaauaaagagaaaagcgcaugcagauaaaaaaaaagcagaagauuuaacaauggacgaccuagaaguagaagcaugcguaauggauaaaugugcaggaauauucaacguaguaagcaauagcuuaggauuaguaauauuacuaguacuagcacuauuuaauuaa

SEQ ID NO: 5643 - RNA, 978 nt, Artificial Sequence
  derived and/or modified CDS sequence (opt6) from Pk(UMSYC3)__AHF20626.1__CSP
augaaaaacuucauauuacuagcaguaagcagcauauuacuuguagaucuguuaccaacgcacuuugaacacaacguagaccuaaguagagcaauaaauguaaauggaguaaguuucaauaacguagacacaagcucauuaggagcagcacaaguaaggcaaagcgcaagcagaggaagaggauuaggagaaaaaccaaaagaaggagcagacaaagaaaaaaaaaaagaaaaagagaaagaagaagaaccaaaaaaacccaaugaaaauaaauuaaaacaaccagaagguaauagagaagcaccagggcaaccggaaggaaacagagaagcaccaggacaaccagaaggcaauagagaagcaccuggacaaccagaaggaaauagagaagcaccaggacaaccagaaggaaauagagaagcaccaggacaaccagaagggaauagagaagcaccuggacaaccagaaggaaacagagaagcaccaggacaaccagaaggaaauagagaagcaccggcacaaccggaaggaaauagagaagcaccaggacaaccagaaggaaauagagaagcaccagcacaaccagaagggaauagggaagcaccagcacaaccacaaggaaauggaggagcaggacaagcacaaccgcaaaaaaacgaaggaggaaaugcuggggcaagaaaaggacaaggacagaauaaucaaggagcaaaugcaccaaacgaaaaaguaguaaaugauuaucuacaaaaaauaagaucaaguguaacaacagaauggacaccaugcaguguaacaugcggaaacggaguaagaauaaaaagaaaagcacaugcagauaagaaaaaagcagaagaucuaacaauggaugaccuagaaguagaagcauguguuauggacaaaugugcaggaauauuuaauguaguaaguaacagucuagggcuaguaauacuauuaguauuagcauuauucaacuaa

SEQ ID NO: 5644 - RNA, 966 nt, Artificial Sequence
  derived and/or modified CDS sequence (opt6) from Pk(LT33)__ADN94509.1__CSP
augaaaaauuucauauuacuagcaguuucgucgauauuauuaguugauuuauuaccaacacauuuugaacauaauguugauuuaucaagagcgauaaauguuaacgggguaaguuuuaauaauguagauacgaguucacuaggggcagcacaaguaagacaaagugcaaguagaggaagaggacuaggagaaaaaagaaaagaaggagcggauaaagaaaaaaaaaaagaaaaagaagaagaaccaaaaaaaccgaaugaaaauaaauuaaaacaaccagaacaagcacgagcaggaggagaacaaccagcggcaggaggggaacaacccgcagcaggaggagaacaaccagcagcaggaggagaacaaccagcagcagguggcgaacaaccagcagcaggaggagaacaaccagcugcaggaggagaacaaccggcagcggggggugaacaaccugccgcaggaggagaacaaccagcagcaggaggagaacaaccagcagcaggaggagaacagccugcaccagcaccgaggagagaacaaccagcagcaggaggagaacaaccagcaccugcaccaagaagagaacaaccagcagcaggaggagaacagccagcaccaggagcaggggcaggagauggagcaagaggaggaaaugcaggagcaggaaaaggacaaggacaaaauaaucaaggagcuaauguaccaaaugaaaaaguaguaaaugauuaccuacauaaaauaagaucaaguguaacaacggaguggacaccaugcaguguaacauguggaaauggaguaagaauaagaagaaaagcacaugcagauaaaaaaaaagcagaaaaucuaacaauggacgaucuagaaguagaagcauguguaauggauaaaugugcaggaauuuuuaauguaguaaguaauucauugggauuaguaauauuauuaguauuagcacuauuuaauuaa

SEQ ID NO: 5645 - RNA, 960 nt, Artificial Sequence
  derived and/or modified CDS sequence (opt6) from Pk(UM0032C4)__AHF20653.1__CSP
augaaaaauuuuauacuacuagcaguaucaaguauacuauuaguagaucuauuaccaacacauuucgaacauaauguagacuuaagcagagcaauaaauguuaacggaguaucauuuaauaauguugacacgaguagucuaggcgccgcgcaaguaagacaaagugcaagcagaggaagaggauuaggagaaaaaccaaaagaaggagcagacaaagaaaaaaaaaaagaaaaagaaaaagaagaagaaccaaaaaaaccaaaugaaaauaaacuaaaacaaccaaaugcagaaggagauggagcaaaugcaagacaacccaaugcagaaggagauggagcaaacgcaagacaaccaaaugcagaaggagauggagccaaugcaagacaaccaaaugcagaaggagauggagcaaacgcaagacaaccaaaugcagaaggagauggagcuaacgcgagacaacccaaugcagagggagauggagcaaacgcaagacaaccaaaugcagaaggaggaggagcaaacgcaagacaaccacaggcagaaggagauggcgcaaacgcaagacaaccccaagcucaaggcgaugguggaaacgcaagacaaggagguaacggaggaggagcaccagcaggaggaaaugaaggaaauaagcaagcaggaaaaggacaaggacaaaacaaucaaggagcaaaugcaccaaacgaaaaaguaguaaaugacuauuuacaaaaaauaagaucaagcguaacaacggaauggacaccaugcucaguaaucugcggaaacggaguaagaauaagaagaagagcccaugcagauaaaaaaaaagcagaagacuuaacaauggaugaccuagaaguagaagcaugcguuauggauaaaugcgcaggaauauuuaacguaguaucaaacucauuaggauucguaauauuacuagugcuagcauuguuuaacuaa

SEQ ID NO: 5646 - RNA, 951 nt, Artificial Sequence
  derived and/or modified CDS sequence (opt6) from Pk(SGEHIH1-im-Y09-80)__AFD97207.1__CSP
augaaaaacuuuauauuauuagcagugaguagcauauuauuaguggauuuacuaccaacacauuuugaacauaacguagacuuaaguagagcaauaaauguaaauggaguuucauuuaauaauguugauacaucaucacuaggggcugcucaaguaagacaaucagcaaguagaggaagaggacuuggugaaaaaccaaaagaaggugaugacaaagaaaaaaaaaaagaaaaagaaaaagaagaagaaccaaaaaaauuaaaugaaaauaauccaaaaaaaccaaaugaagaaggugauggagcaaaacuaaaacaaccuaaugaagaaggggauggagcaaaauuaaaacaaccaaaugcagaaggaggagcaaaugcaggacaaccgaaugcagaaggaggagcaaaugcaggacaaccaaaugcagaaggaggagcaaaugcaaggcaaccaaacgcagaaggaggagcaaaugcaggacaaccaaaugcagaaggaggggcaaaugcaggacaaccaaaugcagaaggaggagcaaaugcgagacaaccacaagcagaaggaggaggagcaaacgcaaggcaaccgcaagcggaaggaggaggagcaaaugcaagacaagggggaaaugaaggaaauaaacaagcaggaaaaggacaaggacaaaauaaucaaggugcaaaugcaccaaacgaaaaaguaguaaaugacuauuuacaaaaaauaagaaguagcguuacaauagaauggacaccauguaguguaacauguggaaacgggguaagaauaagaagaagagcacaugcagauaaaaaaaaagcugaagauuuaacaauggaugauuuagaaguagaagcauguguaauggauaaaugugcaggaauauuuaauguaguaaguaauucauuagguuuaguaauacuacuaguguuagcacuauuuaauuaa

SEQ ID NO: 5647 - RNA, 939 nt, Artificial Sequence
  derived and/or modified CDS sequence (opt6) from Pk(LT33)__ADN94514.1__CSP
augagaaauuuuauauuacuagcaguaucaaguauacuacuaguagauuuauuaccaacacauuuugaacauaauguagauuuaucaagagcaauaaauguaaacggaguaucauuuaauaauguagauacaaguaguuuaggagcagcacaaguaagacaaagugcaaguagaggaagaggucugggagaaaaaagaaaagaaggagcagauaaagaaaaaaaaaaagaaaaagaagaggaaccaaaaaaaccaaaugaaaauaaauuaaaacaaccagaacaagcagcuccaggagcaggaggagagcaaccggcaccaggagcaggaggagaaaggccagcaccaggagcaggaggagaacaaccagcaccaggagcaggaggagaacaaccagcaccuggagcaggaggagaacaaccagcaccaggagcaggaggcgaacaaccagcugcaggaggagaacaaccagcagcagggggagaacaaccagcaccagcaccaagaagagaacagccagcagcaggaggggaacaaccagcaccagcaccaagaagagaacaaccagcagcagguggagaacaaccagcaccaggagcuggagcaggagacggagcaagaggagguaaugcaggagcaggaaaaggacaaggacaaaauaaucaaggagcaaauguaccaaaugaaaaaguuguaaaugauuauuuacauaaaauaagaaguucaguaacaacagaauggacaccauguucaguaacauguggaaacggaguaagaauaagacgaaaagcacacgcagauaaaaaaaaagcagaaaauuuaacaauggaugaucuagaaguagaagcauguguaauggauaaaugugcaggaauauuuaauguggugaguaauaguuuaggacuaguaauauuauugguauuagcauuguuuaauuaa

SEQ ID NO: 5648 - RNA, 894 nt, Artificial Sequence
  derived and/or modified CDS sequence (opt6) from Pk(SGEHIWM26-Y09-98)__AFD97239.1__CSP
augaaaaauuuuauacuacuagcaguaucaucaauauuauuaguagacuuacuaccaacacauuuugaacauaauguagaucuaaguagagcaauaaaugugaauggaguaaguuuuaacaauguagacacuagcaguuuaggagcagcacaaguaagacaaagugcaagcagaggaagaggacuaggagaaaaaccaaaagaaggagcagauaaagaaaaaaaaaaagaaaaagaagaagaaccaaaaaaaccaaaugaaaauaaacuaaaacaaccagauacaguaccaggaggugaagaaccagcuccaggaagagaacaaccagcaccaggacgagaagaaccagcaccuggaagagaacaaccagcaccaggaagagaagaaccagcaccaggaagagaacaaccggcaccgggaagggaagaaccagcaccaggaagagaacagcccgcaccaggaagagaacaaccagcaccagguagagaagaaccagcaccaggaagagaacaaccagcaccaggaagagaagaaccagcaccagcaccaggagcaggagcaggagauggggcaagaggaggaaaugcaggagcaggaaaaggacaaggacaaaauaaucaaggagcaaauguaccaaaugaaaaaguaguaaacgauuauuuacauaaaauaaggaguaguguaacaacugaauggacaccaugcaguguaacauguggaaauggaguaagaauaagaagaaaaggucaugcaggcaauaaaaaggcagaagacuuaacaauggaugauuuagaaguagaagcauguguaauggauaaaugugcaggaauauuuaauguaguaagcaauagcuuaggauuaguaauacuacuuguauuagcacuauuuaauuaa

SEQ ID NO: 5649 - RNA, 801 nt, Artificial Sequence
  derived and/or modified CDS sequence (opt6) from Pk(KH296)__ADN94490.1__CSP
augagaaauuuuauauuacuagcaguaagcaguauauuauuaguagauuuauuaccaacacauuuugaacauaauguagauuuaaguagagcaauaaauguaaauggaguaaguuuuaauaauguagauacaagcucauuaggagcagcacaaguaagacaaagugcaaguagaggaagaggauuaggagaaaaaagaaaagaaggagcagauaaagaaaaaaaaaaagaaaaagaagaagaaccaaaaaaacccaaugaaaauaaauuaaaacagccagaacaagcagccccaggagcaggaggggaacaaccagcaccaggagcaggaggagaacaaccggcaccaggagcaggaggagaacaaccagcaccuggagcaggaggagaacaaccggcaccaggugccggaggagaacaaccagcaccagcaccaagaagagaacaaccagcaccagcaccaggagcgggagauggagcaagaggaggaaaugcaggagcuggaaaaggacaaggacaaaauaaucaaggagcaaauguuccaaaugaaaaaguaguaaaugauuauuuacauaagauaagaaguucaguuacaacagaauggacaccauguagcguaacuuguggaaacggaguaagaauaagaagaaaagcacacgcagacaaaaaaaaagcagaagaucuaacaauggaugauuuagaaguagaagcauguguuauggauaaaugugcaggaauauuuaacguaguaaguaauagucuaggauuaguaauauuauuaguauuagcauuauucaauuaa

SEQ ID NO: 5650 - RNA, 801 nt, Artificial Sequence
  derived and/or modified CDS sequence (opt6) from Pk(LT33)__ADN94528.1__CSP
augagaaauuuuauacuauuagcaguaaguaguauacugcuaguagaucuauuaccaacacauuuugaacauaauguagaccuaaguagggcgauaaauguaaauggaguaaguuuuaauaauguagacacgaguaguuuaggagcagcgcaagugagacaaagugcaagcagagggagaggacuaggagaaaaaagaaaagaaggagcugauaaagaaaaaaaaaaagaaaaggaagaagaaccgaaaaaaccgaaugaaaauaaauuaaaacaaccagaacaagcagcaccaggagcaggaggagaacaaccagcaccaggagcaggaggagaaagaccagcaccaggagcaggaggagaacaaccagcaccaggagcaggaggagaaagaccagcaccgggagcaggaggagaacaaccugcaccagcaccaagaagagaacaaccagcaccaggaccaggagcaggugauggagcaagaggaggaaaugcaggagcaggaaaaggacaaggacaaaauaaucaaggagcaaauguuccaaaugaaaaaguaguaaaugauuauuuacauaaaauaagaaguaguguaacaacagaauggacaccauguagcguaacaugugggaauggagugagaauaagaagaagacaaaaugcaggaaauaaaaaagcagaggauuuaacaauggaugauuuagaaguagaagccuguguaauggauaaaugugcaggaauauuuaacguaguaagcaauagccuaggauugguaauauuauuaguauuagcauuauuuaauuaa

SEQ ID NO: 5651 - RNA, 744 nt, Artificial Sequence
  derived and/or modified CDS sequence (opt6) from Pk(SGEHIWM4-Y09-8)__AFD97222.1__CSP
augaaaaacuuuauauuauuagcaguaucaagcauacuauuaguagauuuacuaccaacauacuuugaacauaacguagacuuaagcagagcaauaaacguaaacggaguaucauucaauaguguagacacaagcucacuaggagcagcacaagugagacaaagcgcaagccgaggaagaggauugggagaaaaaccaaaagaaggagcagacaaagaaaaaaaaaaagaaaaagaaaaagaagaagaaccaaaaaaaccaaacgaaaauaaauuaaaacaaccacaaggaaacggaggagcaggacaagcacaaccacaaggaaacggaggagcaggacaagcacaaccagaaggaaacagagaagcaccagcacagccacaaggaaaugguggagcaggacaagcacaaccacaaaaaaacgaaggaggaaacgcaggagcaagaaaaggacaaggacaaaacaaucaaggagcaaaugcaccgaacgaaaaaguaguaaaugauuaucuucaaaaaauaagaucaagcguaacuacagaauggacaccaugcucaguaacaugcggaaacgggguaagaauaagaagaagagcacaugcagacaaaaaaaaagcagaagaucuaacaauggaugacuuagaaguagaagcaugcguaauggauaaaugugcaggaauauuuaacguaguaaguaacucauuaggauuaguaauaucauuaguacuagcauuauuuaacuaa

SEQ ID NO: 5652 - RNA, 720 nt, Artificial Sequence
  derived and/or modified CDS sequence (opt6) from Pk(PT01)__ADN94512.1__CSP
augagaaauuucauauuauuggcagugaguucaaucuuacuaguagacuuacuaccaacacauuucgaacacaauguagaucuaucaagagcuauaaauguaaauggaguaaguuuuaacaauguagacacaucaaguuugggagcagcacaaguaagacaaagugcaucaagaggaagaggauuaggagaaaaaagaaaagaaggagcagacaaagaaaaaaaaaaagaaaaagaagaagaaccaaaaaaaccaaacgaaaacaaacuaaaacaaccagaacaagcagcaccaggagcaggaggagaacaaccagcaccaggagcaggaggagaacaaccagcaccagcaccaagaagagaacaaccagcaccagcaccgggcgcaggagauggagcaagaggaggaaaugcaggagcaggaaaaggacaaggacaaaauaaccaaggagcaaacguuccaaaugaaaaaguaguaaacgauuauuuacacaaaauaagaaguucaguaacaacagaauggacgccaugcagcguaacauguggaaauggaguaagaauaagaagaaaagcacacgcagacaaaaaaaaagccgaagacuuaacaauggacgaucuagaagucgaagcauguguaauggacaaaugcgcggguauauucaaugucguaagcaauagccuaggauuaguaauacuauuaguauuggcauuauuuaauuaa

SEQ ID NO: 5653 - RNA, 717 nt, Artificial Sequence
  derived and/or modified CDS sequence (opt6) from Pk(LT53)__ADN94502.1__CSP
augaaaaacuuuauauuacuagcaguaaguaguauauuacuaguagaucuacuaccaacacacuuugaacauaacguagacuuaaguagagcaauaaacguaaacggaguuagcuucaacaacguagacacaaguagucuaggagcagcacaaguaagacaaagugcgagcagaggaagaggauuaggagaaaaaccaaaagaaggagaugacaaagaaaaaaaaaaagaaaaagaaaaagaagaagaaccaaaaaauuuaaaugaaaauaaaccaaaacaaccaaaugcagaaggagauggagcgaaaccaaaacaaccgaaugcagaaggagauggagcaaacgcgagacaaccacaagcagaaggaggaggagggaaugcaagacaaggaggaaacgaaggaaauaaacaagcgggaaaaggacaaggacaaaauaaccaaggagcaaaugcaccgaaugaaaaaguaguaaacgauuaccuacaaaaaauaagaagcaguguaacaacagaauggacaccauguagcguaacguguggaaauggaguaagaauaaggagaagagcacacgcagacaaaaaaaaagcagaagacuuaacaauggacgauuuagaaguagaagcauguguaauggacaaaugcgcagggauauucaauguagugagcaauagucuaggacuaguaauauuacugguauuagcauuauucaauuaa

SEQ ID NO: 5654 - RNA, 702 nt, Artificial Sequence
  derived and/or modified CDS sequence (opt6) from Pk(SGEHIWM5-Y09-79)__AFD97229.1__CSP
augaaaaacuucauacuacuagcaguaaguucaauauuacuaguagacuuauuaccaacacauuucgaacacaauguagaucuaaguagagcaauaaauguaaauggaguuaguuuuaacaauguagauacaucaagcuuaggagcagcacaaguaagacaaagugccaguagaggaagaggacuaggagaaagaccaaaagaaggagcagauaaagaaaaaaaaaaagaaaaagaaaaagaaaaagaagaaccgaaaaaaccaaaugaaaauaaauuaaaacaaccagaacaaccagcagcaggagcaggaggagaacaaccagcaccagcaccaagaagagaacagccagcaccaggagcaggagcaggagauggagcaagaggaggaaaugcgggagcaggaaaaggacaaggacaaaauaaccaaggagcaaacguaccaaaugaaaaaguaguaaaugauuacuuacacaaaauaagaaguucaguaacaacagaauggacaccauguagcguaacauguggaaauggaguaagaauaagaagaagacaaaaugcaggaaauaaaaaagcagaagauuuaacaauggacgaucuagaaguagaagcauguguaauggacaaaugcgcagggauauucaauguaguaaguaauagcuuaggauuagucauauuacuaguauuagcacuauucaauuaa

SEQ ID NO: 5655 - RNA, 660 nt, Artificial Sequence
  derived and/or modified CDS sequence (opt6) from Pk(PT01)__ADN94513.1__CSP
augagaaauuucauacuauuagcaguaagcucaauauuacuaguagacuuauuaccaacacauuucgaacacaauguagaucuaucaagagcaauaaacguaaauggaguaaguuuuaacaauguagauacaucaagcuuaggagcagcacaaguaagacaaucagcaucaagaggaagaggauuaggagaaaaaagaaaagaaggagcagauaaagaaaaaaaaaaagaaaaagaagaagaaccaaaaaaaccaaacgaaaacaaauuaaaacaaccagaacaagcagcaccaagaagagaacaaccagcaccagcaccaggagcaggagauggagcaagaggaggcaacgcaggagcaggaaaaggacaaggacaaaauaaccaaggagcaaacguaccaaaugaaaaaguaguaaacgauuacuuacacaaaauaagaaguucaguaacaacagaauggacacccuguaguguaacauguggaaauggaguaagaauaagaagaaaagcacaugcagauaaaaaaaaagcagaggacuuaacaauggacgaucuagaaguagaagcaugugucauggacaaaugcgcaggaauauucaauguagugagcaacagcuuagguuuaguaauacuauuaguauuagcauuauucaauuaa

SEQ ID NO: 5656 - RNA, 1290 nt, Artificial Sequence
  derived and/or modified CDS sequence (opt6) from Pm(408/Cameroon)__CAA05623.1__CSP
augaaaaaacuaaguguauuagcaauaaguaguuuuuuaauaguagauuuucuauuuccuggauaccaucauaauaguaauagcacgaaaaguagaaauuuaucagaauuguguuauaauaacguagauaccaaauuauuuaaugaacuagaaguuagauauaguacgaaucaagaucauuuuuauaauuauaauaaaacgauaagacuauugaacgaaaacaauaaugaaaaagauggaaaugucacaaaugaaagaaagaaaaaaccaacaaaagcaguagaaaauaaacuaaaacaaccaccaggagaugaugacggagcaggaaacgaugcaggaaaugaugcaggaaaugcagcaggaaaugcagcaggaaaugcagcagggaaugcugcgggaaaugcagcgggcaaugaugcaggaaaugcagcaggaaaugcggcaggaaaugcugcaggaaaugcagcggguaaugcagcaggaaaugaugcaggaaaugcagcaggaaaugaugcaggaaaugcggcaggaaaugcagcaggaaaugcagcaggaaaugcagcaggaaaugcggcaggaaaugaugcaggaaaugcugcaggaaaugcagcaggaaaugcagcaggaaacgcggcaggaaaugcagcugggaaugcggcaggaaaugcagcaggaaaugcagcaggaaacgcagcaggaaacgcagcagguaaugaugcuggaaaugcagcaggaaaugcugcuggaaaugcugcaggaaaugcugcaggaaaugcagcaggaaaugcagcaggaaacgcugccggaaaugcagcaggaaacgcagcagguaacgcagcaggaaaugcagcaggaaaugcagcaggaaaugcagcaggaaacgcagcagggaaugcagcaggaaaugcagcaggaaaugcagcgggaaaugcagcaggaaacgaaaaagcaaagaauaaagacaacaaaguagaugcuaauacaaacaaaaaagauaaucaagaagaaaauaaugauaguagcaauggaccaucagaagaacauauaaaaaauuauuuagaaucgauaagaaauagcauaacagaagaauggaguccauguaguguaacauguggaucagguauaagaacgagaagaaaaguugacgcaaagaauaaaaaaccagcagaauuaguacuaagugaucuagaaacagaaauauguaguuuagauaaauguagcucaauauucaauguaguaaguaauaguuuaggaauuguauuaguacugguauuaauucuauuucauuaa

SEQ ID NO: 5657 - RNA, 1290 nt, Artificial Sequence
  derived and/or modified CDS sequence (opt6) from Pm(Uganda 1-CDC)__AAA29557.1__CSP
augaagaaauuaucaguauuagcaauaagcagcuuucugauaguagauuuucuauuuccaggauaucaucauaacagcaauucaacgaaaaguagaaauuuaagugaauuauguuauaauaauguagauacaaaacuauucaaugagcuagaaguacgauacucaacaaaucaagaucauuucuauaauuauaacaaaacaauaagauuauuaaaugaaaauaauaaugaaaaagacggaaauguaacaaaugaaagaaaaaaaaaaccuacaaaagcagucgaaaauaaauuaaaacaaccaccgggagaugaugauggagcaggaaacgaugcagguaaugacgcaggaaaugaugcaggaaaugcggcaggaaacgcagcaggaaaugcagcaggaaaugcagcaggaaaugcagcagguaacgcagcagggaaugcggcuggaaacgcagcagguaaugcagcaggaaaugcagcaggaaacgaugcaggaaaugcagcgggaaaugcagcaggaaacgcagcaggaaaugcggccggaaacgcagcaggaaaugaugcaggaaaugcagcuggaaaugcagcuggaaaugcagcaggaaaugcggcaggaaacgcagcaggaaaugcagcaggaaaugcagcugggaaugcagcaggcaaugcagcaggaaaugcagcaggaaaugaugcagguaaugcagcaggaaaugcagcagguaaugcagcaggcaaugcagcaggaaaugcagcaggaaacgcagcaggaaaugcagcaggaaaugcagcaggaaaugcggcaggaaaugcagcaggaaaugcagcaggaaacgcagcaggaaacgcagcaggaaaugcagcagggaaugcugcaggaaacgcagcaggaaaugcagcaggaaaugcagcaggaaaugcagcaggaaaugcagcaggaaaugaaaaagcaaaaaauaaagauaacaaaguugaugcaaauacgaauaaaaaagauaaucaggaagaaaauaaugauaguagcaaugggccaagcgaagaacauauaaaaaacuauuuagaaucaauuaggaauucuauuacagaagaauggaguccgugcagugucacaugugguucaggaauaagagcaagaagaaaaguaggagcuaaaaauaaaaaaccugcagaacuaguauuaagugauuuagaaacagaaauauguagucuagauaaauguagcucaauauuuaauguaguuagcaauagcuuagguauaguauuaguauuagugcuaauauuauuucauuaa

SEQ ID NO: 5658 - RNA, 1170 nt, Artificial Sequence
  derived and/or modified CDS sequence (opt6) from Pm(UG01)__SCN12386.1__CSP
augaagaaauuaaguguauuagcaaucaguucauuucuaauuguagauuuuuuauuuccuggguaucaccacaauaguaauaguacuaaaucaagaaauuuaagcgaauuaugcuacaauaauguugauacaaaauuauuuaacgaauuagaaguaagauauucaacaaaccaagaccauuuuuauaauuauaauaaaacaauaagauuauuaaacgaaaacaauaacgaaaaagauggaaauguaacaaacgaaagaaaaaaaaaaccaacaaaagcaguagaaaauaaauuaaaacaaccaccaggagacgacgauggagcaggaaaugaugcaggaaacgaugcaggaaaugcagcaggaaaugcggcaggaaaugcagcagggaaugcagcaggaaaugacgcaggaaaugcagcaggaaaugcagcagguaacgcggcaggaaaugcagcaggaaaugcagcaggaaacgcagcgggaaaugcagcaggaaaugcagcaggaaaugcagccggaaaugcagcaggaaaugcagcaggaaaugcagcaggaaaugcagcaggaaaugcagcaggaaaugcagcaggaaaugcggcagcaggaaaugcagcaggaaaugcagcgggaaaugcagcaggagcagcaggaaaugcagcagggaaugcagcagggaaugcagcaggaaaugcagcaggaaaugcagcaggaaaugcggcaggaaaugcagcaggaaaugcagcuggaaaugcagcaggaaaugcagcaggaaaugcagcagguaaugcggcuggaaaugcagcagggaaugcagcaggaaaugaaaaagcaaaaaauaaagauaauaaagucgacgcaaauacaaacaaaaaagauaaucaagaagaaaauaaugacagcucaaauggaccaagugaagaacauauaaaaaauuacuuggaaagcauaagaaauagcauaacugaagaauggucgccauguagcguaacauguggaucagguauaagagcgagaagaaaaguagacgcaaaaaauaaaaaaccagcugaacuaguauuaucagauuuagaaacagaaauauguagcuuagauaaaugcagcaguaucuuuaauguaguaaguaauaguuuaggaauaguauuagugcuaguacuaauauuauuccauuaa

SEQ ID NO: 5659 - RNA, 1170 nt, Artificial Sequence
  derived and/or modified CDS sequence (opt6) from Pm()__SCN12386.1__CSP
augaaaaaacuaucaguauuagcaauaaguucguuuuuaauaguagauuuuuuauuuccgggguaucaucacaauaguaauagcacaaaaaguagaaaucuaucagaacuauguuauaauaauguagauacaaaacuauuuaaugaauuagaggugagguauucaacaaaucaagaucauuuuuauaauuauaauaaaacaauaagacuauuaaaugaaaauaauaacgaaaaagaugggaauguaacaaacgaaagaaaaaaaaaaccaacaaaagcaguugaaaauaaauuaaaacaaccgccaggagaugaugacggagcgggaaaugacgcaggaaaugacgcagggaaugcagcuggaaaugcagcaggaaaugcagcaggaaaugcagcaggaaaugaugcaggaaaugcggcagguaaugcagcuggaaaugcagcaggaaaugcagcaggaaacgcagcagggaaugcagcaggaaaugcagcaggaaaugcagcaggaaaugcagcgggaaaugcagcagggaaugcugccgggaaugcggcaggaaaugcagcagggaaugcagcaggaaaugcagcaggaaaugcagcagcaggcaaugcagcgggaaaugcagcaggaaaugcagcaggugcagcaggaaacgcagcaggaaaugcagcgggaaaugcagcaggaaaugcagcaggaaaugcagcaggaaaugcagcaggaaacgcagcaggaaaugcagcaggaaaugcagcuggaaaugcagcaggaaaugcagcaggaaaugcggcaggaaaugcggcgggaaaugcagcggggaaugaaaaagcaaaaaauaaagacaauaaaguagaugcaaauacaaacaaaaaggauaaccaagaagaaaauaaugauucaaguaauggaccaucagaagaacauauaaaaaacuauuuagaaaguaucagaaauaguauuacagaagaauggaguccauguucaguaacauguggaucaggaauuagagcuagaagaaaaguagaugcaaaaaauaaaaaaccagcagaacuaguuuuaucagauuuagaaacagaaauauguagucuagauaaauguaguagcauauuuaauguaguaaguaauaguuugggaauaguauuaguuuuaguauuaauauuauuucauuaa

SEQ ID NO: 5660 - RNA, 885 nt, Artificial Sequence
  derived and/or modified CDS sequence (opt6) from Pm(PmlGA01)__SBT79431.1__CSP
augaaaaagcugagcguacuagcaauaagcagcuuuuuaauaguggauuuuuuauuuccagguuaucaucauaauagcaauagcacgaaaaguagaaauuuaagcgaauuauguuauaauaauguggauacaaaauuauucaaugaauuagaaguaagauacaguacaaaucaagaccauuucuauaauuauaauaaaacaauaagauuacuaaaugaaaacaacaacgcaaaagauggaaauguaacaaaugaaagaaaaaaaaaaccaacaaaagcaguagaaaacaaauuaaaacaaccaccaggggaugaagaagaugaugcagaaaauggagaaggaaaugaaaggggaaauggagaaggaaaugaaaggggaaauggagaagggaaugaaagaggaaauggagaaggaaaugaaagaggaaacggagcaggaaaugaaaggggaaaugaugcaggaaaugcagcaggaaaugcagcaggaaaugaugcaggaaaugcagcaggcaaugcagcaggaaaugcagcaggcaaugcagcgggaaaugaugcuggaaacgcagcaggaaacgcagcaggcaaugcagcaggaaauggagaaaauaacgauaguaguaacggaccaagcgaagaacauauaaaaaauuauuuggaaaguauacgaaauaguauaacggaagaauggaguccauguucaguaacaugcggaaauggaauaagagcaagaagaaaaguagaugcaaaaaauaaaaaaccagcagaauuaguauuaagugaucuagaaacagaaauauguucacuagauaaauguaguaguauauucaauguaguaucaaauagucuaggaauaguauuaguguuaguguuaauauuauuucauuaa

SEQ ID NO: 5661 - RNA, 1104 nt, Artificial Sequence
  derived and/or modified CDS sequence (opt6) from Poc(contig1754)__SBT00176.1__CSP
augagaaaucuagcaauuuucgccguaucagcauuccuauuugcugacucaagauauccaguauacgcacacaauggaaauaguacugaaggucgaaaacuaaacgaacuuugcuacaacaacgucgaucuauauaacacacuauuuaacgaauuagaugucggaagcucgacaaaccaagcauucuuucuaaauucaaaaaaaacauuaagacuacuaaacgaaaacccaaaagaaaacaaaaaaaaaagaaaagacgauaaaaaaccaguagaaaauaaauuaaaacaaggagaaagagaaaacgacccaccagccccaagaggagaagguaacccaccagcaccacaaggcgaaggaaacccaccagcaccacaaggagaaggaaauccuccagcaccacaaggcgaagguaauccuccagcaccacaaggagaaggcaacccaccagcaccaagaggcgaaggaaauccaccagcaccacaaggagaaggaaacccaccagcaccacaaggagagggaaauccaccagcaccacaaggagaaggaaacccaccagcaccaagaggagaaggaaauccaccagcuccacaaggagaaggaaacccaccagcaccccaaggagaaggaaaccccccagcaccacaaggagaaggaaauccacccgcagcucaaggagaaggaaauccaccagcugcucaaggaaacggaaacccaccagccgcacaaggaaauggaaaucccccagcagcacaaggcaauggaaacccacccgcaccagcuggaaaagguaaaaacgaaaaccaaaaagaaaaagaagaaaaaaaugcagcaaauaacccaccaucagaagaugacauaaaaaaauauauagauaaaaucaggaacgauauaacugaaaauuggucaccauguuccguaacauguggauucggaguaagaguaagaaggaaagcaggagcuucagcaaaaaaagcccaagaacuuacauuaucagaccucgaaaccgaaaucuguaaaauagaaaauugcucaagcauauucaauguaguuucaaauagucuaggacuaguaauauucuuauucuuagucuuuuuccauuaa

SEQ ID NO: 5662 - RNA, 888 nt, Artificial Sequence
  derived and/or modified CDS sequence (opt6) from Poc(GH01)__SBT84923.1__CSP
augagaaaccuagccauauucgcaguaucagccuuccuauucgccgacucacgauacccaguauacgcccacaauggaaacaguacugaaggcagaaaauuaaaugaacuaugcuacaacaacguagaccuauacaacacacuauuuaacgaauuagacguaggaucaucaaccaaccaagcuuucuuccuaaacagcaaaaaaacacucagauuacuaaacgaaaauccaaaagaaaauaaaaaaaaaagaaaagacgacaaaaaaccagucgaaaauaaacuaaaacaaggagaaagagaaaacgacccaccagcaccccaaggagaaggaaacccaccagcaccacaaggcgaaggcaauccaccugcaccacaaggagaaggaaacccaccagcaccccaaggagaaggaaacccaccagcaccacaaggagaaggaaaucccccagcugcccaaggagaaggaaacccaccagcagcccaaggaaacggaaacccaccagcagcacaaggaaacggaaauccaccagcagcacaaggaaacggaaacccaccagcaccagcaggaaaaggaaaaaacgaaaaccaaaaagaaaaagaagaaaaaaacgcagcaaauaauccaccaucagaagacgacauaaaaaaauacauagacaaaaucagaaacgacauaacagaaaacuggucaccauguuccguaacaugcggauucggaguaagaguaagaagaaaagcaggagcaucagcaaaaaaagcacaagaacuaacccuaucagaccuagaaacagaaauauguaaaauagaaaacugcuccagcauauucaacguagucuccaacagcuuaggauuaguaaucuucuuauucuuaguauucuuucacuaa

SEQ ID NO: 5663 - RNA, 828 nt, Artificial Sequence
  derived and/or modified CDS sequence (opt6) from Poc(contig251)__SBS83173.1__CSP
augagaaaccuagccauauucgcaguaagcgcauuccuauucgcagauagccgcuacccaguauacgcacacaacggaaacagcacagaaggaagaaaacuaaacgaacuaugcuacaauaacguagaccucuauaacacauuauuuaaugaauuagacguaggaucuucaacaaaccaagcauucuuccuaaacuccaaaaaaacacuaagauuacuaaacgaaaacccaaaagaaaacaaaaaaaaaagaaaagacgacaaaaaaccaguagaaaauaaacuaaaacaaggagaaagagaaaacgacccaccugcaccaagaggagaaggaaacccaccagccccacaaggagaaggaaacccaccagcaccacaaggagaaggaaacccaccagcaccacaaggagaaggaaauccacccgcaccacaaggcgaaggaaacccaccagcagcacaaggagaaggcaauccaccagcagcacaaggaaacccaccagcaccagcaggaaaaggcaaaaacgaaaaccaaaaagaaaaagaagaaaaaaacgcagcaaacaacccaccaucugaagacgauauaaaaaaauauauagacaaaauaaggaacgacauaacagaaaacuggucaccaugcucaguaacaugcggauucggaguaagaguaagaagaaaagcaggagcaucagcaaaaaaagcccaagaacuaacauuaucagacuuagaaacagaaauauguaaaauagaaaauuguucaagcauauucaacguaguaucuaacucacucggacuaguaauauucuuauucuuaguauuuuuccacuaa

SEQ ID NO: 5664 - RNA, 945 nt, Artificial Sequence
  derived and/or modified CDS sequence (opt6) from Pow(contig93)__SBT35133.1__CSP
augcgcaaccuagccauauucgcaguaucagcauuccuauuugcagacucuggauacccaguauacgcacauaacggaaacucaauggaaggaagaaaacucaaugaacuaugcuacaacaacguagacuuauacaacacacuauuugacggccuagacgucgaaucaucuacaaaccaagcauucuuccuaaauagcaaaaaaacacuaaggcuauuaaacgaaaauccaaaagaaaacaaaaaaaaaagaaaagacgacaaaauacccguagaaaacaaauuaaaacaaggagauagagaaaacgacccuccagcaccaguuccacaaggagacccaccagcaccaguaccacaaggcgauccaccagcagcaguaccacaaggagacccacccgcaccaguaccacaaggagaccccccagcaccacaaggcgacccaccagcacccguaccacaaggagacccaccagcaccagucccacaaggagacccaccagcaccaguaccacaaggagauccaccagcaccagcaccacaaggugacccaccagcaccagcaccacaaggagacggaaaaccaccagccccagccccacaaggagacggaaaucaaccagcaccaggaaaaggcaaaucagaaaaccaaaaagaaaaagacgaaaaaaacgccgccaacaacccaccaucagaagacgacauaaaaaaauacauagacaaaauaagaaaagacauaacagaaaacuggucaccaugcucaguaacauguggccuaggagucagaguaagaagaaaagcaggagcauccgcaaaaaaagcaaacgaauuaacaauaaacgacgucgaaacagaaauaugcaaaaucgaaaacugcucaucaauauucaacguaguaucaaacucaaucggacuaguaaucuucuuauuccuagucuucuuccacuaa

SEQ ID NO: 5665 - RNA, 891 nt, Artificial Sequence
  derived and/or modified CDS sequence (opt6) from Pow(contig72)__SBT34702.1__CSP
augagaaaucuugcaaucuucgcaguaagcgcauucuuauuugcagauucaggauauccaguauacgcacacaacggaaacagcauggaaggcagaaaacuaaacgaauuaugcuacaacaacgucgacuuauacaacacacuauucgacggauuagacguagaaucaucaacuaaccaagcauucuuccuaaacucaaaaaaaacacuaagauuauuaaacgaaaacccaaaagaaaacaaaaaaaaaagaaaagacgacaaaauaccaguagaaaacaaauuaaaacaaggagauagagaaaacgauccaccagcaccaguaccacaaggagacccaccagcaccaguaccacaaggagaccccccagccccaguaccacaaggagacccacccgcaccuguaccccaaggagauccuccagccccgcaaggagacccaccagcaccaguuccccaaggcgauccaccagcaccagcaccacaaggagacccaccagcaccagcaccccaaggagauggaaaacccccagcaccagcaccacaaggagacggaaaccaaccagcaccaggaaaaggaaaaucagaaaaucaaaaagaaaaagacgaaaaaaacgcugccaacaauccaccaagcgaagacgacauaaaaaaauauaucgacaaaauacgaaaagacauaacagaaaacuggucaccaugcucaguaacauguggcuuaggagucagaguaagaagaaaagccggagcaucagcaaaaaaagccaacgaacuaacaaucaaugacguagaaacagaaauaugcaaaaucgaaaacugcucauccaucuucaacguaguaucaaacucaauaggacucguaauauuccuauuccuagucuuuuuucauuaa

SEQ ID NO: 5666 - RNA, 1020 nt, Artificial Sequence
  derived and/or modified CDS sequence (opt6) from Po(PowCR01)__SBT72933.1__CSP
augagaaaucuagccauauucgcaguaucagcauuccuauuugcagacucagguuauccaguauaugcacacaacggaaacaguauggaaggaagaaaauuaaaugaauuauguuacaauaacguagaccuauacaacacauuauuugauggacuagacguugaaucgagcacaaaccaagcauuuuuucuaaacucaaaaaaaacauuaagacuacuaaaugaaaauccaaaagaaaacaaaaaaaaaagaaaagaugauaaaauaccaguagaaaauaaacuaaaacaaggagauagagaaaaugacccaccagcaccagucccacaaggagacccaccagcaccaguaccacaaggagacccaccagcagcaguaccucaaggagacccacccgcaccaguaccacaaggcgacccaccagcaccacaaggagacccaccagcaccaguaccacaaggagauccaccagcaccaguaccacaaggagacccacccgcaccaguaccacaaggaaacccaccagcaccagucccccaaggcgacccaccagcaccacaaggcgacccuccagcaccaguaccacaaggagacccaccagcaccagcaccacaaggcgacccaccagcuccagcaccccaaggagauggaaaaccaccagcaccagccccacaaggugauggaaaucaaccagcaccaggcaaaggaaaaagcgaaaaccaaaaagaaaaagacgaaaaaaacgcagcaaacaacccaccaagcgaagacgacauaaaaaaauauauagauaaaauacgaaaagauaucacugaaaauuggucaccauguucaguaacauguggacuaggcgucagagucagaagaaaagcuggagcaucagcaaaaaaagccaacgaauuaacaauaaacgacguagaaacagaaaucugcaaaauagaaaacuguucaucaauauuuaauguaguaucaaacucaauaggacuagucauauucuuauucuuagucuucuuccacuaa

SEQ ID NO: 5667 - RNA, 1164 nt, Artificial Sequence
  derived and/or modified CDS sequence (opt6) from Pv(Pt02.1)__ADB92551.1__CSP
augaaaaauuuuauauuacuagcaguaaguucaauauuauuaguagaucuauuuccaacacauuguggacauaacguagauuuaaguaaagcaauaaaccuaaauggaguaggauuuaauaacguagaugccaguaguuuaggagcagcgcauguaggacaaucagcaucaaggggaagaggacugggagaaaauccagaugaugaagaaggagaugcaaaaaagaaaaaagauggaaaaaaggcagaaccgaagaauccaagagaaaauaaauugaaacaaccagaagauggagcaggagaucaaccaggagcaaacggagcaggaaaucaaccaggagcaaauggagcaggaaaucaaccaggagcaaauggggcaggaaaucaaccaggagcaaauggagcgggaaaucaaccaggagcaaauggggcaggaaaccaaccaggagcaaacggggcaggaaaucaaccaggagcaaauggagcaggagaucaaccaggagcaaauggagcaggaaaccaaccaggggcaaauggagcaggaaaccaaccaggagcaaauggagcaggagaucaaccgggagcaaauggugcaggaaaucaaccaggcgcaaacggagcgggagaucaaccgggagcaaauggagcaggaaaucaaccaggcgcaaauggagcaggaaaucaaccgggagcaaauggagcaggaaaucaaccaggagcaaauggagcaggaaaucaaccuggagcaaauggggcaggaggacaagcagcaggaggaaaugcagcaaacaaaaaagcaggagacgcaggggcuggaggucaagcagcagggggaaaugcagcaaauaaaaaagcaggagaugcaggagcaggacaagggcagaauaaugaaggagcaaaugcacccaaugaaaaaagugugaaagaauauuuggauaaaguuagagcaacaguagggacagaguggacgccauguaguguaacauguggaguaggaguacgaguaagaagaagaguaaaugcagcaaauaaaaaaccagaagauuuaacuuuaaaugauuuagaaacggauguauguaccauggauaaaugugcgggaauauucaauguaguaaguaacagcuuaggauuaguaauauuacugguacuagcauuauuuaauuaa

SEQ ID NO: 5668 - RNA, 1134 nt, Artificial Sequence
  derived and/or modified CDS sequence (opt6) from Pv(Salvador I (Sal-1))__XP_001613068.1__CSP
augaaaaauuuuauacuauuagccgugucaaguauucuauuaguagauuuauucccaacucauuguggacauaauguagauuuaucgaaagcuauaaauuuaaaugggguaaauuuuaauaauguggaugcaaguucauuaggggcagcgcaugugggacaaagcgcgaguagaggaagaggauuaggagaaaauccagaugaugaagaaggagaugcaaaaaaaaaaaaagaugggaaaaaagcagaaccaaaaaacccaagagaaaauaaauuaaaacaaccgggagauagagcagauggacaaccggcaggagauagagcggauggacagccagcgggagauagagcugauggacaaccagcaggagauagggcagacggacaaccugcaggagacagagcagcuggacaaccagccggagacagagcugacggacaaccugcaggagauagagcagauggacaaccagcaggagauagagcagauggacaaccagcaggagauagggcagauggacaaccagcaggugauagagcagcuggacaaccagcaggagauagagcagcaggacaaccagcgggugauagagcagauggacaaccggcuggagauagagcggcgggacaaccagcaggugauagagcagacggacaaccagcaggagacagagcggcaggacagccagcaggagacagagcagauggacaaccagcaggagacagagcagcaggacaaccagcaggggauagagcagcaggacaaccagcaggagauagagcugcaggccaagcggcaggagauagagcagcaggacaagcagcaggaggaaaugcaggaggacaaggacaaaauaaugaaggggcaaacgcaccaaaugaaaaaagcguaaaagaauaucuagauaaaguaagagcuacagugggaacagaauggacaccguguagugucacauguggaguaggaguaagaguaagacgaagggugaaugcagcaaauaaaaaaccagaagauuuaacccuaaaugacuuagaaacggauguauguacaauggauaaaugcgcaggaauauuuaauguaguaagcaacagcuuaggguuaguaauucuauuagugcuagcauuauuuaauuaa

SEQ ID NO: 5669 - RNA, 1092 nt, Artificial Sequence
  derived and/or modified CDS sequence (opt6) from Pv(P01)__SGX77278.1__CSP
augaaaaauuuuauacuacuugcaguaagcaguauauuauuaguggauuuauucccaacacauuguggacauaauguagacuuaaguaaagcaauaaauuuaaaugggguaaauuuuaacaauguagacgcaucaucauuaggagcagcacauguaggacaaagugcaucaagagguaggggacugggugaaaauccagaugaugaggaaggagaugcuaaaaaaaaaaaggauggaaaaaaagcagaaccaaaaaacccaagggaaaauaaauuaaaacaaccggcgggagacagagcagacggacaaccagcaggagauagggcagauggacaaccagcaggagauagagcagauggucaaccagcaggagauagagcagcaggacaaccagcaggagauagagcagaugggcaaccagcgggagacagagcagcaggacaaccagcuggggauagagcagauggucaaccggcaggagauagagcagcaggacaaccagcaggagauagggcagacggacaaccagcgggagacagagcagcgggucaaccagcuggagacagggcagcaggacaaccagcaggcgauagggcagauggacaacccgcaggagauagagcagcaggacaaccagcaggagauagagcugauggacaaccagcaggagauagagcagcaggacaaccugcaggagaucgagcagcaggacaaccagcaggaaauggagcaggaggacaagcagcaggaggaaaugcagguggaaaugcggggggaaaugcaggagggaaugcaggaggacaaggacaaaauaacgagggagcaaaugcaccgaacgaaaaaaguguaaaagaauauuuagauaaaguaagagcaacaguaggaacagaauggacaccaugcucaguaacauguggagugggaguaaggguaagaagaagaguaaacgcggcaaauaaaaaaccagaagauuuaacacuaaaugauuuagaaacugacguauguacaauggauaaaugugcagggauauuuaacguuguuaguaauagucuaggauuagugauauuacuaguauuggcuuuauuuaauuaa

SEQ ID NO: 5670 - RNA, 1188 nt, Artificial Sequence
  derived and/or modified CDS sequence (opt6) from Pv(Cam22)__AHL69650.1__CSP
augaaaaacuuuauauuauuagcgguaucaaguauauuauugguagaucuauuuccaacacauugcggacauaacguagacuuaaguaaagcaauaaauuuaaauggaguaggauuuaauaauguagaugcgagcagucuaggggcagcacacguaggacaaagugccucaagaggaaggggacuaggagaaaauccggaugaugaagaaggggaugcaaaaaaaaaaaaagacgguaaaaaagcagaaccaaaaaauccaagagaaaacaaauuaaaacaaccagaagauggagcaggaaaucaaccaggagcaaacggugcagggaaucaaccaggagcaaauggagcaggaaaucaaccaggggcaaacggagcaggaaaucaaccaggagcaaauggagcaggaaaccaaccgggagcaaauggagcaggaaaucaaccaggagcgaacggggcuggaaaucagccaggagcaaauggagcagguaaucaaccaggagcaaacggagcagacgaccaaccaggggcuaauggcgcaggaaaucaacccggagcaaauggagcaggaaaucaaccaggagcaaauggggcaggaaaucaaccuggagcaaauggagcaggagaucagccaggagcaaauggagcagguaaucaaccaggagcaaauggagcgggggaucaaccaggugcaaauggagcagguaaucaaccaggagcaaauggagcaggaaaucaaccaggagcaaauggagcaggaaaucaaccaggggcgaacggagcaggaaaucaaccaggagcaaauggggcaggaaaucaaccaggagcgaacggagcaggaggacaagcugcaggaggaaaugcagcaaauaaaaaagcaggagacgcaggagcaggacaaggacaaaauaaugaaggagcaaaugcuccaaaugaaaaaaguguaaaagaauauuuagacaaaguaagagcaacaguaggaacagaauggacaccaugcaguguaacguguggaguaggaguaagagugagaagaagagugaaugcagcaaauaaaaaaccagaagaucuaacauuaaacgauuuagaaacagauguguguacgauggauaaaugugcagggauauucaauguaguaucaaacagucugggguuaguaauacuguuaguauuagcacuuuuuaauuaa

SEQ ID NO: 5671 - RNA, 1188 nt, Artificial Sequence
  derived and/or modified CDS sequence (opt6) from Pv(Cam29)__AGN05257.1__CSP
augaaaaauuucauuuuauuagcagugagcucaauauuauuaguagaucuauuuccaacgcauuguggucauaacguagauuuaucgaaagcaauaaauuuaaauggaguaggauuuaauaacguagaugcaaguagcuuaggagcugcacaugugggacaaagugcuucaagagguagaggacuaggagaaaacccagacgacgaagaaggggaugcaaaaaaaaaaaaagacgguaaaaaagcggaaccuaaaaacccuagagaaaauaaauuaaaacaaccagaagauggagaaggaaaccaaccaggagcaaauggagcaggaaaucaaccaggagcaaauggcgcgggaaaucaaccaggagcaaauggagcagggaaccaaccgggagcaaauggcgcaggaaaccaaccuggagcaaauggagcaggaaaucaaccaggagcaaauggagcaggaaaucaaccaggagcaaauggggcagaugaucaaccaggagcaaauggggcagguaaucaaccaggagcaaacggagcaggaaaucaaccaggagcgaacggagcaggaaaucaaccgggagcaaauggagcaggagaucaacccggagcaaauggagcuggaaaucaaccaggugcaaauggagcaggaaaccaaccaggagcuaacggagcaggaaaucaaccgggagcaaacggagcagggaaucaaccaggagcaaauggagcaggaaaucaaccaggagcaaauggugcagggaaccaaccgggugcgaacggggcaggaaaucaaccaggagcgaacggagcuggaaaucaaccaggagcaaauggagcaggagggcaagccgcaggagguaaugcagcaaauaaaaaagcaggagaugcaggagcaggacaaggacaaaauaaugaaggagcaaaugcaccaaacgaaaaaucaguaaaagaauauuuagauaaaguacgagccacaguuggaacagaauggacaccguguaguguaacauguggaguugggguaagaguaagaagaagaguaaaugcugcaaauaaaaaaccagaagauuuaacacuaaaugaucuagaaacagauguguguacaauggauaaaugugcaggaauauuuaauguaguaaguaauaguuuaggauuaguaauauuauuaguauuagcauuauucaauuaa

SEQ ID NO: 5672 - RNA, 1188 nt, Artificial Sequence
  derived and/or modified CDS sequence (opt6) from Pv(Cam9)__AGN05240.1__CSP
augaaaaauuuuauauuauuagcgguaagcagcauuuuauugguagaucuauuuccuacacauugcggacauaauguagauuuaucaaaagcaauaaacuuaaauggaguaggauucaacaauguggaugcaucaucauuaggagcagcacauguaggacaaucagcgaguagaggacgaggauuaggagaaaacccagaugaugaagagggagacgcaaaaaaaaaaaaagacggaaaaaaagcggaaccaaaaaauccaagagaaaauaaauugaaacaaccagaagacggagcaggaaaucaaccaggagcaaauggagcaggaaaccaaccaggggcaaacggagcaggaaaucaacccggagcaaauggggcagggaaucaaccuggagcaaacggagcaggaaaucaaccaggagcaaauggagcaggaaaucaaccaggggcuaauggagcaggaaaucaaccaggagcgaauggggcaggaaaucaaccaggagcaaauggagcagacgaucaaccaggagcgaauggagcaggaaaucaaccaggagcgaauggagcagggaaucaaccgggagcgaauggugcaggaaaucaacccggugccaauggagcaggagaucaaccaggagcaaauggagcuggaaaucaaccaggagcaaauggugcaggagaucaaccaggagcaaauggggcaggaaaucaaccaggagcaaauggagcugguaaucaaccaggagcgaaugaagcaggaaaucaaccaggagcaaauggagcaggaaaucaaccaggagcaaauggagcaggaaaucaaccaggggcaaauggagcaggcggacaagcagcggguggaaaugcagcgaauaaaaaagcaggagacgcaggagcaggacaaggacaaaauaaugaaggagcaaacgcacccaaugagaaaaguguaaaagaauauuuggauaaaguaagagcaacaguaggaacagaauggacaccauguagcguaacauguggaguaggaguaagaguaagaagaagaguaaacgcagcaaauaaaaaaccagaagauuuaacacuaaaugauuuagaaacagauguguguacaauggauaaaugugcaggaauauucaaugucguuagcaauaguuuaggauuagugauacuauuaguauuagcacuauuuaauuaa

SEQ ID NO: 5673 - RNA, 1182 nt, Artificial Sequence
  derived and/or modified CDS sequence (opt6) from Pv(Ca05)__ADB92533.1__CSP
augaaaaauuucauuuuacuggcaguaaguagcauauugcuaguggauuuauuuccaacacauuguggacauaauguugauuuaaguaaagcaauaaauuuaaauggaguaggauuuaauaauguagaugcaagcagcuuaggagcagcacaugugggacaaagcgcgaguagaggaagaggauuaggagaaaacccggaugacgaagaaggagacgcgaaaaaaaaaaaagauggaaaaaaagcugaaccuaaaaauccaagggaaaauaaacuaaaacaacccgaagacggagcuggagaucaaccaggagcaaauggagcaggaaaccaaccgggagcaaauggugcagguaaucaaccuggagcaaauggagcaggaaaucaaccaggagcaaauggagcgggaaaucaaccgggagcuaauggagcaggaaaccaaccaggagcuaauggagcaggcaaucagccaggagcaaacggagcaggaaaucaaccaggagcaaauggagcagaugaccagccaggagcaaauggagcagguaaucaaccaggagcaaauggagcaggaaaucaaccgggugcaaacggagcaggaaaucagccaggagcaaauggagcaggagaucaaccaggagcaaauggagcaggaaaucaaccaggagcaaauggagcaggagaucaaccaggugccaauggagcagguaaucaaccaggagcaaauggagcaggcaaucaaccaggggcaaacggugcaggaaaucaaccaggugcaaauggagcaggaaaucaaccaggagcaaacggagcaggaggucaggcagcaggaggaaacgcagcaaacaaaaaagcaggagaugcaggaggaaaugcagguggaaaugcaggugggcaagggcaaaauaaugaaggugcaaaugcaccaaaugaaaaaaguguaaaagaauauuuagauaaagugagagcaacaguugguacagaauggacaccaugcaguguaacaugcggaguaggaguaagaguaagaagaagaguaaaugcagcaaauaaaaaaccagaagauuuaacauuaaaugauuuagaaacugacguauguacaauggacaaaugugcaggaauauuuaauguaguaagcaauaguuuagguuuaguaauauuacuaguauuagcauuauuuaauuga

SEQ ID NO: 5674 - RNA, 1182 nt, Artificial Sequence
  derived and/or modified CDS sequence (opt6) from Pv(Ch05)__ADB92538.1__CSP
augaagaacuuuauacuauuagcaguaucaaguauacuacuaguagaucuauuuccaacacacuguggacacaauguagauuuaaguaaagcaauaaauuuaaauggaguagguuuuaauaauguagaugcgaguucauuaggugccgcacauguaggacaaagcgcaucaagaggaaggggacuaggagaaaauccagaugaugaagaaggagaugcaaaaaaaaaaaaagauggaaaaaaagcagaaccaaaaaauccgagagaaaauaaauuaaaacaaccggaagauggagcaggagaccaaccaggagcaaauggagcaggaaaucagccaggagcaaauggagcggggaaucaaccaggagcaaauggagcaggaaaccaaccaggggcaaauggagcaggaaaccaaccgggagcaaauggagcagggaaucagccaggagcuaauggagcaggaaaucaaccaggagcaaauggagcaggagaucaaccaggagcaaauggugcagacgaccaaccuggugcaaauggggcgggaaaccaaccaggagccaauggagcaggaaaucaaccaggagcgaacggggcaggagaucaaccaggggcaaauggagcgggagaucaaccaggugcaaacggagcagggaaucaaccaggagcaaauggagcaggagaucaaccaggagcaaauggagcaggaaaucaaccaggagcaaauggugcaggcaaucaaccgggagcaaauggagcagggaaucaaccaggagcuaauggugcaggaaaucaaccaggagcgaacggagcuggaggacaagcagcaggggggaaugcagcaaauaagaaggcaggggacgcaggaggaaaugcaggaggaaacgcaggaggacaaggacagaauaaugaaggagcaaaugcaccaaaugagaaaagcguaaaagaauauuuggauaaaguaagagcaacaguaggaacagaauggacaccuuguaguguaaccuguggaguaggaguaagaguaaggagaagaguaaaugcagcaaacaaaaaaccagaagacuuaacauuaaacgauuuagaaacagauguauguacaauggauaaaugugcgggaauauuuaacguaguaaguaauaguuuaggacuaguaauauuauuaguauuagcacuauuuaauuaa

SEQ ID NO: 5675 - RNA, 1173 nt, Artificial Sequence
  derived and/or modified CDS sequence (opt6) from Pv(Cam16)__AHL69649.1__CSP
augaaaaauuuuauuuuauuagcaguaagcaguauauuauuaguagaccuauuuccaacacauuguggacauaauguagauuuaaguaaagcaauaaaucuaaacggaguaggguucaauaauguagaugcaucaaguuuaggagcagcacaugugggacaaagugcaucaagaggcagagguuuaggagaaaacccagacgaugaagaaggagaugcaaaaaaaaaaaaagacggaaaaaaagcagaaccuaaaaauccuagggagaauaaacuaaaacagccagaagauggagcagguaaucaaccuggagcaaacggagcaggaaaucaaccuggagcaaauggagcuggaaaucaaccaggagcuaauggggcaggaaaucaaccgggcgcgaauggagcaggaaaucaaccaggggcuaauggagcaggaaaucaaccaggagcaaauggagcugaugaccaaccaggagcaaauggagcuggaaaccaaccaggagcgaauggagcaggaaaucaaccaggagcaaacggagcaggaaaucaaccuggagcaaauggagcaggaaaucagccuggagcaaauggagcaggaaaccagccaggugcgaauggggcuggggaccaaccaggagcaaauggggcaggaaaucaaccaggugcaaauggagcaggagaucagccaggagccaauggagcaggaaaccaaccaggugcgaauggagcagggaaucagccaggagcaaaugaagcaggaaaucaaccgggggcaaauggagcaggaaaucaaccaggagcaaauggagcaggcaaccaaccaggggcaaauggagcaggaggacaagcagcaggaggaaaugcaggaggaaacgcaggaggacaaggacagaacaaugaaggagcaaaugcgccaaaugaaaaaagugugaaagaauauuuagauaaaguaagagcaaccguuggaacagaauggacaccauguagcgugacaugugggguagguguaagaguacgaagaaggguaaacgcagcuaauaaaaaaccugaagauuuaacauuaaaugacuuagaaacagauguauguacaauggauaaaugugcagggauauuuaacguaguaucaaauaguuuaggauugguaauauuacuaguauuagcacuauuuaauuaa

SEQ ID NO: 5676 - RNA, 1170 nt, Artificial Sequence
  derived and/or modified CDS sequence (opt6) from Pv(Cam26)__AGN05254.1__CSP
augaaaaauuuuauauuacuagcaguaucaucaauauuauuaguagaucuauuuccaacacauuguggacacaauguagauuuaaguaaagcaauuaauuuaaauggugucaacuuuaauaauguagaugcaucaaguuuaggagcagcccauguggggcaaagugcaucaagaggaagaggacuaggagaaaauccagaugaugaagaaggagacgcaaaaaaaaaaaaagauggaaaaaaagcagaaccaaagaauccaagagaaaauaaauuaaaacaaccaggagacagagcagaugggcaaccagcaggagauagagcagauggacagccagcaggugauagggcagauggacaaccagcaggagauagagcagcaggacaaccugcaggggaucgagcagauggacaaccagcaggggacagagcagcaggacaaccagcaggagauagagcagcaggacaaccagcaggagauagagcagauggacaaccagcaggagauagagcagcaggacaaccagcaggagauagggcagcgggacaaccagcaggagauagagcagauggacaaccagcaggagaucgagcagcagggcaaccugcaggugauagagcagauggacaaccagcaggagauagagcagcaggacaaccagcaggagauagagcagcuggacaaccagcuggggauagggcugauggucaaccagcaggcgauagagcagcaggucaaccagcaggagacagagcagcagggcaaccagcaggagauagagcagcuggacaaccggcagguaacggugcuggaggucaagcagcuggagguaaugcagcaaauaaaaaagcagaagacgcaggcggcaacgcaggaggacaaggacaaaauaacgaaggagcuaaugcgccaaaugaaaaaaguguaaaagaauauuuagauaagguaagagcaacgguaggaacagaauggacaccauguaguguuacaugcggaguaggcguaagaguaagaagaagaguaaaugcggcaaacaagaaaccugaagauuuaacacuaaaugacauagaaacugauguuuguacaauggauaagugugcaggaauauuuaauguaguaagcaauaguuuaggauuaguaauauuauuaguuuuagcacuauuuaauuaa

SEQ ID NO: 5677 - RNA, 1164 nt, Artificial Sequence
  derived and/or modified CDS sequence (opt6) from Pv(Ch01)__ADB92534.1__CSP
augaaaaacuuuauacuauuagcuguaaguaguauauuacuagucgaucuuuucccaacacacugcggacauaauguagauuuaaguaaagcuauaaaccugaauggaguaggauuuaacaauguggaugcaagcaguuuaggagcugcacauguagggcaaagugcuaguagaggacgaggauuaggagaaaauccggaugacgaagaaggagaugcaaaaaaaaaaaaagaugggaaaaaggcggaaccaaaaaauccaagggaaaauaaauuaaaacaaccagaagauggagcaggagaucaaccaggagcaaauggagcgggaaaccaaccaggugcaaauggagcaggaaaccaaccaggugcaaauggagcaggaaaucaaccgggagcaaauggagcaggaaaucaaccaggagcaaauggagcuggaaaucagccuggagcaaauggagcagggaaucaaccaggugcuaacggagcaggaaaccaaccaggugcaaauggagcagaugaucaaccuggagcaaauggagcaggaaaucaaccaggagcaaauggagcaggagaucagccaggagcaaauggagcagguaaccaaccaggagcaaauggagcaggagaucaaccaggagcaaauggagcaggaaaucaaccaggagcuaauggagcaggaaaccaaccaggagcaaauggagcaggaaaucaaccaggagcaaauggagcgggaaaucaaccaggagcaaacggagcaggaggacaagcugcgggaggaaaugcagcaaauaaaaaagcaggagaugcaggagcaggagggcaagcagcaggaggaaacgcagcaaacaaaaaagcaggagaugcaggagcaggacaaggacaaaauaaugaaggagcaaaugcaccaaacgaaaaaucaguaaaagaauauuuagauaaaguaagagcaacgguaggaacagaauggacaccauguaguguaacguguggagugggaguaagaguaagaagaagaguaaaugcagcaaauaaaaaaccagaagauuuaacacuaaaugauuuagagacagauguguguacaauggauaaaugugcgggcauauuuaauguaguaagcaauaguuuaggauugguaauuuuauuaguauuagcauuauuuaauuaa

SEQ ID NO: 5678 - RNA, 1164 nt, Artificial Sequence
  derived and/or modified CDS sequence (opt6) from Pv(Nr04)__ADB92542.1__CSP
augaaaaauuucauauuacuagcaguaagcucaauauuauuaguagauuuauucccaacacacugcggacauaauguagauuuaucaaaggcaauaaauuuaaauggaguaggauuuaauaauguagaugcaagcucauuaggagcagcacauguaggucaaucagcaaguagagggagaggauuaggagaaaauccagaugaugaagaaggagaugcuaaaaaaaaaaaagauggaaaaaaagcagaaccaaaaaauccaagggaaaacaaauuaaaacaaccagaagacggagcaggagaucaaccaggagcaaacggagcaggaaaucaaccaggugcaaauggagcaggaaaucaaccaggagcuaauggagccggaaaucaaccaggagcuaauggagcgggaaaucaaccgggagcaaauggagcaggaaaucaaccaggagcuaacggagcaggaaaccaaccaggcgcaaauggagccggagaucaaccaggagcaaacggagcagauaaccaaccaggagcaaauggagcaggaaaucaaccuggagcaaauggugcaggaaaucaaccgggagcaaauggagcaggaaaucaaccaggagcgaauggcgccggagaucaaccaggagcaaacggagcaggaaaucaaccaggggcaaauggagcgggagaucaaccaggagcgaauggagcaggaaaucaaccaggggcaaauggagcuggaaaucaaccaggagcaaauggugcaggaggacaagcagcuggaggaaaugcagcaaauaaaaaagcuggagaugcaggagcaggaggacaagcagcuggaggaaaugcagcaaauaaaaaagcaggagacgcaggggcagggcaaggacaaaacaaugagggagcaaaugcaccaaacgaaaaaagcguaaaagaauaccuagauaaaguaagagcaacagugggaacagaauggacaccauguaguguaacauguggaguaggagugagaguaagaagaagaguaaaugcagcgaauaagaaaccagaagauuuaacauuaaacgauuuagaaacagacguauguacaauggauaaaugugcaggaauauuuaaugugguguccaacagcuuaggauuaguaauauuacuaguauuggcauuauuuaauuaa

SEQ ID NO: 5679 - RNA, 1164 nt, Artificial Sequence
  derived and/or modified CDS sequence (opt6) from Pv(Pt03)__ADB92553.1__CSP
augaaaaacuuuauacuauuagcaguaaguucaauauuauuaguagauuuguuuccaacacacugcggacauaauguagauuugaguaaagcaaucaacuuaaauggaguaggauuuaauaacguagaugcaucaagccuaggagcagcacaugucggacaaagugcaaguagaggaagaggacuuggagaaaauccagacgaugaggaaggagaugcgaaaaaaaaaaaagacggaaaaaaagcagaaccgaaaaauccaagagaaaacaaacuaaaacaaccagaagauggagcaggggaucaaccgggagcaaauggagcaggaaaccaaccaggagcaaauggagcagggaaucaaccaggagcgaauggagcuggaaaucagccaggagcaaauggggcaggagaucaaccaggagcaaauggagcagggaaucaaccaggagcaaauggagcuggagaucaaccaggagcaaacggagcuggaaaucaaccaggagcaaauggagcaggaaaucaaccaggagcuaauggagcuggaaaucaaccaggagcaaauggagcaggaaaccaaccaggagcaaauggagcaggaaaucagccaggagcaaauggagcaggagaucaaccaggagcaaacggagcagguaaucaaccaggagcaaacggagcagguaaucaaccaggggcuaauggugcaggaaaccaaccuggagcaaauggagcaggaaaucaaccaggagcaaauggagcaggaggacaagcagcgggaggaaaugcagcaaauaaaaaagcuggagaugcaggagcgggugggcaagcagcuggaggaaaugcagcaaauaaaaaagcaggggaugcgggagcuggucaaggacaaaauaaugaaggagcaaaugcaccaaaugaaaaaaguguaaaagaauaucuggauaaaguaagagcaacaguaggaacagaauggacaccaugcaguguaacaugugggguaggaguaagaguaagaagaagaguaaaugcagcaaacaaaaaaccagaagauuuaacacuaaacgauuuagagacagauguauguacaauggauaaaugugcaggaauauuuaacguggugaguaauaguuuaggauuaguaauacuguuaguauuagcauuauuuaauuaa

SEQ ID NO: 5680 - RNA, 1164 nt, Artificial Sequence
  derived and/or modified CDS sequence (opt6) from Pv(Vc03)__ADB92546.1__CSP
augaaaaauuuuauccuauuagcagugaguagcauuuuauuaguagaucuauuuccaacacacuguggacacaauguugauuuaaguaaagcgauaaauuuaaauggaguagguuuuaacaauguagaugcaagcaguuugggagcagcacauguugggcaaagugcaucaagaggacgaggacuaggagaaaauccagacgacgaagaaggagaugcaaaaaaaaaaaaagauggaaaaaaagcugagccuaaaaauccaagagaaaauaaacuaaaacaaccagaagauggugcaggugaucaaccaggugcaaacggagcgggaaaucagcccggagcaaauggugcaggaaaucaaccgggagcgaauggagcaggaaaucaaccuggagcaaauggugcaggaaaucaaccgggagcaaacggagcagggaaucaaccaggagcaaauggagcaggaaaucaaccaggagcaaacggagcaggagaucaaccuggagcaaauggagcagacgaucaaccuggagcaaauggggcaggaaaucaaccaggagcaaauggagcagggaaucaaccaggagcaaauggagcaggcaaucaaccaggagcaaauggagcgggagaccaaccaggugcgaauggggcaggaaaucaaccaggagcaaauggagcagguaaucaaccaggugcgaauggcgcaggaaaucaacccggagcaaauggagcaggaaaucaaccaggugcaaauggagcagggggacaagcagcaggaggaaacgcagcaaauaaaaaagcgggagaugcaggagcgggaggacaagcagcaggaggaaaugcagcaaauaaaaaagcaggggacgcaggagcaggacaaggacaaaacaaugaaggugcaaacgcacccaaugaaaagagcguaaaagaauauuuagauaaagugagagcaacaguaggaacagaauggacuccuuguaguguaacauguggaguaggaguaagaguaagacgaagaguaaaugcagcgaacaaaaaaccagaagauuuaacacuaaaugauuuagaaacagaugucugcacaauggauaaaugugcaggaauauuuaauguaguaucaaauaguuuaggauuaguaauacuauuaguauuagcauuauucaauuaa

SEQ ID NO: 5681 - RNA, 1164 nt, Artificial Sequence
  derived and/or modified CDS sequence (opt6) from Pv(Vc04)__ADB92547.1__CSP
augaaaaauuucauauuauuagcaguaaguaguauacuacuaguagauuuauuuccaacacacuguggacauaacguugauuuaucaaaagcgauaaaucuaaauggaguaggauuuaauaauguagaugcaaguucacuaggggcagcacauguaggacaaagugcaaguagaggaagaggacuaggagaaaauccagaugaugaagaaggggaugcaaaaaaaaaaaaagauggaaaaaaagcagaaccaaaaaauccuagagaaaauaaauugaaacaaccagaggauggagcgggagaucaaccaggagcaaacggagcaggaaaucaaccaggagcaaauggagcaggaaaccaaccaggagcaaauggagcaggaaaucaaccgggagcaaauggagcgggcaaucaaccaggagcuaauggagcaggaaaucaaccaggagcaaauggcgcaggaaaucaaccaggcgcaaauggagcagaugaucaaccaggagcaaacggagcaggagaucaaccaggcgcaaauggagcaggaaaucaaccaggagcaaacggagcgggaaaucaaccaggagcaaauggagcaggagaucaaccaggggcaaauggagcaggagaucaaccaggagcaaauggagcaggaaaucaaccaggagcaaauggagcaggagaccaaccaggagcaaauggagcaggaaaucaaccaggagcgaauggagcaggaaaucaaccaggagcaaauggagcuggaggacaagcagcaggaggaaaugcagcaaauaaaaaagcaggagaugcuggagcaggaggacaagcagcaggagguaaugcagcaaauaaaaaagcaggagacgcuggagcuggacaggggcaaaauaaugaaggagcaaaugcacccaaugaaaaaaguguaaaagaauacuuagauaaaguaagagcaacagugggaacagaauggacaccauguagcguaacaugcgggguugguguaaggguaagaagaagaguaaaugcagcgaacaagaaaccggaagaucugacuuuaaaugauuuagaaacagauguaugcacaauggauaaaugugcaggaauauuuaauguaguaucaaauagcuugggauuagugauauuauuaguauuagcguuauuuaacuaa

SEQ ID NO: 5682 - RNA, 1164 nt, Artificial Sequence
  derived and/or modified CDS sequence (opt6) from Pv(Vc05)__ADB92548.1__CSP
augaaaaauuucauauuauuagcuguaaguaguauauuauuaguagaucuuuuuccaacacauugcgggcauaauguagaucugaguaaagcaauaaauuuaaacgggguagguuuuaauaauguagacgcgucaaguuuaggugcagcacauguaggacaaagugcaagcagggguaggggauuaggagaaaauccagaugaugaagaaggggaugcaaaaaaaaaaaaagauggaaaaaaagcagaaccaaaaaauccgagagaaaauaaauuaaaacaaccagaagauggagcaggagaccaaccaggggcuaauggagcaggaaaucaaccaggagcaaauggagcaggaaaucaaccaggggcuaauggagcaggaaaucaaccaggagcaaauggagcgggaaaucaaccgggggcaaauggagcgggaaaucagccaggagcaaauggagcaggaaaucaaccaggagcaaauggagcaggugaucaaccaggagcaaauggagcaggaaaucaaccaggagcaaauggagcaggaaaucaaccaggagcaaauggagcgggaaaucaaccaggugcuaauggggcaggagaucaaccaggagcaaauggugcaggagaucaaccaggagcuaauggagcaggaaaccaaccaggagcuaauggggcgggcaaucaaccaggagcaaauggagcaggaaaucagccaggagcaaauggugcagggaaucaaccaggagcaaauggggccggaggacaagcagcaggaggaaaugcagcuaauaaaaaagcaggagaugcuggggcagggggacaagcagcaggggggaaugcagcaaauaaaaaagcaggagaugcaggagcagggcaaggacaaaauaaugaaggagcgaaugcaccaaaugaaaaaagugugaaagaauauuuagauaaaguaagagcaacaguaggaacagaauggacaccauguaguguaacuugugggguaggagugagaguaagaagaagaguaaaugcagcaaauaaaaaaccagaagaucugacuuugaaugauuuagaaacagacguauguacaauggauaaaugugcaggaauauucaauguaguaucaaacagucuaggacuaguaauauuauuaguauuagcacuauuuaauuaa

SEQ ID NO: 5683 - RNA, 1161 nt, Artificial Sequence
  derived and/or modified CDS sequence (opt6) from Pv(Ca03)__ADB92531.1__CSP
augaaaaauuuuauuuuacuagcaguuaguaguauacuacuaguugauuuauuuccaacacauuguggucauaauguagaucuauccaaagcaauuaauuuaaauggaguagguuuuaacaauguggaugcaaguaguuuaggggcagcacauguagggcaaagugcaaguaggggaagaggauuaggagaaaauccagaugaugaagaaggagaugcaaaaaaaaaaaaagauggaaaaaaagcagaaccaaaaaauccaagagaaaauaaacugaaacaaccagaagauggagcaggagaucagccaggagcgaauggagcagguaaucaaccaggagcaaacggagcagggaaucaaccgggagcaaauggagcagggaaucagccaggugcaaacggagcaggaaaucaaccaggagcuaauggagcagggaaucaaccaggggcaaauggagcaggaaaucaaccaggagcaaauggagcagaugaucagccgggagcaaauggagcagaugaucaaccaggggcuaauggagcaggaaaucaaccaggagcaaacggagcaggaaaccaaccgggagcaaacggagcaggggaucaaccaggagcgaauggagcaggagaucaaccaggagcaaauggagcaggaaaccaaccaggagcaaacggagccggagaucaaccuggugcaaauggugcaggaaaucaaccaggagcaaauggagcaggcaaucaaccaggagcaaauggagcagguaaucaaccaggagcaaauggagcuggaaaucaaccuggggcaaauggagcagguggacaagcagcaggaggaaaugccgcaaacaaaaaagcaggagaugcaggaggaggacaaggacaaaauaaugaaggagcaaacgcaccaaaugagaaaaguguaaaagaauauuuagauaaagugagagcaacaguuggaacagaauggacaccauguucaguaacauguggaguagggguaagaguuagacgaagaguaaaugcagcaaauaaaaaaccagaggauuuaacacucaaugauuuagaaacagauguuuguacaauggacaaaugugcuggaaucuucaauguaguaucaaauagucuaggauuagugauauuacuaguauuagcucuauuuaauuaa

SEQ ID NO: 5684 - RNA, 1161 nt, Artificial Sequence
  derived and/or modified CDS sequence (opt6) from Pv(Cam5)__AHL69647.1__CSP
augaaaaauuuuauacuacuagcagucaguaguauauuacugguagauuuauuuccaacacauuguggucauaauguagauuuaaguaaagcaauaaauuuaaauggaguaggauuuaauaacguagaugcaagcucauuaggagcagcgcauguaggacaaagugcaaguagagggagaggacuuggagaaaauccagaugaugaggaaggagaugcaaaaaaaaaaaaagacggaaaaaaagcggaaccaaaaaacccaagagaaaauaaauuaaaacaaccagaagauggagcaggaaaucaaccaggagcaaauggagcagggaaucaaccaggggcaaacggagcaggaaaucaaccaggggcaaauggagcaggaaaccaaccaggagcaaauggagcaggaaaucaaccaggagcaaacggagcgggaaaccaaccaggagcaaauggagcgggaaaucaaccaggggcaaauggcgcagaugaucaaccaggagcaaauggagcaggaaaccaaccaggagcaaauggagcaggaaaucaaccaggagcaaauggagcaggaaaucaaccaggagcaaauggagcaggagaccaaccaggagcaaauggagcaggaaaucaaccaggagcuaauggugcaggugaucaaccaggagcuaacggagcaggaaaucaaccaggagcuaauggagcaggaaaccaaccaggagcaaaugaagcagggaaucaaccaggagcaaauggagcaggaaaucaaccaggagcuaauggugcagguaaccaaccaggagcaaauggagcaggaggacaagcagcgggaggaaaugcagcaaauaaaaaagcaggagaugcaggagcgggccaaggacaaaauaaugaaggagcgaacgcaccaaacgaaaaaaguguaaaagaauauuuagauaaaguaagagcgacaguggggacagaauggacacccuguaguguaacuuguggaguaggagugagaguaagaagaagaguaaaugcagcaaauaaaaaaccagaagaccuaacauuaaaugaccuagaaacagauguauguacaauggauaaaugugcaggaauauuuaauguaguaucaaauagccuaggacuaguuauacuauuaguauuggcauuauuuaacuga

SEQ ID NO: 5685 - RNA, 1161 nt, Artificial Sequence
  derived and/or modified CDS sequence (opt6) from Pv(Cam5)__AGN05236.2__CSP
augaaaaauuuuauacuacuugcgguuaguucaauacuauuaguggauuuauuuccgacacacuguggacauaauguugauuuaagcaaagcaauaaauuuaaauggaguaaauuuuaauaacguagaugcgucaaguuuaggugcagcacauguaggacaaagugcaaguagaggaagaggauuaggugaaaauccggaugaugaagaaggagacgcaaaaaaaaaaaaagaugguaaaaaagcagaaccaaaaaauccaagagaaaauaaauuaaagcaaccaggagacagagcugacggacaaccagcaggugauggagcagcaggacaaccagcuggugauggagcagccggacaaccagcaggagauagggcggcaggacaaccagcaggagauagagcugcaggccaaccagcaggagauggagcagcaggacaaccugcaggagauggugcagcaggacaaccagcaggcgauagagcagcaggacaaccagcgggugauagagcggcaggacaaccggcuggagauagagcagauggacaaccagcaggagauagagcagcaggacaaccagcaggagacagagcagcuggacaaccagcaggcgauagagcagauggccagccagcgggugaucgagcagcaggacaaccagcaggagauagagcagcaggacaaccugcaggagacagagcagcaggacaaccggcaggagacagagcagauggacaaccagcgggugauagagcagcgggacaaccggcuggagauagagcagcaggacaaccagcaggagaucgagcugcaggacaaccagcagguaauggagcaggaggacaagcugcaggaggaaaugcaggaggacaaggucaaaauaaugaaggagcaaaugcaccaaaugaaaaaagcguaaaagaauauuuagauaaaguuagagcaaccguaggaacagaauggacaccaugcucaguaacauguggaguaggagucagagugagaaggagaguaaaugcggcaaauaaaaaaccagaagaccuaacauuaaaugaucuagaaacagauguauguacgauggauaaaugugcaggaauauuuaauguaguaucaaauagucuaggauuaguaauauuauuaguauuagcguuguuuaauuaa

SEQ ID NO: 5686 - RNA, 1161 nt, Artificial Sequence
  derived and/or modified CDS sequence (opt6) from Pv(Cam7)__AGN05238.1__CSP
augaaaaauuucauacuucuagcaguuagcagcauacuauuaguagauuuguuuccaacacauuguggacauaacguagacuuaaguaaagcaauaaauuuaaaugggguagguuuuaauaauguagaugcaaguaguuuaggggcagcacauguaggucaaagugcaaguagaggaagaggauugggggaaaauccagaugaugaagaaggugaugcaaaaaaaaaaaaagauggaaaaaaagcugaaccaaagaauccaagagaaaacaaacuaaaacaaccagaagauggugcuggaaaucaaccaggagcaaauggagcaggaaaucaaccaggagcaaauggcgcaggaaaucaaccaggagcaaauggugcaggaaaccaaccaggugcaaauggagcaggaaaucaaccaggagcaaacggugcuggaaaucaaccaggagcuaacggagcaggaaaccaaccaggagcaaauggagcagacgaucaaccaggagcaaauggagcuggaaaucaaccaggagcaaauggagcgggaaaucaaccaggugcaaacggagcaggaaaucaaccaggagcaaauggagcaggaaaucagccaggagcaaauggagcuggagaccaaccaggagcaaacggagcaggaaaucagccaggagcaaacggagcaggagaucaaccaggagcuaauggagcaggaaaucaaccaggagcaaacgaagcaggaaaccaaccaggagcaaauggagcaggaaaucaaccaggagcaaacggagcaggaaaucaaccaggagcaaauggagcaggaggacaagcagcuggaggaaaugcagcaaacaaaaaagcaggugaugcaggggcaggacaaggacaaaauaaugaaggagcaaacgcuccaaaugaaaaaaguguaaaagaauauuuagacaaaguaagagcaacgguaggaacagaauggacaccauguaguguuacauguggagugggaguaagaguaagaagaagagugaacgcagcuaacaaaaaaccagaggaucuaacacuaaaugaucuagaaacagacguauguacaauggacaaaugcgcagguauauuuaauguaguaagcaauagucuuggacuagucauauuauuaguauuagcauuguucaacuaa

SEQ ID NO: 5687 - RNA, 1161 nt, Artificial Sequence
  derived and/or modified CDS sequence (opt6) from Pv(CSP27VK247)__ANS71607.1__CSP
augaaaaauuuuauacuauuagcuguaagcaguauacuguuaguagauuuauuucccacacauugcgggcauaauguagacuuaucuaaagcaauaaauuuaaauggaguaggauuuaacaacguagaugcaaguagucuaggagcggcacacgucggacaaagcgcgucaagaggaagaggauuaggagaaaauccagaugaugaagaaggagaugcaaaaaaaaaaaaagauggaaaaaaagcagagccgaaaaauccaagagaaaauaaauuaaaacaaccagaagauggcgcaggaaaucaaccaggagcaaacggagcaggggaucaaccgggagcuaacggagcuggaaaucaaccgggagcaaauggagcaggaaaucaaccaggagcaaacggggcaggaaaucaaccaggagcaaauggagcagggaaucaaccaggagcaaauggagcgggaaaccaaccaggagcaaauggagcaggagaucaaccaggagcaaauggagcgggaaaccaaccuggagcaaauggggcaggaaaucaaccuggagcaaauggagcagguaaucaaccaggggcaaauggggcaggagaucaaccaggagcaaacggagcaggaaaucaaccaggagcaaauggagcuggagaucaaccgggagcaaauggagcaggaaaucaaccgggagcaaacggagcagggaaucaaccgggugcaaauggagcaggaaaucaaccaggagcaaauggagcaggaaaucaaccaggagcaaauggugcaggaaaucaaccaggggcuaauggugcaggaggacaagcagcaggaggaaacgcagcaaauaaaaaagcuggagaugcaggugcaggacaaggacaaaauaaugagggagcaaaugcaccaaaugaaaagucagugaaagaguauuuagauaaaguaagaacaacuguaggaacagaauggaccccauguagugugacaugugggguaggagugagagugaggagaagaguaaaugcagcuaauaaaaaaccagaggauuuaacacuaaaugacuuagaaacagauguauguacaauggauaaaugugcaggaauauucaaugugguaucaaauaguuuaggauuaguaauacuauuaguauuagcauuauucaacuaa

SEQ ID NO: 5688 - RNA, 1161 nt, Artificial Sequence
  derived and/or modified CDS sequence (opt6) from Pv(CSP38VK247)__ANS71618.1__CSP
augaagaauuuuauacuacuagcaguaaguagcauauuauuaguugauuuauuuccaacacacuguggacauaacguagauuuaagcaaagcaauaaauuuaaauggaguaaauuucaauaacguagaugcaagcucacuaggagcagcucauguaggacaaagugcaaguagagguagaggauuaggugaaaauccagaugaugaagagggagaugcuaaaaaaaaaaaagacggaaaaaaagcagaaccaaaaaauccaagagaaaacaaauuaaaacaaccagaagauggagcaggagaucaaccuggagcaaauggagcaggaaaucaaccaggagcaaauggggcuggaaaucaaccaggagcaaauggugcgggcaaucaaccaggagcaaauggagcaggaaaccagccaggagcaaauggagcaggcaaucaaccaggagcaaauggagcuggaaaucaaccaggagcaaauggagcaggagaucagccaggugcaaacggagcagggaaucaaccaggagcuaauggagcaggagaucaaccaggagcaaauggggcaggaaaccaaccaggggcuaauggagcaggaaaucaaccaggugcaaauggagcaggagaucaaccaggggcuaauggagcaggaaaucaaccaggagcaaacggugcaggagaucaaccaggagcaaacggagcaggaaaucagccaggcgcaaauggagcaggaaaccaaccaggagcaaauggagcggguaaccaaccaggagcaaauggagcuggaaaccagccaggagcuaauggagcaggaggacaggcagcagggggaaaugcagcgaauaagaaagcaggagaugcaggagcaggacaaggacaaaauaacgaaggugcaaaugcaccaaaugaaaaaaguguaaaagaauaucuagauaagguaagagcaacaguaggaacagaauggacaccuuguaguguaacaugcgguguaggaguaagaguaagaagaagaguaaacgcagccaauaaaaaaccugaagauuuaacacuaaaugacauagaaacagacguauguacaauggauaaaugcgcagguauauuuaauguaguaucaaauaguuuaggauuaguaauauuacuaguauuagcauuauucaacuaa

SEQ ID NO: 5689 - RNA, 1161 nt, Artificial Sequence
  derived and/or modified CDS sequence (opt6) from Pv(CSP48VK247)__ANS71628.1__CSP
augaaaaauuucauacuacuagcagugagcaguauacuacuaguggauuuauuuccaacacauuguggacacaacguagaucuaaguaaagcuauaaauuuaaauggaguaggauuuaauaacguagaugcaucaaguuuaggagcagcucauguaggacaaagcgcaagcaggggacgaggauuaggagaaaacccagacgaugaagaaggagaugcaaaaaaaaaaaaagacggaaaaaaagcagaaccaaaaaacccaagagaaaauaaacuaaaacaaccagaagauggagcaggaaaucaaccuggagcuaauggagcaggagaucaaccuggagcaaauggagcaggaaaccaaccaggagcaaauggagcaggaaaucaaccaggugcaaauggagcgggaaaccaaccaggggcaaauggggcaggaaaucaaccaggagcaaacggagcaggaaaucaaccuggugcaaauggagcaggagaucaaccaggagcaaauggagcaggaaaucaaccaggagcuaauggagcaggaaaucaaccaggagcaaauggagcgggaaaucaaccgggagcaaauggagcaggagaucaaccaggagcaaacggagcagguaaccaaccaggagcuaacggagcaggagaucaaccaggagcaaacggagcaggaaaucaaccuggagcaaauggcgcgggcaaucaaccaggagcuaacggagcaggaaaucaaccgggggcgaacggagcgggaaaucaaccuggagcaaauggugcaggaaaccaaccuggagcaaauggugcaggaggacaagcagcaggaggaaacgcagcaaacaaaaaagcuggagaugcaggagccggacaaggucaaaauaaugaaggagcuaaugcaccaaaugaaaaaaguguaaaagaauauuuagacaaaguaagagcaacagugggaacagaauggacaccauguagcguaacauguggaguaggagugagaguaagacgaagaguaaaugcagcaaacaaaaaaccagaagacuuaacauuaaaugaucuagagacggauguauguacaauggauaaaugugcaggaauuuuuaauguaguaucaaauagcuuaggauuaguaauauuauuaguauuagcauuauuuaacuga

SEQ ID NO: 5690 - RNA, 1161 nt, Artificial Sequence
  derived and/or modified CDS sequence (opt6) from Pv(Nr01)__ADB92539.1__CSP
augaagaauuucauauuauuagcaguuaguaguauauuacuaguggauuuauuuccuacacauuguggacauaauguagauuuaaguaaagcaauaaacuuaaauggaguaggauuuaauaauguagaugcgucaucuuuaggagcagcgcauguaggacaaagugcaaguaggggaagagguuuaggagagaauccagaugaugaagaaggagaugcaaaaaaaaaaaaagauggaaaaaaagcagaaccaaaaaauccaagagaaaacaaauuaaaacaaccagaagauggagcaggugaucaaccaggagcaaauggagcaggaaaucaaccaggagcgaauggagcaggaaaucaaccaggagcgaauggagcaggcaaucaaccaggcgcgaauggggcaggaaaucaaccaggagcaaauggagcagggaaucaaccuggagcaaauggagcaggaaaucaacccggagcaaauggagcaggagaucaaccaggagcaaauggggcagaugaccaaccaggagcgaauggagcaggaaaucaaccaggugcaaacggagcuggaaaucaaccaggagcaaauggggcaggggaucaaccaggagcaaauggagcaggagaucaaccaggugcaaauggagcuggaaaccaaccaggagcaaacggagcaggggaucaaccaggagcaaauggugcagguaaucaaccaggagcaaauggggcaggaaaucaaccgggagcaaauggagcagguggacaaccgggagcaaauggggcaggaaaucaaccaggagcaaauggagcgggaggacaagcagcgggagguaaugcagcaaauaaaaaagcgggggaugcaggagcaggacaaggacaaaauaaugaaggugcaaaugcaccaaaugaaaaaucaguuaaagaauacuuagauaaaguacgagcgacaguaggaacagaauggacaccuuguaguguaacauguggaguaggaguaagaguaagaagaagaguaaaugcagcaaauaaaaaaccagaagauuuaacauuaaacgauuuagaaacagauguguguacaauggacaaaugugcaggaauauuuaauguaguaucaaauucuuuaggauuaguaauauuauuaguacuggcuuuauuuaauuaa

SEQ ID NO: 5691 - RNA, 1161 nt, Artificial Sequence
  derived and/or modified CDS sequence (opt6) from Pv(Nr02)__ADB92540.1__CSP
augaaaaauuucauacuauuagcaguaaguaguauauuauuaguagauuuguuuccgacacauuguggucauaauguagauuuaagcaaagcaauaaaucuaaauggaguaggauucaauaauguagacgcaaguagcuuaggagcagcucaugugggacaaagcgcaagcagaggaagaggauuaggagaaaauccagacgaugaagaaggggaugcaaagaaaaaaaaagauggaaaaaaagcagaaccaaaaaauccuagggaaaauaaauuaaaacaaccagaagauggagcaggagaucaaccaggggcaaauggagcaggaaaucaaccaggagcaaauggagcgggaaaucaaccaggagcaaauggagcaggaaaucaaccaggagcaaacggagcugguaaccaaccaggggcaaauggagcagguaaucaaccgggagcaaauggagcaggaaaucaaccaggagcaaauggagcaggagaucaaccaggagcaaauggagcaggagaucaaccaggagcaaauggagcuggaaaucagccaggggcuaauggagcaggaaaucaaccaggagcaaauggggcaggcgaucaaccaggggcaaauggugcaggagaccaaccaggagcaaauggugcaggaaaucaaccaggagcgaauggagcuggagaucaaccaggagcaaauggagcaggaaaucaaccaggcgcaaauggagcgggaaaucagccuggagcaaacggagcagguaaucaaccaggagcaaauggagcaggaaaacaaccaggggcaaauggagcggguggacaagcagcaggaggaaaugcagcgaauaaaaaagcaggagaugcaggugcaggacaaggacaaaauaaugaaggagcaaaugcaccaaaugaaaaaagcgugaaagaauaccuagauaaaguaagagcuacaguaggaacagaauggacaccauguagugugacauguggaguaggaguaagaguaagaagaagaguaaaugcagcaaacaaaaaaccagaagacuugacacuaaaugacuuagagacagauguauguacaauggauaaaugugcgggaauauuuaauguaguaaguaauaguuuaggauuaguaauauugcuaguacuagcauuauuuaauuga

SEQ ID NO: 5692 - RNA, 1161 nt, Artificial Sequence
  derived and/or modified CDS sequence (opt6) from Pv(Nr05)__ADB92543.1__CSP
augaaaaauuuuauacuacuugcaguaucaaguauauuauuaguugaucuauuuccaacacauuguggacauaauguagauuuaagcaaagcaauaaauuuaaauggaguaggauuuaauaauguagaugcgagcaguuuaggagcagcacauguaggacaaagugcaagcagagguagaggauuaggagaaaauccugaugacgaagaaggagaugcaaaaaaaaaaaaagauggaaaaaaagcagaaccaaaaaauccaagggagaauaaacuaaaacaaccagaagauggagcaggagaucaaccaggagcaaauggagcaggaaaccaaccaggggcaaauggagcuggaaaccagccaggagcaaauggggcaggaaaccaaccgggugcaaauggggcaggaaaucaaccaggagcaaauggggcaggaaaucaaccaggagcgaauggagcuggaaaucaaccaggagcaaauggagcgggaaaucaaccaggagcaaauggagcagaugaucaaccaggggcaaauggagcagggaaccaaccaggagcaaauggggcaggaaaucaaccaggggcaaacggagcaggaaaucaaccaggagcaaacggagcaggagaucaaccuggagcaaauggagcaggaaaucaaccaggggcaaauggagcgggagaucaaccaggagcaaauggugcaggaaaucaaccaggagcaaauggugcaggaaaucaaccaggagcuaauggugcaggaaaucagccaggagcgaauggagcaggaaaucaaccaggagcaaauggagcaggaggacaagcggcuggagguaacgcagcaaauaaaaaagcaggagaugcaggagcuggacaaggacaaaauaaugaaggugcaaacgcacccaaugaaaaaucaguaaaagaauauuuagauaaaguaagagcgacaguaggaacagaauggacaccaugcucaguuacaugcggaguggggguaagaguaagaagaagaguaaaugcagcaaauaaaaaaccagaagauuuaacauuaaaugauuuagaaacagacguauguacaauggauaaaugugcagguauauuuaauguaguaaguaacaguuuaggacuaguaauacuauuaguauuagcacuauucaauuaa

SEQ ID NO: 5693 - RNA, 1161 nt, Artificial Sequence
  derived and/or modified CDS sequence (opt6) from Pv(Vc01)__ADB92544.1__CSP
augaaaaauuucauacuauuagcaguaucaucaauauuacuaguugaucuauuuccaacacauugcgggcauaauguagaucuaaguaaagcaauaaauuuaaacggaguaggauuuaauaauguagaugcuaguagcuuaggagcagcacauguaggacaaucagcaaguagaggaagaggauuaggcgaaaauccagaugaugaggaaggagaugcaaaaaaaaaaaaagacgguaaaaaagcagaaccaaaaaauccaagagagaacaaacuaaaacaaccagaagauggagcgggggaucaaccaggagcaaacggagcgggaaaccagccaggagcaaacggagcaggaaaucaaccaggagcaaauggagcaggaaaucaaccaggagcaaauggagcaggaaaccagccgggagcaaauggagcaggaaaccaaccaggugcuaauggggcaggaaaucaaccaggagcgaauggagccggaaaucaaccaggagcuaauggagcagacgaucaaccaggugcaaauggggcaggaaaucaaccaggagcaaauggugcgggaaaucaaccaggagcaaauggagcagggaaccaaccuggagcaaauggagcaggagaucagccaggagcaaauggagcaggaaaccaaccaggggcaaauggagcgggagaucaaccaggagcaaauggagcaggaaaucaaccaggagcuaauggagcgggaaaucaaccuggagcaaauggagcaggaaaucaaccaggagcaaauggagcaggaaaucaaccgggagcaaacggggcgggaggacaagcggcaggaggaaaugcugcgaacaaaaaagcuggagaugcaggaggaggacaaggacaaaauaaugaaggagcaaaugcuccaaaugaaaaaaguguaaaagaauaucuagauaaaguacgagcaacaguaggaacagaauggacaccaugcaguguaacauguggagucggaguaagaguaaggagaaggguaaaugcagcaaauaaaaaaccagaagaucuaacauuaaacgauuuggaaacggauguaugcacaauggauaaaugcgcaggaauuuucaacguaguaaguaauucacuaggguuagugauauuauuaguauuagcauuauuuaacuaa

SEQ ID NO: 5694 - RNA, 1161 nt, Artificial Sequence
  derived and/or modified CDS sequence (opt6) from Pv(Vc02)__ADB92545.1__CSP
augaaaaauuucauacuacuggcaguaaguagcauauuacuaguggauuuauuuccaacacauuguggucauaauguagaucuaaguaaagcaauaaaucugaauggaguaggauuuaauaauguagaugcaaguucauuaggagcagcacacguaggacaaagcgcaaguagaggaagaggauuaggagagaacccagaugaugaagaaggagaugcaaaaaaaaaaaaagacggaaaaaaagcggaaccaaaaaacccaagagagaauaaguuaaaacaaccggaagauggagcgggagaucaaccaggagcaaauggagcaggaaaucaaccaggagcaaauggagcaggaaaucaaccaggagcaaauggagcuggaaaccaaccaggagcaaauggagcaggaaaucaaccaggagcgaauggugcaggaaaucaaccaggugcaaauggagcaggaaaucaaccaggagcaaauggagcaggagaccagccaggagcaaauggagcagaugaucaaccuggggcuaauggagcaggaaaucaaccaggagcuaacggagcuggaaaucaaccgggagcaaauggggcaggagaucaaccaggagcgaauggagcaggagaucaaccaggagcuaauggugcagggaaucaaccaggagcgaacggagcaggagaucaaccuggagcuaacggugcugggaaccaaccaggagcgaauggagcaggaaaucaaccaggggcuaacggagcggggaaccaaccaggagcaaauggagcaggaaaucaaccaggagcaaauggugcaggaggacaagcagcaggaggaaaugcagcaaacaaaaaagcaggagacgcaggagcaggacaaggacaaaacaaugaaggggcaaaugcaccgaaugaaaaaaguguaaaagaauacuuagauaaaguaagagcgacgguaggaacagaauggaccccguguaguguaacauguggaguaggaguaagaguaaggagaagaguaaaugcagcgaauaaaaaaccagaagaucuaacauuaaaugacuuagaaacagauguauguacaauggauaaaugcgcaggaauauuuaacguaguaaguaauagccuaggacuaguaauauuauuaguacucgcacuauuuaacuaa

SEQ ID NO: 5695 - RNA, 1158 nt, Artificial Sequence
  derived and/or modified CDS sequence (opt6) from Pv(Cam46)__AHL69652.1__CSP
augaaaaauuuuauauuauuagcaguaucaaguauauuauuaguagacuuauucccaacucacuguggacauaauguagauuuaucaaaggcaauaaauuuaaauggaguaggauuuaauaauguagacgcaagcagcuuaggugcagcucauguaggacaaucagcaaguagaggaagaggauuaggagaaaacccagaugaugaagaaggagaugcaaaaaaaaaaaaagauggaaaaaaggcagagccaaaaaauccaagagaaaauaaauuaaaacaaccagaagauggagcaggaaaccaaccaggagcgaacggagcaggaaaucaaccaggagcuaauggagcgggaaaucaaccaggugcaaauggagcugacgaucaaccaggagcaaauggagcagguaaucaaccaggagcaaauggagcaggaaaucaaccaggugcaaauggagcaggaaaucaaccaggagcaaauggagcuggaaaucaaccaggagcaaauggagcagaugaucaaccaggagcaaacggagcaggaaaucaaccaggagcuaauggagcaggaaaucaaccaggggcgaacggugcagguaaucaaccaggagccaauggagcaggagaucaaccaggagcaaauggagcuggaaaucagccaggagcaaauggagcagguaaucaaccgggagcaaauggagcagggaaucaaccaggagcaaacggggcagggaaucagccaggcgcaaacggagcaggaaaucaaccaggagcaaauggagcgggcaaccaaccaggagcaaauggagcaggaggacaagcagcaggaggaaaugcaggaggaaaugcaggaggaaacgcaggaggacaaggacaaaauaacgaaggagcaaaugcuccaaaugaaaaaucuguaaaagaauaccuagauaaaguaagagcaacaguaggaacagaauggacaccauguaguguaacauguggaguaggaguaaggguaaggagaagaguaaacgcagcaaauaaaaaaccagaagacuuaacauuaaaugacuuagaaacagauguauguacaauggauaaaugugcugguauauuuaauguaguaagcaauagcuuaggacuagugauauuauuaguuuuggcauuauuuaauuaa

SEQ ID NO: 5696 - RNA, 1143 nt, Artificial Sequence
  derived and/or modified CDS sequence (opt6) from Pv(Cam20)__AGN05250.1__CSP
augaaaaauuuuauauuauuagcagucagcaguauucuauuaguagauuuauuuccaacacauuguggacauaauguagauuuaaguaaagcaauaaaucuaaauggaguaaauuuuaauaacguugaugcaaguaguuuaggagcggcacauguaggacaaucagcaaguagagggcgaggauuaggggaaaauccagaugaugaagaaggagacgcaaaaaaaaaaaaggauggaaaaaaagcagaaccaaaaaauccaagagagaauaaauuaaaacaaccaggcgaucgagcagauggucaaccagcaggagauagagcagauggucaaccagcaggagacagagcagauggucaaccugcuggugauagagcagcgggacaaccagcaggagauagagcagaugggcaaccagcaggagauagagcagcaggacaaccagcaggagauagagcagauggacaaccagcaggagauagagcagcaggacaaccggcaggggauagagcggauggacaaccagcgggagauagagcagcuggucaaccagcaggcgauagagcggauggucaaccagcaggagacagagccgcaggacagccagcaggagauagagcagcaggacaaccggcaggagauagagcagcaggacaaccugcaggagauagagcagacggacaaccggcaggagauagagcagcaggacagccggcaggggauagagcagcugggcaaccagcaggagauagagcagcaggacaaccagcaggaaauggagcaggaggucaagcagccggaggaaaugcugcaaauaaaaaagcugaagaugcaggaggaaaugcaggaggacaaggacaaaacaaugaaggagcaaaugcaccaaaugaaaaaucaguaaaagaauauuuagacaaaguaagagcaacaguaggaacagaauggacaccauguucggugacauguggaguaggaguuagaguaaggagaagaguaaaugcugcaaacaaaaaaccggaagacuugacauuaaaugauauagaaacugauguauguaccauggauaaaugcgcaggaauauuuaauguaguuaguaauaguuugggauuagugauauuauuaguacuagcauuauucaauuaa

SEQ ID NO: 5697 - RNA, 1143 nt, Artificial Sequence
  derived and/or modified CDS sequence (opt6) from Pv(Cam22)__AGN05252.1__CSP
augaaaaauuuuauauuauuggcaguaaguaguauauuauuaguagaucuauuuccaacacacuguggacauaauguagauuuaucaaaggcaauaaauuuaaaugggguaaauuuuaauaauguagaugcaaguagucuaggagccgcacauguaggacaaagugcaaguagagggagaggauuaggggaaaauccagaugaugaagaaggagaugcaaaaaaaaaaaaagauggaaaaaaggcagaaccuaaaaauccaagagaaaauaaauuaaaacaaccaggcgauagagcggauggacaaccugcaggagauagggcagauggacaacccgcaggagauagagcagaugggcaaccugcaggagauagagcagcaggacaaccagcaggcgauagagcggauggucaaccggcaggagauagggcagcagggcaaccagcaggagauagagcagacggacaaccagcaggagacagagcagcaggacaaccagcaggagaucgcgcagcaggucaaccagcaggagauagagcagauggacaaccagcaggagaccgggcagcaggacaaccggcaggggacagggcagacggacaaccagcaggagauagagcagcuggacaaccagcaggagauagagcugcaggacaaccagcgggagauagggcagacggccaaccagcaggggacagagcagcaggucaaccagcaggagauagggcagcaggacaaccagcaggagauagagcggcaggacaaccagcaggaaacggagcuggaggacaagcagcaggaggaaaugcagcaaauaaaaaagcagaagaugcuggaggaaaugcaggaggacaaggacaaaacaaugaaggagcaaaugcaccaaacgaaaaaaguguaaaagaauacuuagauaaaguaagagcgacaguaggaacagaauggacaccauguaguguaacauguggagucggaguaagaguaaggagaagaguaaaugcagcaaauaagaaaccagaagauuuaacgcuaaaugacauugaaacagauguauguacaauggauaagugugcaggaauauuuaauguagugucaaauucauuaggauuaguaauauuauuaguauuagcuuuauuuaauuaa

SEQ ID NO: 5698 - RNA, 1143 nt, Artificial Sequence
  derived and/or modified CDS sequence (opt6) from Pv(Cam36)__AHL69651.1__CSP
augaaaaauuuuauauuauuagcaguaucaaguauauuauuaguugauuuauuuccaacacauuguggacauaauguagauuuaaguaaagcuauaaauuuaaauggaguaaauuucaauaacguagaugcaucaucauugggagcagcgcauguuggacagagcgcaaguagaggaagaggacuaggagaaaauccagaugacgaagaaggagaugcaaaaaaaaaaaaggauggaaaaaaagcggaaccaaaaaauccaagagaaaauaaacuaaaacaaccagcaggagacggagcagcaguacaaccagcaggggauggugcagcaguacaaccagcaggagauggagcagauggacaaccagcaggugauggugccgcaguacaaccagcaggugauggagcugcuggacaaccggcaggcgauagagcagcaggacaaccagcagggaauagagcagcaggacaaccagcaggagacagagcagauggacaaccagcaggugauagagcagcuggacaaccagcaggagauagagcagcaggacaaccagcaggagauagagcagaugggcaaccagccggagauagagcagcaggacaaccagcaggggauagagcugcaggacagccagcaggagauagagcagcuggacaaccagcaggagacagagcagacggacaaccggcuggagauagagcagcaggacaaccggcuggugacagagcagcuggacaaccggcaggagauagagcagcaggacaagcagcaggaggaaaugcgggaggaaaugcaggagguaaugcaggaggaaaugcaggaggaaaugcaggaggaaaugcagguggacaaggacaaaauaaugaaggagcaaacgcaccaaacgaaaagaguguuaaagaauauuuagauaaaguaagagcaacaguaggaacagaauggacaccauguaguguaacuuguggaguaggaguaagagugagaagaagaguaaaugcagcaaauaaaaaaccagaagauuuaacguuaaaugaucuagaaacggauguauguacaauggauaaaugugcaggaauauuuaacguaguaaguaauagcuuaggauugguaauauuguuaguucuagcauuauuuaauuaa

SEQ ID NO: 5699 - RNA, 1137 nt, Artificial Sequence
  derived and/or modified CDS sequence (opt6) from Pv(Pt01.7)__ADB92550.1__CSP
augaaaaauuucauauuauuagcaguaaguaguauauuauuaguugacuuauuuccaacgcauuguggacauaauguugaucuaaguaaagcgauaaaucuaaauggaguaggguuuaacaauguagaugcaagcaguuuaggagcugcacaugugggacagagcgcaucacgaggaagaggauuaggagaaaacccagaugaugaagaaggagacgcaaaaaaaaaaaaagauggaaagaaagcagaaccaaaaaauccaagagagaauaaauuaaaacaaccugaagauggagcaggagaucaaccuggagcaaauggagcaggaaaucaaccaggagcaaauggagcagggaaucaaccaggagcaaacggagcaggaaaucaaccaggagcaaacggagcuggaaaccaaccaggagcaaacggagcagacgaucaaccgggagcaaauggagccggaaaccaaccaggagcuaauggagcaggaaaucaaccaggagcaaacggagcaggaaaucaaccaggagcaaauggggcaggagaucaaccgggagcaaacggggcaggaaaucaaccgggugcaaauggagccggagaucaaccaggggcaaauggagcaggaaaccaaccaggagcaaauggggcgggaaaucaaccaggagcuaacggagcaggaaaucaaccaggagcaaauggagcuggaaaucagccaggagcaaacggagcaggaggacaagcagcaggaggaaaugcagcaaauaaaaaagcuggagaugcaggggcaggaggacaagcagcaggaggaaaugcggcaaauaaaaaagcaggagaugcaggagcaggacaaggacaaaauaaugaaggggcgaacgcaccaaaugaaaagagugugaaagaauauuuagauaaaguaagagcaacgguaggaacagaauggacaccauguagcguaacauguggaguagggguaagaguaagaagaagaguaaaugcagcaaauaaaaaaccagaagauuuaacacuaaaugauuuagaaacagacguauguacaauggauaagugugcaggaauauuuaauguagugagcaauaguuuaggauuggugauauugcugguauuagcauuauuuaauuaa

SEQ ID NO: 5700 - RNA, 1134 nt, Artificial Sequence
  derived and/or modified CDS sequence (opt6) from Pv(Cam39)__AGN05267.1__CSP
augaaaaauuuuauauuauuggcugugaguucgauucuacugguagauuuauuuccaacucauuguggacauaacguagaucuuaguaaagcaauaaauuuaaauggaguaggauuuaauaauguagaugcaaguagcuuaggagcagcacauguaggacaaucagcaaguagagguagaggucuaggggaaaauccagacgaugaggaaggagaugcaaaaaaaaagaaagacggaaaaaaagcagaaccgaagaauccaagggaaaacaaacuaaaacaaccagccggagauagagcagaugggcaaccugcuggagauagagcggacggucaaccagcaggagauagagcagauggacaaccugcaggggauagagcagcgggacaaccggcaggagauagagcugacggacaaccagcaggagauagggcagcaggacaaccagcaggggauagagcagauggacaaccugcgggagauagagcagcaggacaaccagcaggagauagagcagacggacaaccagcgggagauagagcagcaggacaaccagcgggagacagagcggcaggacagccagcaggagacagagcagcaggacaaccagcaggagacagagcagauggucaaccagcgggagauagagcagcaggacaaccagcaggagacagagcagauggacaaccagcuggagacagagcagcaggacaaccggcaggagauagagcugcaggacaacccgcaggagacagagcagcaggacaaccagcaggaaauggagcaggaggacaagcagcaggaggaaaugcaggaggaaaugcuggagggaaugcagguggacaaggacaaaauaaugaaggagcaaaugcaccuaacgaaaaaaguguaaaagaauauuuagauaagguuagagcgacaguagggacggaauggacaccauguaguguaacuuguggaguagguguaagaguaagaagaagaguaaacgcagcaaauaaaaaaccagaagaucuaacauuaaacgacuuagaaacugauguauguacgauggauaaaugugcaggaauauucaauguaguaaguaauagcuuaggauuagucauauuauuaguauuagcauuauuuaauuaa

SEQ ID NO: 5701 - RNA, 1134 nt, Artificial Sequence
  derived and/or modified CDS sequence (opt6) from Pv(Nr03)__ADB92541.1__CSP
augaaaaauuuuauauuauuagcaguaaguaguauauuauugguagaucuauuuccaacacacuguggacacaauguagaucuaaguaaagcaauaaaucugaacggaguaaauuuuaauaauguagaugcaagcagcuuaggagcagcacauguaggacaaagugccaguagaggaagaggacuaggggagaauccagacgaugaagaaggggaugcaaaaaaaaaaaaagauggaaaaaaagcggaaccaaaaaauccaagggaaaauaaacuaaaacaaccaggagacagagcagacggacaaccagcaggagauagagcagauggacaaccagcaggagauagagcagauggacaaccagcaggagauagagcagauggacaaccagcaggagauagagcagauggacaaccagcaggagauagagcagauggacaaccugcgggugauagggcagacgggcaaccagcaggagacagagcagacggacaaccagcaggagauagagcagauggacagccggcaggagauagagcugauggacaaccggcaggugauagagcagauggacaaccagcaggagacagagcagacggacaacccgcaggcgacagagcugauggacaaccagcgggggauagagcagauggucaaccggcgggagauagagcagauggacaaccagcuggagaucgagcagauggacaaccagcaggagauagagcagcaggacaaccggcaggagacagagcagcaggacaaccagcaggggauagagcagcaggacaaccagcagguaauggagcaggaggacaagcagcaggaggaaacgcaggaggacaagggcagaauaacgaaggagcaaaugcaccuaaugaaaaaaguguaaaagaauauuuagauaaaguaagagcaacaguaggaacagaguggacaccguguaguguaacauguggaguuggaguaagaguaagaagaagaguaaaugcagcaaauaaaaaaccggaagauuugacguuaaaugaucuugagacagauguauguacuauggauaaaugcgcagguauauuuaauguuguaucaaauaguuuaggacuaguaauacuauugguuuuagcuuuauuuaauuaa

SEQ ID NO: 5702 - RNA, 1134 nt, Artificial Sequence
  derived and/or modified CDS sequence (opt6) from Pv(Pt04.1)__ADB92554.1__CSP
augaaaaauuucauauuacuggcaguaucaaguauauuauuaguagauuuauuuccuacacacuguggacauaauguugaucuaaguaaagcaauaaauuuaaacggaguuaauuuuaauaauguagaugcaucaaguuugggagcagcacauguaggacaaagugcaucgagagguagaggauuaggagaaaauccugacgaugaagaaggagaugcaaaaaaaaaaaaagauggaaaaaaagcagaaccuaaaaauccaagggaaaauaaauuaaaacaaccaggugauagagcagacggacaaccagcaggagacagagcagauggucaaccagcaggagauagagcagauggacaaccagcuggagauagagcagcaggucaaccagcaggagauagagcagcuggucaaccagcuggagauagagcagauggacagccagcgggagauagagcagauggacaaccagcaggagauagagcagauggucaaccugcaggagauagagcagacggacaaccagcuggagauagagcagcaggacaaccugcgggugauagagcagcaggacaaccagcaggagauagagcagauggacaaccagcaggcgaucgagcggcaggacaacccgcgggagauagagcagauggacaaccggcaggugacagagcggcaggacagccagcaggagauagagcugauggacaaccagcaggagauagagcugcaggacaaccagcaggagauagagcagcagggcaaccagcaggagauagagcagcagggcaagcugcgggagauagagcugcaggacaagcagcagguggaaaugcggggggacaaggucaaaauaaugaaggagcaaaugcaccaaaugaaaaaaguguaaaagaauacuuagauaaaguaagagcaacaguaggaacggaauggacaccuuguaguguaacauguggaguuggaguaagaguuagaagaagaguaaacgcugcaaauaaaaaaccagaagacuuaacguuaaaugauuuggaaacagauguaugcacaauggauaaaugcgcuggaauauuuaauguaguaucaaauaguuuagguuugguaauauuauuaguauuagcacuauucaauuaa

SEQ ID NO: 5703 - RNA, 1134 nt, Artificial Sequence
  derived and/or modified CDS sequence (opt6) from Pv(Sal1)__ADB92528.1__CSP
augaaaaauuuuauauuacuagcaguuaguaguauauuacuuguagaucuauucccuacacacuguggacauaacguugauuuaucaaaagcaauaaauuuaaauggaguaaauuucaauaacguagaugcgagcagcuuaggugcagcucauguagggcaaucagcaaguagaggaagaggucucggagaaaauccagaugacgaagaaggagaugcaaaaaaaaaaaaagauggaaaaaaagcggaaccaaaaaauccaagagaaaauaaauuaaaacaaccaggagauagagcagauggacagccagcaggagauagagcagauggacagccagcaggagauagagccgauggacaaccagcaggagauagagcugauggucaaccagcaggagacagagcagcaggacaaccagcuggggauagagcagaugggcaaccagcaggagacagagcagauggucaaccagcaggugaucgagcagacggucaaccagcaggugaucgggcagaugggcaaccagcgggagauagagcagcggggcaaccagcaggagacagggcagcaggacaaccagcaggagauagagcagauggacaaccagcaggagauagagcagcaggacaaccggcuggagauagagcggauggacagccagcgggagauagagcagcaggacaaccugcaggagauagagcagacgggcaaccagcaggagacagagcagcaggacaaccagcaggagacagggcggcaggacaaccagcaggugauagagcagcaggacaagcagcaggagauagagcagcaggucaagcagcaggaggaaacgcagggggacaaggacaaaauaaugaaggagcgaaugcaccaaaugaaaaaaguguaaaagaauauuuagauaaaguaagagcaacgguagguacugaauggacaccauguagcguaacaugcgggguagggguaaggguaaggagaagaguaaacgcagcaaauaaaaaaccagaagauuuaacacuaaaugauuuagaaacugauguauguacaauggacaaaugugcaggaauuuucaacguaguaagcaauucauuaggacuaguaauauuauuaguacuagcauuauuuaacuag

SEQ ID NO: 5704 - RNA, 1131 nt, Artificial Sequence
  derived and/or modified CDS sequence (opt6) from Pv(Cam27)__AGN05255.1__CSP
augaaaaacuuuauauuacuggcaguaaguaguauauuguuaguagauuuauuuccuacacauuguggacauaauguagauuuaaguaaagcaauaaauuuaaauggaguaggguucaauaauguagaugcgaguaguuuaggagcagcacaugugggacaaagcgcaaguaggggaagaggacuaggagaaaaccccgaugacgaagaaggugaugcaaaaaaaaaaaaagauggaaaaaaagcagaaccaaaaaauccuagagaaaauaaauuaaaacaaccagcaggagcuagagcagacggacaaccagcaggggacagagcagauggucaaccagcuggagauagagcagacggacaaccagcaggagaccgagcggcgggacaaccagcuggagauagagcagacgggcaaccggcaggggauagggcagcaggacagccagcaggagauagagcagauggucaaccagcuggugauagagcagcaggacaaccugcaggugauagagcagauggccaaccagcaggagauagagcagcaggacaaccagcaggagaucgagcagcaggucaaccagcaggagauagagcagauggacaaccagcaggagauagagcagcagggcaaccagcaggagauagagcagacggacaaccagcgggagaccgagcggcuggacaaccugcgggagauagagcagcaggacaaccagcaggagacagagcggcaggacaaccagcaggcaacggagcaggaggacaagcagcuggaggaaacgcaggaggaaaugcagggggaaaugcaggaggaaaugcaggaggaaaugcaggagggcaaggacaaaacaaugaaggugcaaaugcaccuaaugaaaaaaguguaaaagaauaucuggacaaaguaagagcaacaguaggaacugaauggacaccguguaguguaacauguggaguaggaguaagaguaagaagaagagugaaugcagcaaauaaaaaaccagaagacuuaacauugaacgauuuagaaacagauguguguacaauggauaaaugugcaggaauauuuaauguaguaagcaauucauuaggauuaguaauauuauuaguauuggcauuauuuaauuaa

SEQ ID NO: 5705 - RNA, 1131 nt, Artificial Sequence
  derived and/or modified CDS sequence (opt6) from Pv(Cam46)__AGN05273.2__CSP
augaaaaauuucauauuauuagcaguaaguagcauauuacuaguagaucuauuuccaacacauugugggcauaauguagauuuaagcaaagcgauaaaucuaaauggagugaauuuuaauaauguagaugcaucaagcuuaggagcagcacauguaggacaaagcgcaaguagaggaagaggacuaggagaaaacccggaugaugaggagggggacgcgaaaaaaaaaaaagacgggaaaaaggcggaaccaaaaaacccuagagaaaauaaauuaaaacaaccagcaggagauagagcagauggacaaccagcaggagaucgggcagauggucaaccagcgggugauagagcagauggacaaccagcaggagauagagcagcaggacaaccagcgggagauagagcagauggacaaccagcaggggauagagcagcaggacaaccagcaggggauagagcagauggacaaccagcuggagauagagcugcagggcaaccagcaggagauagagcagauggacaaccagcaggagauagagcagcaggacaaccagcaggagauagagcagcaggccaaccagcaggagauagagcagacgggcaaccagcaggagauagagcagcaggacaaccggcaggagauagagcagauggucaaccagcaggagauagagcagcaggacaaccagcuggagauagagcagcuggucaaccagcaggagauagagcggcaggacaaccagcaggaaacggagcuggaggacaagccgcaggaggaaacgcaggaggcaaugcaggaggaaaugcaggagggaaugcaggaggaaaugcaggagggcaaggucaaaauaaugaaggagcaaaugcuccaaaugaaaaaaguguaaaagaauauuuagauaaagugagagcgacaguaggaacagaauggacaccaugcagcguaacaugcggagugggggugaggguaagaagaagaguaaaugcagcuaacaagaaaccugaagauuugacuuuaaaugauuuagaaacagauguuuguacaauggauaaaugugcaggaauauuuaacguaguaaguaauagucuaggacuaguuauauuauuaguacuagccuuauucaauuaa

SEQ ID NO: 5706 - RNA, 1128 nt, Artificial Sequence
  derived and/or modified CDS sequence (opt6) from Pv(CSP10VK210)__ANS71590.1__CSP
augaaaaauuucauauuguuagcaguaucaaguauauuacuaguagaucuauuuccgacacauugcggacauaauguagaucuaaguaaagcaauaaauuuaaacggaguaaauuuuaacaacguagaugccucuagccuuggggcggcacauguagggcaaagugcaaguagagguagagguuuaggugaaaauccagaugaugaagaaggggaugcaaaaaaaaaaaaagauggaaagaaagcugaaccaaaaaauccaagagaaaauaaauuaaaacaaccaggggauagagcagauggacaaccagcaggagauagagcagauggucaaccagcgggugauagagcagauggacaaccagcuggagacagagcagauggacaaccagcgggagacagagcggcaggacaaccagcaggagauagagcagcaggucaaccagcaggagaucgagcagauggacaaccugcaggggauagagcggcaggacaaccagcaggagauagagcggauggacaaccagcaggagauagagcagcaggacaaccagcaggugauagagcagcagggcaaccagcaggagauagagcagcaggacaaccggcaggagauagagcugauggacagcccgcuggagauagagcagcagggcaaccagcgggugauagggcagcgggacaaccugcaggagauagagcagcaggacaaccagcaggagacagagcggcaggacaaccagcaggaaauggugcagguggacaagcagcagguggaaaugcagcaaauaaaaaagcagaagaugcagguggaaaugcaggaggaaacgcggguggacaagggcaaaauaaugaaggagcuaaugcaccgaacgaaaaaaguguaaaagaauauuuagauaaaguaagagcuacgguaggaacugaauggacaccauguucaguaacaugugggguaggaguaagaguaagacgacggguaaacgcagcaaauaaaaaaccagaggaucuaacauuaaaugauuuagagacagauguaugcacaauggauaaaugugcgggaauauuuaauguagugaguaauagcuuaggauuaguaauauuacuaguuuuggcauuauucaauuaa

SEQ ID NO: 5707 - RNA, 1122 nt, Artificial Sequence
  derived and/or modified CDS sequence (opt6) from Pv(Cam19)__AGN05249.1__CSP
augaagaauuuuauuuuauuagcaguaucuaguauauuacuaguagacuuauuuccuacacauuguggacacaauguagauuuaucaaaagcaauaaaucugaaugguguaggauuuaauaauguagaugcaaguaguuuaggggcagcacacguaggacagagcgcaaguagaggaaggggacuuggagaaaauccagacgacgaagaaggagaugcaaaaaaaaaaaaagaugggaaaaaagcagaaccaaagaauccaagagaaaauaaauuaaaacaacccgcuggagacagagcggauggacaaccggcaggugauagagcagauggacaaccagcaggugauagagcagauggacaaccggcgggagauagagcagauggacaaccagcaggagauagagcagauggucaaccugcaggagauagagcagcaggacaaccagcaggggauagggcugacggacaaccagcaggcgacagagcagcaggacaaccagcaggagauagagcggauggacagccagcaggagauagagcagauggucaaccugcgggagaucgagcggcaggacaaccagcuggagauagagcagacggacaaccugcaggagauagagccgcaggacaaccggcaggagauagagcagauggacaaccagcaggagauagggcagcaggacaaccagcaggugauagagcagcagggcaaccagcaggagacagagcagcuggacaaccagcagggaauggggcaggaggacaagcugcaggaggaaaugcaggaggaaaugcaggaggaaaugcaggaggaaaugcaggggcaggacaaggacaaaauaaugaaggggcaaaugcaccaaaugaaaaaaguguaaaagaauauuuagauaaaguaagagcaacaguaggaacagaauggacaccaugcaguguaacauguggaguaggaguaaggguaaggagaagaguaaaugcagcuaauaaaaaaccagaagauuuaacauuaaacgacuuagaaacagauguauguacaauggauaaaugcgcaggaauauucaacguuguaaguaauaguuugggacuaguuauauuauugguguuagcguuauucaauuaa

SEQ ID NO: 5708 - RNA, 1119 nt, Artificial Sequence
  derived and/or modified CDS sequence (opt6) from Pv(Cam10)__AGN05241.2__CSP
augaaaaauuuuauauuacuagcggugaguucuauauuacuaguagaucuauuuccgacacacugcggucauaauguagauuugucaaaggcaauaaauuuaaauggaguaggauuuaacaauguggacgcgagcaguuuaggagcagcacauguaggacaaagugcaaguagaggaagaggauugggugaaaauccagaugaugaagaaggagaugcaaaaaaaaaaaaagaugguaaaaaagcagaaccaaaaaauccuagagaaaauaaacuaaaacaaccagcaggagaucgggcagauggacaaccagcaggagacagagcagauggacaaccggcuggggauagagcggauggacaaccagccggagauagggcugcuggacaaccagcaggagauagagcagaugggcaaccagcuggugauagagcugcaggacaaccagcaggggauagagcggauggacaaccugcaggagauagagcugcaggucaaccagcaggagacagagcagauggacaaccagcaggagauagagcagcgggacaaccagcaggggaucgugcagcaggacaaccagcaggagauagggcagacgggcaaccagcgggagauagagcagcaggacaaccagcaggggauagagcagauggacaaccagcaggagauagagcagcaggacaaccagcaggggacagagcagcaggacaaccggcaggugacagggcagcaggacaaccagcaggaaacggagcagguggacaagcagcagggggaaaugcaggaggaaaugccggaggaaaugcaggggggaaugcaggaggacaaggacaaaauaacgaaggagcaaaugcaccuaaugaaaaaagugucaaagaauauuuagauaaaguaagagcuacaguaggaacagaauggacaccgugcagugugacauguggaguagggguaagaguaagaagaagaguaaacgcagcaaauaaaaaaccagaagacuuaacauuaaaugaucuagaaacagacguauguacuauggauaaaugugcaggaauauuuaauguaguuaguaacaguuuagguuuaguaauauuacuaguauuagcauuauuuaauuaa

SEQ ID NO: 5709 - RNA, 1119 nt, Artificial Sequence
  derived and/or modified CDS sequence (opt6) from Pv(Cam3)__AGN05234.2__CSP
augaagaauuuuauauuacuagcaguaaguaguauauuauuaguagauuuauuuccaacacauugcggacauaauguagauuuaaguaaggcaauaaacuuaaauggaguaaauuuuaauaacguggaugcaaguucacuaggggcagcacauguaggacagucagcaagcaggggaagaggauuaggagaaaauccagaugaugaagaaggggaugcuaaaaaaaaaaaagauggaaaaaaagcagaaccaaaaaauccaagagaaaauaaacuaaaacaaccagcaggagaucgugcagauggacaaccagcaggagauagagcagauggccagccagcaggagauagagcagauggacaaccagcaggagauagagccgcaggacaaccagcaggagauagagcggauggacaaccagcaggagauagagcugcgggacaaccagcuggagauagggcagauggacaaccagcaggagauagagcagcaggacaaccugcaggagauagggcagauggacaaccagcaggagacagagcugcaggacaaccagcaggagauagagcagcaggacaaccagcaggagauagagcagauggacaaccagcaggagauagagcggcagggcaaccagcaggagauagagcagauggccaaccagcaggggauagagcggcaggacaaccagcaggugauagagcugcaggacaaccagcaggagauagggcagcaggacagccagcagggaauggagcuggaggacaagcagcgggaggaaacgcagguggaaacgcaggugggaaugcuggaggaaaugcggguggacaaggacaaaauaacgaaggagcaaaugcaccaaaugaaaagaguguaaaagaauauuuagauaaagugagagcaacgguaggaacagaauggacgccuuguaguguaacaugcgggguaggagugagaguaagaagaagaguaaacgcggcaaauaaaaaaccagaagauuuaacauuaaaugauuuagaaacagauguauguacaauggauaaaugugcaggaauauuuaauguaguaaguaauagucuaggguuaguuauauuguuaguauuagcauuauuuaacuaa

SEQ ID NO: 5710 - RNA, 1119 nt, Artificial Sequence
  derived and/or modified CDS sequence (opt6) from Pv(Cam30)__AGN05258.1__CSP
augaaaaacuucauauuauuagcuguaaguagcauauuauuaguagauuuauuuccaacacacuguggacauaauguagauuugagcaaagcaauaaaccuaaacggaguaaauuuuaauaauguggaugcgagcaguuuaggagcagcacauguaggucaaagcgcaucaagaggaaggggauuaggugaaaacccagacgaugaagaaggagaugcaaaaaaaaaaaaagauggaaaaaaggcagaaccaaaaaauccaagagaaaauaaauuaaagcaaccagcaggugauggagcugcaguacaaccagcaggggauggggcagcaguacagccugcaggagauggugcagauggacaaccagcaggagauggggcugcaggacaaccagcaggagaucgagcagauggacaaccagcaggagauagagcagcaggacaaccagcgggagauagagcagauggacaaccugcaggagauagggcggcuggacaaccagcaggagauagagcagauggacaaccagcaggagauagggcagcaggacaaccagcaggagaccgagcagcaggacaaccagcaggagauagagcagauggucaaccagcaggagauagagcugcaggacaaccagcaggggauagagcagaugggcaaccagcaggagauagggcagcaggacaaccagcaggagauagagcagcgggacaaccagcaggagauagagcagcaggacaaccagcaggaaacggagcagguggacaagcagcagguggaaaugcaggagguaaugcaggaggaaaugcaggagggaacgcugguggacaaggacaaaauaaugaaggggcgaaugcaccaaaugaaaaaucaguaaaagaguacuuagauaaaguaagagcaacgguaggaacagaauggacaccauguagcguaacaugcggaguaggaguacgaguaagaagaagaguaaaugcagcaaauaaaaaaccggaagauuuaacacuaaacgauuuagaaacagauguauguacaauggauaaaugugcaggaauauuuaauguaguaaguaauaguuuaggacuaguaauauuguuaguacuagcauuguuuaauuga

SEQ ID NO: 5711 - RNA, 1119 nt, Artificial Sequence
  derived and/or modified CDS sequence (opt6) from Pv(Cam43)__AGN05271.1__CSP
augaaaaauuuuauacuauuagcagugagcaguauauuauuaguggauuuauuuccaacgcauuguggacauaauguagauuuaaguaaagcaauaaauuugaacggggugggauuuaauaauguagaugcaaguaguuuaggagcagcacacguaggacaaagugcaaguagaggaagaggauuaggagaaaacccagaugaugaagaaggugaugcaaaaaagaaaaaagauggaaaaaaagcugaaccgaaaaauccgagggaaaacaaauuaaaacaaccagcaggagacagagcagauggacaaccagcaggagacagagcagauggacaaccagcaggagauagagcagacggacaaccagcaggagacagagcagauggacaaccagcaggggauagagcagauggacaaccagcaggagauagggcagcaggucaaccggcaggagauagagcagauggacaaccagcuggagauagggcagcgggacaaccagcaggagauagggcugauggacaaccugcgggagauagagcggauggacaaccagcaggagauagagcagcaggacaaccagcaggagauagagcggauggucaacccgcgggagauagagcagcuggacagccagcaggggauagagcagaugggcaaccggcaggugauagagcagcaggacaaccagcaggagaucgagcagcaggacaaccagcaggaaauggagcaggaggacaagcagcaggaggaaaugcaggggggaacgcaggaggaaaugcuggaggaaacgcaggaggaaaugcaggaggaaaugcuggggcaggacagggacaaaauaacgaaggggcaaaugcacccaaugaaaaaagcguaaaagaauaucuagacaaaguaagagcaacuguaggaacagaauggacaccauguucaguaacauguggaguaggaguaagaguaagaagaaggguaaaugcagcgaauaaaaaaccagaagauuuaacauuaaaugacuuagaaacagauguuuguacaauggacaaaugugcaggaauauuuaauguaguaaguaacaguuuaggucuaguuauuuuauuaguauuagcauuauuuaauuag

SEQ ID NO: 5712 - RNA, 1116 nt, Artificial Sequence
  derived and/or modified CDS sequence (opt6) from Pv(Cam40)__AGN05268.1__CSP
augaaaaauuucauacuauuagcaguaaguaguauacuauuaguagauuuauuuccuacacauuguggucauaauguagauuuaucaaaagcuauaaacuuaaacgguguaggauuuaauaauguagacgcaaguagucuaggugcagcacauguaggccaaagugcaaguagaggaagaggauuaggagaaaauccagaugaugaagaaggagaugcaaaaaaaaagaaagaugguaaaaaaacggaaccaaaaaauccaagagaaaauaaauuaaaacaaccaggugauagagcggauggacaaccagcaggagauagggcagacggccaaccugccggagauagagcagcaggucaaccagcaggagauagggcagauggacaaccagcaggagauagagcagacggacaaccggcaggagauagagcagcaggacaaccagcaggagauagagcagauggacaaccagcaggagauagagcagcaggacaaccagcaggagauagggcggacggacaaccagcuggagauagagccgcaggacagcccgcgggagauagagcagcaggacaaccagcuggugauagagcagauggacaaccugcaggugauagagcagcaggacagccagcuggagauagagcugauggacaaccagcgggagauagagcagcaggacaaccagcaggagaccgagcagcaggacaaccagcaggagauagggcagcaggacaaccggcuggaaauggagcaggaggacaagcagcaggaggaaaugcaggaggaaacgcaggagguaacgcaggcggaaaugcaggaggacaaggacaaaauaaugaaggagcaaacgcaccaaaugaaaaaaguguaaaagaauauuuagauaaagucagggcaacaguaggaacagaauggacaccauguaguguaacauguggaguaggaguaagaguaagaagaagaguuaaugcagcaaauaaaaaaccagaagaucuaaccuuaaaugauuuggaaacagauguguguacaauggauaaaugugcaggaauauucaauguaguuucaaauaguuuaggauugguaauauuauuaguacuagcauuauuuaauuga

SEQ ID NO: 5713 - RNA, 1116 nt, Artificial Sequence
  derived and/or modified CDS sequence (opt6) from Pv(CSP14VK210)__ANS71594.1__CSP
augaaaaauuuuauauuauuagcgguaaguucgauacuauuaguagaucuauuuccgacacacuguggacauaauguagaucuaaguaaagcaauaaauuugaauggaguuaauuuuaacaauguagacgcaagcaguuuaggagcagcacaugugggacaaucagcaaguagaggaagaggauugggagaaaauccggaugaugaagaaggagaugcaaaaaaaaaaaaagacggaaaaaaagcugaaccaaaaaauccaagagaaaauaaauugaaacaaccaggagauagggcagauggacaaccagcaggagauagagcagacggacaaccggcaggagacagggcagcaggacaaccagccggagacagagcggauggacaaccagcaggagauagagcugcagggcaaccagcaggagauagagcagauggacaaccggcaggggauagagcagcaggacaaccagcgggagauagagcagauggacaaccagcaggagauagagcagcaggacaaccggcgggugacagagcagauggacagccggcuggagauagagcagcagggcagccugcaggagacagagcagcgggacaaccagcgggggauagagcagauggacaaccagcaggagauagagcagauggacaaccugcaggagauagagcagcaggacaaccagcuggugauagagcagcaggacaaccagcaggagauagggcggcaggacaaccagcagguaacggagcaggaggacaagcagcaggaggaaaugcagcaaauaaaaaagcagaggaugcagguggaaaugcaggaggacaagggcaaaauaaugaaggagcaaaugcaccaaaugaaaaaaguguaaaagaauacuuagauaaaguaagagcaacaguaggaacagaauggacaccauguagcguaacuugugguguggguguacggguaaggagaagaguaaaugcagcaaauaaaaaaccagaagaucuaacguugaaugauauagaaacggauguauguacaauggauaaaugugcaggaauauuuaauguaguaaguaauagucuaggauuaguaauacuauuaguauuagcauuguuuaauuaa

SEQ ID NO: 5714 - RNA, 1116 nt, Artificial Sequence
  derived and/or modified CDS sequence (opt6) from Pv(CSP22VK210)__ANS71602.1__CSP
augaaaaauuucauauuauuagcaguaaguucaauacuauuaguggauuuauuuccgacacacugcggacauaacguagauuuaaguaaagcaauaaacuuaaauggaguaaauuuuaauaacguagacgcaaguaguuuaggagcagcacauguaggacagagugcgagcagaggaagaggacuaggagaaaacccggacgaugaagaaggagaugcaaaaaaaaaaaaagauggaaaaaaagcagaaccaaaaaauccaagagaaaacaaauuaaaacaaccaggggauagggcagauggacagccagcuggagauagggcagacggacaaccagcaggagauagagcugauggacaaccagcgggagaucgagcagcaggacaaccagcaggagauagagcggauggucaaccggcaggagacagggcagcaggacaaccggcaggagacagagcagauggacaaccagcaggagauagagcugcuggacaaccagcaggagacagagcagcaggacaaccggcgggagauagagcagauggacaaccagcaggagauagagcagcuggacaaccugcaggugacagagcagcaggacaaccagcgggagauagggcagauggacaaccagcaggagauagagcagcagggcaaccagcuggagauagggcagcgggacaaccagcaggagauagagcagcagggcaaccagcaggagauagagcagcaggacaaccagcaggaaauggagcaggaggucaagcagcaggaggaaaugcagcaaacaaaaaagcagaagaugcaggaggaaaugcaggaggacaaggacaaaauaaugaaggggcaaaugcaccaaacgaaaaaagugugaaagaauacuuagauaaaguaagagcaacaguagggacagaauggacaccuuguaguguaacauguggaguaggaguaagaguaaggagaagaguaaaugcagcuaauaaaaaaccagaagauuuaacacuaaaugauauagaaacagauguguguacaauggauaaaugcgcaggaauauucaauguaguaaguaacucacuaggauuaguaauauuauuaguauuggcauuauuuaauuaa

SEQ ID NO: 5715 - RNA, 1116 nt, Artificial Sequence
  derived and/or modified CDS sequence (opt6) from Pv(CSP28VK210)__ANS71608.1__CSP
augaaaaauuuuauauuauuagcaguuucaaguauauuacuuguagauuuauucccaacacauugcggacauaauguagauuuaucgaaagcaauuaauuuaaaugggguaaauuuuaauaauguagaugcaaguagccuaggagcagcacauguaggacaaagugcaagucgggggagaggauuaggagaaaauccagaugaugaagaaggggaugcaaagaaaaaaaaagauggaaagaaagccgaaccaaaaaauccgagagaaaauaaauuaaaacaaccaggagauagagcagauggacaaccugcaggagauagagcagauggacaaccagcaggcgacagagcagauggacaaccugcaggagauagagcagcaggacaaccagcaggagauagagcugauggacaaccagcaggagauagagcagcaggacaaccagcaggagacagagcagauggacaaccagcaggugauagggcagcuggacagccagcaggagauagagcagauggacaaccagcuggagauagagcagcaggccaaccagcaggagauagagcagacggacaaccagcuggggacagggcagcuggacaaccagcaggagaucgugcagcuggacaaccagcaggagauagggcugauggacaaccagcgggagauagagcagcaggucaaccagcuggggauagagcugcaggucaaccagcuggagauagagcagcaggacaaccagcuggaaauggggcaggaggacaagcagcgggaggaaaugcggcuaauaaaaaagcagaagaugcaggaggaaaugcaggaggacaagggcaaaacaaugaaggagcaaacgcaccaaaugagaaaaguguaaaagaauaucuggauaaaguaagagcuacaguaggaaccgaauggacaccauguagcguaacauguggaguaggaguaagaguaagaagaagaguuaaugcagcaaacaaaaaaccagaggauuuaacacugaaugauauagaaacagauguauguacaauggacaagugugcagguauauuuaauguaguaaguaauaguuuaggauuaguaauauuacuaguacuagcauuauuuaauuaa

SEQ ID NO: 5716 - RNA, 1116 nt, Artificial Sequence
  derived and/or modified CDS sequence (opt6) from Pv(CSP31VK210)__ANS71611.1__CSP
augaaaaauuuuauacuauuagcaguaaguagcauacuacuaguugauuuauuuccaacacauuguggacauaauguagauuuaaguaaagcaauaaaucuaaacggaguaaauuuuaauaauguagaugcaucaagucuaggagcagcacauguaggacaaagcgcaaguagaggaagaggauuaggagaaaauccggaugaugaagaaggagacgcaaaaaaaaaaaaagauggaaaaaaagcagaaccaaaaaacccaagagaaaauaagcuuaaacaaccaggugacagagcagacggacaaccagcaggagauagagcagauggacaaccagcaggugacagagcagcgggacaaccagcaggagauagagcagauggucaaccagcuggagaucgagcagcaggacagccagcaggagauagagcagauggacaaccggcaggagauagggcagcaggacaaccagcaggagauagagcagauggacaaccagcaggggauagagcugauggacaaccagcgggagauagagcagcaggacaaccggcaggugauagagcagcaggacaaccagcgggcgacagggcagccgggcaaccagcaggugauagagcagauggacaaccggcaggagauagagcagcaggacaaccugcgggagauagagcagcaggacaaccagcaggagauagagcagcaggucaaccagcaggcgauagagcagcaggacaaccagcaggaaauggagcaggaggacaagcagcaggaggaaacgcggcaaauaaaaaagccgaagaugcuggaggaaacgcaggaggacaaggacaaaauaaugaaggagcaaaugcaccaaacgaaaaaaguguaaaagaauaccuagauaaaguuagagcaacaguaggaacagaauggacaccauguucaguaacauguggaguagguguaagaguaagaaggagaguaaaugcagcaaacaaaaaaccugaagauuuaacauuaaaugauauagaaacagauguauguacaauggauaaaugugcaggaauauuuaacgucguaaguaacaguuuaggauuaguaauacuauuaguacuagcacuauuuaauuaa

SEQ ID NO: 5717 - RNA, 1116 nt, Artificial Sequence
  derived and/or modified CDS sequence (opt6) from Pv(CSP37VK210)__ANS71617.1__CSP
augaagaauuucauacuauuagcaguaaguucaauccuauuaguagaucuauuuccaacacauugugggcauaacguagaucugucaaaagcaauaaauuuaaauggaguaaauuuuaauaacguugaugcaaguagcuuaggagcggcacauguaggacaaagugcaaguagaggaagaggauuaggagaaaauccagaugaugaagaaggagacgcaaaaaagaaaaaagauggaaaaaaagcagaaccgaaaaauccgagagaaaauaaauuaaaacaaccaggagauagagcagauggacagccagcaggagauagagcagauggacaaccagcaggagauagagcggacggacaaccagcaggcgacagagcagcaggacaaccagcaggagauagagcagcaggacaaccagcaggagauagagcggcaggacaaccagcuggagacagagcagauggacaaccagcaggagauagagcagcaggacaaccagcaggagauagagcagauggacaaccagcaggagauagagcagcuggacaaccagcgggagauagggcagauggucaaccagcaggagauagagcugcaggacaaccagcgggagauagagcagcagggcaaccggcuggagauagagcagauggacaaccagcaggagacagagcggcaggacaaccagcaggagauagagcggcaggacaaccagcaggggauagagccgcaggacaaccagcaggaaauggagcaggaggacaagcggcgggaggaaacgcagcuaauaaaaaggcagaagaugcaggcggaaacgcaggaggacaaggacaaaauaaugaaggggcaaacgcaccaaaugaaaaaaguguaaaagaauacuuagacaaaguaagagcaacagugggaacagaauggacaccguguucaguaacuuguggagugggaguaagaguaagaagacggguaaaugcagcaaauaaaaagccagaagauuuaacauuaaaugauauagaaacagauguauguacaauggauaaaugugcgggaauauuuaauguaguaagcaauucguugggacuagugauauuauuaguacuagcguuauucaauuaa

SEQ ID NO: 5718 - RNA, 1116 nt, Artificial Sequence
  derived and/or modified CDS sequence (opt6) from Pv(CSP50VK210)__ANS71630.1__CSP
augaaaaauuucauacuacuagcaguaaguucaauacuauuaguagauuuauuuccuacacauuguggacauaauguagaucucaguaaagcaauaaauuuaaaugggguaaacuuuaauaauguagaugcaagcagcuuaggggcagcacauguaggacaaagugcaagcagagggcgaggauuaggcgaaaauccggaugaugaagaaggagaugcaaaaaaaaaaaaagauggaaaaaaagcggaaccaaaaaacccgagagaaaauaaauuaaaacaaccaggagauagagcggacggucaaccggcaggagauagagcagauggacaaccggcaggggauagggcagcaggacaaccagcaggagauagagcagauggacaaccagcaggagauagagcagcaggacaaccagcaggagacagagcagacggacaaccagcaggagacagagcagcaggacagccagcaggagauagagcagacggacaaccagcaggagauagagcagcgggacaaccagcaggagauagagcagauggacaaccagcaggugacagagcagcaggacaaccagcaggggauagagcagcaggacaaccagcaggagauagagcggaugggcaaccagccggagacagagcggcaggacaaccagcuggagauagagcugcaggacaaccagcaggagauagagcagcagggcaaccggcgggagaucgagcagcgggacaaccagcaggaaacggagcaggaggacaagcagcaggaggaaaugcggcgaauaaaaaagcggaagaugcaggaggaaaugcagggggacaaggacaaaacaaugaaggcgcaaaugcaccaaacgaaaaaaguguaaaagaauaucuagauaagguaagagcgacaguaggaacagaauggacaccauguagcguaacauguggaguaggaguacgaguaagaaggagggugaaugcagcuaauaaaaaaccagaagauuuaacauuaaaugauauagaaacagacguauguacgauggauaaaugugcgggaauauuuaauguaguaaguaacagccuaggauuaguaauauuguuagugcuagcauuauucaacuaa

SEQ ID NO: 5719 - RNA, 1107 nt, Artificial Sequence
  derived and/or modified CDS sequence (opt6) from Pv(Cam16)__AGN05247.1__CSP
augaaaaauuuuaucuuacuagcaguaaguaguauauuauuaguagauuuauuuccaacgcauugcggacauaauguagauuuaaguaaagcaauaaauuuaaacggagugaacuuuaauaacguagaugcaaguaguuuaggagcagcacacguaggacaaagugcaucaagaggaagagggcuaggagaaaauccagaugaugaggaaggagaugcaaaaaaaaaaaaagauggaaaaaaagcggaaccaaaaaauccaagagaaaauaaauuaaaacaaccagcgggagauagagcagacggacaaccagcaggagauagggcagauggucaaccagcaggagauagagcagcaggacaaccagcaggagauagagcagacggacaaccagcaggagauagagcagauggucaaccagcaggagauagagcagcaggacaaccagcaggugaucgggcagaugggcaaccagccggagauagagcagcaggacaaccagcaggagauagagcagacggacaaccagcaggagauagagcagaugggcaaccagcaggagauagagcagcaggacaaccagcaggagauagagcagauggacaaccggcaggagauagggccgcaggacaaccagcaggagauagagcagauggacaaccggcuggagauagagcggcaggacaaccggcaggagacagggcagcaggacaaccagcaggagauagagcagcgggacagccagcaggaaauggagcagguggacaagcagcaggaggaaaugcaggagggaaugcuggugggaacgcaggaggacaaggacaaaauaacgaaggagccaaugcaccaaaugaaaaaaguguaaaagaauauuuagauaaaguaagagcuacaguaggaacagaauggacaccauguaguguaacauguggaguaggaguaaggguaagaagaagaguuaaugcagcuaauaaaaaaccagaagaucuaacauuaaaugaucuagaaacagaugugugcacaauggauaaaugugcgggaauauucaauguaguaaguaauagccuaggauuaguaauauuauuaguauuagcauuauuuaacuaa

SEQ ID NO: 5720 - RNA, 1107 nt, Artificial Sequence
  derived and/or modified CDS sequence (opt6) from Pv(Cam32)__AGN05260.1__CSP
augaaaaauuucauauuauuagcuguaaguagcauacuuuuaguagaucuauuuccaacccauuguggacacaauguagauuuaagcaaggcaauaaauuuaaauggaguaggauuuaauaauguagaugcaagcucacuaggagcagcucauguaggacaaagcgcaaguagagguagaggauuaggagaaaauccggaugaugaagaaggagacgcaaaaaaaaaaaaagauggaaaaaaagcggaaccgaaaaauccaagagaaaauaaauuaaaacaaccugcgggagacagagcggacggacaaccggcaggagauagagccgauggacaaccagcaggagauagagcagauggacaaccggcaggagacagggcagcaggacaaccagcaggagacagagcggauggacaaccagcaggagauagggcagcaggacaaccagcaggugauagggcggauggacagccagcaggagauagggcagcuggacaaccagcaggugaucgagcagacggucaaccagcaggagauagagcagcaggacaaccagcaggagauagagcagcaggacaacccgcaggagauagagcagacggacaaccagcaggagauagagcggcaggucaaccagcgggggauagagcagaugggcaaccugcaggagauagagcagcggggcaaccagcaggagauagagcagcaggacaaccagcaggagauagagcagcaggacaaccagcagggaauggagcagggggacaagcagcaggaggaaaugcaggaggaaaugcgggaggaaaugcaggaggacaaggucaaaauaaugaaggagcuaaugcaccaaaugaaaaaaguguaaaagaauaucuagacaagguaagagcaacaguaggaacagaauggacaccauguaguguaacaugugguguaggaguacgagugagaagaagaguaaaugcagcaaauaaaaaaccugaggaucuaacauugaaugauuuagaaacagacguguguacuauggauaaaugugcaggaauauuuaacguaguaucaaauagccuaggacuaguaauacuauuaguauuagcauuauuuaauuaa

SEQ ID NO: 5721 - RNA, 1107 nt, Artificial Sequence
  derived and/or modified CDS sequence (opt6) from Pv(Cam38)__AGN05266.1__CSP
augaaaaauuuuauauuacuagcaguuaguaguauauuacuaguagaccuauuuccaacacauuguggacauaauguagauuuaaguaaagcgauaaaccuaaauggaguaaauuuuaauaauguagacgcaucaaguuuaggggcagcacauguaggacaaagugcaaguagaggaaggggacuaggagaaaauccggacgaugaagaaggugaugcuaaaaaaaaaaaagauggaaaaaaagcagaaccaaaaaauccaagggaaaauaaacuaaaacagccaggagauagagcagauggacagccugcaggagauagagcagauggucaaccagcaggagacagggcagcaggacaaccagcaggagacagagcagauggacaaccagcaggggauagagcagcaggacaaccggcaggagauagggcagaugggcaaccagcaggagauagagcggcaggacaaccagcaggagacagagcagauggacaaccagcaggagauagagcagcaggacaaccagcgggagacagggcggauggacagccagcuggagaucgagcagcuggacaaccagcaggagauagagcagauggacaaccagcaggagauagagcggcaggacaaccagcaggagauagagcagcuggacaaccagcaggugaucgagcugauggucaaccagcaggagacagagcagcagggcaaccagcaggagauagagcagcaggucagccagcaggagauagagcggcaggacaaccagcaggaaauggagcaggaggacaagcagccggaggaaaugcaggaggacaaggacagaauaaugaaggcgcaaaugcaccuaaugaaaaaaguguaaaagaauauuuagauaaaguaagggcaacaguaggaacagaauggacaccauguagcguaacauguggaguaggaguaagaguaagaagaagaguaaaugcagcaaauaaaaaaccagaagauuuaacauuaaaugaucuagagacagauguauguacaauggacaaaugugcaggaauauuuaauguaguaaguaauaguuuaggauuaguaauauuacuaguauuggcguuauuuaauuaa

SEQ ID NO: 5722 - RNA, 1104 nt, Artificial Sequence
  derived and/or modified CDS sequence (opt6) from Pv(CSP19VK210)__ANS71599.1__CSP
augaaaaauuuuauauuauuagcaguaagcucaauucuauuaguagaccuauuuccaacgcauugcggacauaacguagaucuaaguaaagcaauaaaucuaaauggaguaaauuucaauaacgucgaugcaaguagccuaggagcagcacacguuggacaaagugcaucacgaggaagaggauuaggagaaaacccagaugacgaagaaggggaugcaaaaaaaaaaaaagaugguaaaaaagcagaaccaaaaaauccacgagaaaauaaauuaaaacaaccaggugauagagcagauggacaaccagcaggagauagagcagauggacaaccagcaggagauagagcagauggacaaccagcaggggauagagcagcaggacaaccagcgggugauagagccgacggacaaccagcgggagauagagcagcaggacagccagcaggagauagagcagauggacaaccagcuggagauagagcagcagggcaaccagcaggagauagagcagauggacaaccagcaggagauagagcagcaggccaaccagcaggagauagagcagauggacaaccugcaggagauagagcagcaggacagccagcaggagauagagcagcaggacaaccagcaggagaucgagcagauggucagccagcaggagauagagcugcuggacaaccagcaggagauagagcagcgggacaaccagcaggggauagagcagcuggacaaccggcaggaaauggagcaggaggacaagcagcaggaggaaaugcagcaaauaaaaaagcugaagaugcaggaggacaaggacaaaauaacgaaggagcaaacgcaccaaaugaaaaaucugugaaagaauauuuagauaaaguaagagcaacaguaggaacagaauggacaccuuguaguguaacauguggcguaggaguaagaguaagaagaagaguaaaugcagcgaauaaaaaaccagaagaucuaacauuaaacgauauagagacagauguauguacaauggauaaaugugcagggauauuuaacguuguaaguaacagcuuaggauuaguuauauuauugguauuggcauuauucaauuaa

SEQ ID NO: 5723 - RNA, 1089 nt, Artificial Sequence
  derived and/or modified CDS sequence (opt6) from Pv(CSP24VK210)__ANS71604.1__CSP
augaaaaauuuuauauuguuagcaguaucaucaauauuauuaguagauuuauuuccaacacauuguggacacaauguagauuuaaguaaagcaauaaacuuaaacggaguaaauuuuaacaauguagaugcaaguucauuaggagcagcacauguaggacaaagugcaaguaggggaagaggacuaggggaaaauccagacgacgaagaaggagaugcaaaaaaaaaaaaagauggaaaaaaagcagagccaaaaaauccgagagaaaauaaacuaaaacagccaggagacagagcagauggacagcccgcaggagauagagcagaugggcaaccggcaggagauagagcagaugggcaaccagcaggagauagagcagcaggacaaccagcaggagauagagcagacggacaaccggcgggagauagagcagcaggacaaccagcaggagauagagcggauggacaaccagcaggagauagagcagcgggacaaccagccggagauagagcagauggacaaccagcaggagacagagcggcaggacaaccagcaggugauagagcagacggacaaccagcaggagacagagcagcaggucagccagcaggagauagagcagcaggacaaccagcaggagacagagcagauggacaaccagcaggugauagagcagcaggacaaccagcaggagacagagcagcggggcaaccagcagguaauggagcaggaggacaagcagcaggaggaaaugcagcaaauaaaaaagcagaagaugcaggaggaaaugcgggaggacagggacaaaauaaugaaggagcaaaugcgccuaaugaaaaaaguguaaaagaauauuuagauaaaguaagagcaacaguaggaacagaauggacgccguguagcguaaccuguggaguaggaguaagaguaaggagaaggguaaaugcagcgaauaaaaaaccagaagaccuaacuuuaaaugauauagagacagauguauguacaauggauaaaugcgcaggaauauuuaaugugguaagcaauaguuuaggacuagugauauuauuaguacuggcauuauucaacuaa

SEQ ID NO: 5724 - RNA, 1089 nt, Artificial Sequence
  derived and/or modified CDS sequence (opt6) from Pv(CSP35VK210)__ANS71615.1__CSP
augaaaaauuuuauauuacuagcaguaaguagcauauuauuaguagauuuauucccgacacacuguggacacaauguagauuuaaguaaagcaauaaaucuaaacggaguaaauuuuaauaauguagacgcaaguucauuaggagcagcacauguaggacagagcgcaagcagaggaagagguuuaggagaaaauccggaugacgaagaaggagaugccaaaaaaaaaaaagauggaaaaaaagcugaaccaaaaaauccaagagaaaauaaauuaaaacagccaggagauagagcagauggacaaccagcaggagauagggcagacggacaaccagcuggagauagagcggcgggacaaccagcaggagauagagcagauggacaaccugcuggggauagagcagcaggacaaccagcaggagauagagcagauggacaaccagcuggagauagagcagcgggacaaccagcaggagauagagcagaugggcaacccgcgggagauagagcagcaggacaaccggcaggagauagagcagauggacaaccagcaggagauagagcagcaggccaaccagcuggggauagggcagcagggcaaccggcaggagauagagcugauggacaaccagcaggagauagagcagcaggacaaccagcaggagauagagcagcaggacaaccagcaggagauagagcagcaggacaaccagcaggaaauggagcaggugggcaagcagcaggagggaaugcugcaaauaaaaaggcggaagaugcaggaggaaaugcggggggacaaggacaaaauaaugaaggagcaaaugcaccaaaugaaaaaucuguaaaagaguaucuagauaaaguaagggcaacagugggaacagaguggacaccauguaguguaacaugugguguaggaguacgaguaagaagaagaguaaaugcggcgaauaaaaaaccagaagauuuaacauuaaaugauauagaaacagaugucuguacaauggauaaaugugcuggaauauuuaauguaguaucaaauagccuagggcuaguaauacuauuaguuuuagcauuauuuaauuaa

SEQ ID NO: 5725 - RNA, 1062 nt, Artificial Sequence
  derived and/or modified CDS sequence (opt6) from Pv(CSP9VK210)__ANS71589.1__CSP
augaaaaauuucauacuauuagcaguaaguaguauauuacuaguagauuuauuuccaacacacugugggcauaauguagaucuaaguaaagcaauaaaucuaaauggaguaaauuuuaauaacguugacgcaucaaguuugggagcggcacauguagggcaaagugcaucaagagggagaggauugggggaaaauccagaugaugaagaaggugaugcaaaaaaaaaaaaagacggaaaaaaagcagaaccaaaaaauccaagagaaaauaaacugaaacaaccaggagauagagcagaugggcaaccagcaggagauagagcagauggacaaccagcaggagauagagcagcaggacaaccugcaggagacagagcagauggacaaccagcaggagacagagcugcuggacaaccagccggagauagggcagauggacaaccagcaggagauagagcagcaggacaaccagcuggagauagagcagacggacaaccagcaggagauagagcagcaggacaaccagcaggggauagagcugcuggacaaccagcaggagacagagcagauggacagccagcaggagauagagcagcaggucaaccagcaggagauagagcagcaggacaaccagcaggagauagagcagccggacaaccagcaggagauagagcagcaggacaaccagcaggaaacggugcagguggacaagcggcaggaggaaaugcagcaaauaaaaaagcagaagaugcaggggggaacgcgggagggcaaggacaaaauaaugaaggagcaaaugcgccgaaugaaaagaguguaaaagaauauuuagauaaaguaagagcaacaguaggaacagaauggacaccuuguaguguaacuuguggcguaggaguaagaguaagaagaagaguaaaugcggcaaacaaaaaaccagaagacuuaacgcugaaugauauagaaacagauguauguacaauggauaaaugugcaggaauauuuaauguaguaucaaauaguuuaggauugguaauauuacuaguacuagccuuauuuaauuaa

SEQ ID NO: 5726 - RNA, 894 nt, Artificial Sequence
  derived and/or modified CDS sequence (opt6) from Pv(Pt02.2)__ADB92552.1__CSP
augaaaaauuuuauauuauuagcaguaagcaguauauuauuaguagaucuauuuccaacacauuguggacacaauguagaucuaaguaaagcgauaaaucuaaauggaguaggguuuaacaacguagaugcaaguaguuuaggagcagcucauguaggacaaucagcaagcagaggacgaggauuaggagaaaauccagaugaugaagaaggagaugcgaaaaaaaaaaaagauggaaaaaaagcagaaccgaaaaauccaagagaaaauaaauuaaaacaaccagaagauggagcaggagaucaaccaggagcaaauggagcaggaaaucaaccaggagcaaauggggcaggaaaucaaccaggagcaaauggagcagggaaucaaccgggagcaaauggagcgggaaaucagccaggagcaaauggagcaggaaaucaaccaggagcaaauggagcgggaaaucaaccaggagcuaacggagcuggaggacaagcagcaggaggaaaugcggcaaauaaaaaagcaggagacgcaggagcaggaggacaagcagcaggagggaaugcagcaaauaaaaaagcaggagaugcaggagcaggacaagggcaaaauaaugaaggagcaaaugcaccgaaugaaaaaaguguuaaagaauaucuagacaaagugagagcaacaguaggaacagaauggacaccguguaguguaacauguggcguaggaguaagaguaagaagaagaguaaaugcagcaaauaaaaaaccagaagaccuaacauuaaaugauuuagaaaccgauguauguacaauggauaaaugcgcaggaauauuuaacguaguaaguaauaguuuaggauuaguaauauuauuaguauuagcauuauuuaauuaa

SEQ ID NO: 5727 - RNA, 840 nt, Artificial Sequence
  derived and/or modified CDS sequence (opt6) from Pv(Pt04.5)__ADB92555.1__CSP
augaaaaauuuuauauuauuagcaguaagcucaauauugcuaguagacuuauuuccaacacauuguggacauaauguagacuuaucaaaagcaauaaaucuaaauggagugggauuuaacaauguggaugcaucaucauuaggagcagcacauguaggacaaucagcaaguaggggaagagguuuaggagaaaauccagaugaugaagaaggagaugcaaaaaaaaaaaaagacgggaaaaaagcagaacccaaaaacccaagagaaaauaaauugaaacaaccagaagauggugcaggagaucaaccaggagcaaauggagcaggaaaucaaccaggagcaaauggagcaggaaaucaaccgggagcaaauggagcaggaaaucaaccaggagcaaauggagcaggaaaucaaccaggagcaaacggagcagggggucaagcagcagggggaaaugcagcaaauaaaaaagcaggagacgcaggagcaggaggacaagcagcaggaggaaaugcagcaaauaaaaaagcaggagaugcaggagcaggacaaggacaaaauaaugaaggagcaaaugcaccaaaugaaaaaaguguaaaagaauaucuagauaaaguuagagcaacaguaggaacagaauggacaccauguaguguaacauguggaguaggaguaagaguaagaagaagagucaaugcggcaaacaaaaaaccggaagaucuaacauuaaaugauuuagaaacagacguauguacaauggauaaaugugcaggaauauuuaacguaguaagcaauaguuuaggauuaguaauacuauuaguuuuagcacuauucaauuaa

SEQ ID NO: 5728 - RNA, 1023 nt, Artificial Sequence
  derived and/or modified CDS sequence (opt6) from Pb(ANKA)__XP_022712148.1__CSP
augaaaaaaugcacaauacucguaguagccucucuacuacucguuaacucucuacuuccuggauacggccaaaacaaauccauacaagcacaaagaaaccucaacgaauuaugcuacaacgaaggaaacgacaacaaauuauaccacguauuaaacuccaaaaacggaaaaaucuacaaccgaaacaccgucaacagacuccuagcugaugcaccagaaggaaaaaaaaacgaaaaaaaaaacgaaaaaaucgaaagaaacaacaaacuaaaacaaccuccaccaccacccaacccaaacgaucccccaccaccaaacccaaacgacccacccccacccaaccccaacgaccccccccccccaaauccaaacgacccaccaccaccaaacgcaaacgacccacccccaccaaacgcaaacgacccagcccccccaaacgcaaacgacccagcaccaccaaacgcaaacgacccugccccccccaacgcaaacgacccugccccaccaaacgcaaacgacccaccaccaccaaacccaaacgacccagcacccccaaacgcaaacgacccaccacccccaaacccaaacgaccccgcaccaccucaaggcaauaacaacccacaaccacaaccaagaccacaaccccaaccacaaccacaaccacaaccacaaccacaaccacaaccacaaccaagaccacaaccacaaccacaaccaggcggaaauaauaacaauaaaaacaacaacaacgaugauucauacauaccaucagccgaaaaaauacuagaauucgucaaacaaauaagagacucaauaacagaagaauggucacaaugcaacgucaccugcggcucaggaauucgaguaagaaaaagaaaaggaucaaacaaaaaagcugaagaccucacacuagaagacauagacacagaaauaugcaaaauggacaaaugcuccucaaucuucaacaucguaucaaacucccuaggcuucguaaucuuacuaguacuagucuucuucaacuaa

SEQ ID NO: 5729 - RNA, 1194 nt, Artificial Sequence
  derived and/or modified CDS sequence (opt11) from Pf(3D7)__XP_001351122.1__CSP
augaugcgaaaacucgccauccuaagcgucagcuccuuccucuucgucgaagcacuauuccaagaauaccagugcuacggcucuuccucaaacaccagaguacucaacgaacuaaacuacgacaacgccggcacaaaccuauacaacgaacucgaaaugaauuacuacggcaaacaagaaaacugguacucacucaaaaaaaacagcaggagccugggcgaaaacgacgacggcaacaacgaagacaacgaaaaacuccgcaaacccaaacacaaaaaacucaaacaacccgccgacggcaacccagaccccaacgcaaacccaaacguagaccccaacgccaacccaaacguggacccaaacgccaacccaaacguagaccccaacgccaacccaaacgcaaacccgaacgcaaaccccaacgcuaacccaaacgcaaaccccaacgcaaauccaaacgcgaacccgaacgccaaccccaacgcaaaccccaacgccaacccaaacgcgaacccaaacgcaaacccaaacgcaaacccaaacgcaaacccaaacgccaacccaaacgccaacccaaacgcaaaccccaacguagacccaaacgcaaacccaaaugcaaacccgaacgccaacccaaacgcuaacccaaacgcaaauccaaacgccaaccccaacgcaaacccaaacgcaaaccccaacgcaaaccccaacgcaaacccgaacgcgaacccaaacgcgaacccaaacgcaaacccaaacgcaaacccaaacgccaacccaaacgccaaccccaacgcaaacccaaacgcaaacccaaacaaaaacaaccaagggaacggacaaggccacaacaugcccaacgaccccaaccgcaacgucgacgaaaaugccaacgccaacagcgcagucaaaaacaacaacaacgaagaacccucugacaaacacauaaaagaauaccuaaacaaaauccagaacucacuaucgaccgaauggucacccugcuccguaaccuguggcaauggcauccaaguacgcauaaaacccggaucagccaacaaacccaaagacgaacucgacuacgccaacgacauagaaaaaaaaaucugcaaaauggaaaaaugcagcucagucuucaacguaguaaacuccucaaucggccucauaaugguacucucguuccuauuccugaacuag

SEQ ID NO: 5730 - RNA, 1335 nt, Artificial Sequence
  derived and/or modified CDS sequence (opt11) from Pf(Pal97-089)__BAM84949.1__CSP
augaugcgcaaacuagccauacucucuguuucaagcuuccucuucgucgaagccuuauuccaagaauaccaaugcuacggcagcucgagcaacacccgcguccucaacgaacuaaacuacgacaacgccggcacuaaccuauacaacgaacuagaaaugaacuacuacggcaaacaagaaaacugguacagccucaaaaaaaacucccgcucgcuaggcgaaaacgacgacggagauaacgauaacggcgacaacggccgcgaaggaaaagacgaggacaaacgcgacggcaacaacgaagacaacgaaaaacugaggaaaccaaagcacaagaaauuaaaacaacccggagacggcaaccccgaccccaacgccaacccaaacgucgacccgaacgcaaaccccaacgucgaccccaacgccaaccccaacgccaauccaaacgccaacccaaacgcaaacccaaacgcaaacccaaacgccaauccaaacgcaaaccccaacgccaaccccaacgccaaccccaacgccaacccaaacgccaacccgaaugccaaccccaacgcaaaccccaacgcaaaccccaacgcaaaccccaacgcaaaccccaacgccaaccccaacgcaaacccuaacgccaaccccaacgccaaccccaaugccaaccccaacgccaacccaaacgcaaauccaaacgccaacccgaacgcaaacccuaacgcgaaccccaacgccaaccccaacgccaaccccaacgcaaaccccaacgccaacccaaacgcaaaccccaacgcaaaccccaacgcaaaccccaacgccaaccccaacgcgaaccccaacgccaacccaaacgcaaacccaaaugcgaacccaaacgccaacccaaacgcaaacccaaacgccaacccgaacgccaaccccaacgcaaacccaaacgccaacccaaacgcgaaccccaacaaaaacaaccaaggcaaugggcaaggacacaacaugcccaacgaccccaaccgcaacguagacgaaaacgccaacgcuaacaacgccguaaaaaacaacaacaacgaagaacccucugacaagcacaucgagcaauaccuaaaaaaaauccaauacucgcuaucaaccgaauggucaccuugcagcgucaccugcggcaacggcauacaagugcgaaucaaaccaggcucagccgacaaaccaaaagaccaacucgacuacgaaaacgacaucgaaaaaaaaauaugcaaaauggaaaaaugcaguucugucuucaacguagucaacucuucaaucggccuaauaaugguacuuucguuccucuuccuuaacuaa

SEQ ID NO: 5731 - RNA, 1329 nt, Artificial Sequence
  derived and/or modified CDS sequence (opt11) from Pf(T9/94)__BAD73956.1__CSP
augaugcgaaaacucgccauccucuccgucucaucauuccucuuugucgaagcgcucuuccaagaauaccaaugcuauggguccuccuccaacacccgaguccucaacgaacucaacuacgacaacgcaggcaccaaccucuacaacgaacuagaaaugaacuacuacggcaaacaagaaaacugguacucccucaaaaaaaacucgcgcucccucggugaaaacgacgacggagacaacgacaacggcaacaauaacaacgggaacaacaacaacggcgacaacggccgagaaggcaaagacgaagacaaacgugacggaaacaacgaagacaacgagaaacuccgcaaaccaaaacacaaaaaacuaaaacaacccggagacgacaacccagacccaaacgcaaacccaaacgucgacccaaacgcgaaccccaacgucgaccccaacgccaacccaaacgccaacccaaacgccaacccaaacgcaaaccccaacgccaacccaaacgccaacccaaacgcaaaccccaacgccaacccaaacgccaaccccaacgccaaccccaacgcaaaccccaaugccaaccccaacgccaacccgaacgcaaauccuaacgcgaacccuaaugucgaccccaaugcaaacccaaacgccaacccaaacgcgaaccccaacgccaacccaaacgccaaucccaacgccaacccaaacgccaacccaaacgccaaccccaacgcaaaccccaaugccaacccaaacgccaaccccaacgcgaaccccaacgccaaccccaacgcaaaccccaacgcaaacccaaacgcaaaccccaacgcaaauccaaacgcaaauccaaacgccaaccccaaugccaacccgaacgccaacccaaacgccaacccaaacgcaaaccccaacgcaaaccccaacgcaaaccccaacgccaacccgaacaaaaacaaccaaggaaauggucaaggccacaacaugcccaacgacccaaaccgcaacgucgacgaaaacgccaacgcaaacaacgccguaaaaaacaacaacaacgaagaacccuccgacaaacauauagaacaauaccucaaaaaaauccaaaacucacucuccacagaauggucccccugcuccguaaccugcggcaacggaauccaaguacgcaucaaaccgggcuccgccgacaaaccgaaagaccaacucgacuacgaaaacgacaucgaaaaaaaaaucugcaaaauggaaaagugcagcucagucuucaacguaguaaacagcuccaucggacuuauaaugguccuaucauucuuauuccucaacuaa

SEQ ID NO: 5732 - RNA, 1329 nt, Artificial Sequence
  derived and/or modified CDS sequence (opt11) from Pf(Tq/94)__AAA29551.1__CSP
augaugagaaaacucgccauacuaucagucuccagcuuccucuucgucgaagcucuauuccaagaauaccaaugcuacggcucaucauccaacacaagaguccucaacgaacuaaacuacgacaacgccggcaucaaccucuacaacgaacucgaaaugaacuacuacggaaaacaagaaaacugguacagccuaaaaaaaaacucccgaucccucggggaaaacgacgacggcgacaacgacaacggcaacaacaacaacggaaacaacaacaacggcgacaacggucgcgaaggcaaagacgaagacaaacgcgacggcaacaacgaagacaacgaaaaacuacgcaaacccaaacacaagaaacuuaaacagcccggagacggaaacccugacccaaacgcaaaccccaaugucgacccaaacgccaaccccaacgucgaccccaacgcaaaccccaacgcaaacccaaacgcgaaccccaacgcaaaccccaacgcaaacccuaacgcaaauccgaacgccaaccccaacgcaaaccccaacgcgaacccaaacgcaaaccccaacgccaaccccaaugcaaaccccaacgccaaccccaacgccaaccccaacgccaacccaaauguggaccccaacgccaaccccaacgccaaccccaacgcaaacccaaacgccaaccccaacgcuaaccccaacgcuaaccccaacgcaaacccaaacgccaaccccaacgccaacccaaacgccaacccaaaugccaaccccaacgcaaacccaaacgccaaccccaacgccaaccccaacgccaaccccaacgccaacccaaacgccaaccccaacgccaacccgaacgccaaccccaacgcaaacccaaacgccaaccccaacgccaaccccaacgccaacccaaacgcaaaccccaacgcgaaccccaacgcaaacccaaacaaaaacaaucaaggaaacggccaaggacacaacaugcccaacgaccccaaccgcaacgucgacgaaaacgccaacgccaacaacgccgucaaaaacaacaacaacgaagaaccaucugacaaacacaucgaacaauaccuaaaaaaaauccaaaacucacucucaaccgaguggucacccuguagcguaaccugcggcaacggcauacaaguccgcaucaaaccaggaucagccgacaaaccaaaagaccaacuagacuacgaaaacgacaucgaaaaaaaaaucuguaaaauggaaaaaugcuccuccgucuucaacgucguuaacuccuccaucggccucaucaugguacucuccuuccucuuccuaaacuaa

SEQ ID NO: 5733 - RNA, 1329 nt, Artificial Sequence
  derived and/or modified CDS sequence (opt11) from Pf(Wellcome)__AAA29554.1__CSP
augaugagaaaacucgcaauacuaucgguauccagcuuccucuucguagaagcccuauuccaagaauaccaaugcuacggcagcucuagcaacaccagaguccuaaacgagcucaacuacgacaacgcaggaacaaacuuguacaacgaacuggaaaugaacuacuacggaaaacaagaaaacugguacagccuuaaaaaaaacucgcgaucacucggagaaaacgacgauggagacaacgacaacgguaacaacaacaacggcaacaacaacaacggcgacaacggccgagaaggcaaagacgaagacaaacgcgacggcaacaacgaagacaacgaaaaacuacgcaaacccaaacacaaaaaacugaaacaacccggagacggcaacccagacccaaacgcgaacccaaacgucgacccaaacgcuaaccccaacguagacccgaacgccaauccaaacgccaaccccaacgccaacccaaacgcaaacccaaacgcaaacccaaacgccaauccaaacgcgaacccaaacgcaaacccaaacgcaaacccaaacgccaacccaaacgccaacccaaacgccaacccaaaugcaaacccaaacgcaaacccaaacgcaaacccaaacgucgacccaaacgccaacccgaacgccaaccccaacgcaaaccccaacgcaaacccaaacgcaaaccccaacgccaacccaaacgcaaaccccaacgccaaccccaacgcgaaccccaacgccaacccaaacgcgaacccgaacgcaaacccaaacgcaaacccgaacgcaaaccccaacgccaacccaaacgcaaacccaaacgccaacccaaacgcgaaccccaacgcaaacccaaacgcaaacccaaacgccaaccccaacgcaaacccgaacgcgaacccaaacgccaaccccaacgccaacccaaacgccaacccaaacaagaacaaccaaggaaacggccaagggcacaacaugcccaacgaccccaaccgaaacgucgacgaaaacgccaacgccaacaacgcaguaaagaacaacaacaacgaagaacccucugacaaacacauagaacaauaccucaaaaaaauccaaaacucacuauccaccgaauggucacccugcuccgucacuugcggaaauggaauacaaguccgcauaaaaccaggcagcgccgacaaaccaaaagaccaacuggacuacgaaaacgacauagaaaagaaaauaugcaaaauggaaaaaugcagcuccgucuucaacguaguaaacagcucgaucggacuuauaaugguacucuccuuccuauuccugaacuaa

SEQ ID NO: 5734 - RNA, 1323 nt, Artificial Sequence
  derived and/or modified CDS sequence (opt11) from Pf(Pal97-115)__BAM84958.1__CSP
augaugcgcaaacucgccauacucucagucuccagcuuccucuucguagaagcccucuuccaagaauaccaaugcuacggcuccucaagcaacacccgcguccuaaacgaacucaacuacgauaacgcaggcaccaaccuauacaacgaacucgaaaugaacuacuacggcaaacaagaaaacugguacagccucaaaaaaaacucccgcucccuaggagaaaacgaugacggcaacaacaacaacggcgacaacggcagagaaggcaaagacgaagacaaacgugacggcaacaacgaagacaacgaaaaacuccgcaaacccaagcacaaaaaacucaaacaaccaggcgacggcaaccccgaccccaacgcaaaccccaacguagaccccaacgccaaccccaacgucgacccaaacgccaacccaaacgucgacccaaacgccaacccaaacgccaacccaaacgcaaaccccaacgcaaacccuaacgccaauccaaacgccaacccgaacgcaaaccccaacgcaaaccccaacgcaaacccaaacgccaaccccaacgcaaaccccaacgcuaaccccaacgccaaccccaacgcaaaccccaacgccaaccccaacgcgaacccuaacgccaaccccaaugccaacccaaacgccaaccccaacgccaaccccaacgcaaacccaaacgccaaccccaacgucgacccaaacgcaaaccccaacgcgaaccccaacgccaacccaaacgccaacccaaacgccaaccccaacgccaaccccaacgccaaccccaacgccaaccccaacgcaaacccaaacgccaaccccaacgcaaaccccaacgcuaacccaaacgccaacccaaacgccaacccgaacgcgaacccaaacgccaacccaaaugcgaacccaaacgccaacccaaacgcaaacccaaacaaaaacaaccaaggaaacggccaaggacacaacaugccaaacgaccccaacagaaacgucgacgaaaacgccaacgccaacaaugccguaaaaaacaacaacaacgaagaaccauccgaccaacacaucgaaaaauaccucaaaaucauccaaaacucccucuccaccgaaugguccccaugcucagucaccugcggaaacgguauccaaguacgcauaaaacccggcuccgcagacaaaccaaaagaccagcuggacuacgcaaacgacauagaaaaaaaaaucuguaaaauggaaaaaugcucauccgucuucaacgucgucaacagcuccaucggccuaaucaugguacuaucauuccuauuccucaacuaa

SEQ ID NO: 5735 - RNA, 1323 nt, Artificial Sequence
  derived and/or modified CDS sequence (opt11) from Pf(PMS5)__BAN59428.1__CSP
augaugcgcaaacuagccauacucuccgucuccaguuuccucuucguagaagcccucuuccaagaauaucaaugcuacggcucauccagcaacacccgaguccuaaacgagcucaacuaugacaacgcgggcacaaaccuguacaacgaacuagaaaugaacuacuacggaaaacaggaaaacugguacagccucaaaaaaaacucccgcucccucggcgaaaacgacgauggcaacaacaacaacggggacaacggcagagaaggaaaagacgaagacaaacgagacggaaauaacgaagacaacgaaaaacuacgcaaaccaaaacacaaaaaacugaaacaacccggagacggaaaccccgacccaaacgccaacccaaacguagacccaaacgccaacccaaacguagacccaaacgccaaccccaacguagacccaaacgccaaucccaacgcuaacccaaacgcaaaccccaacgcaaacccuaacgcaaacccaaacgccaacccaaacgccaacccgaacgcaaacccaaacgcaaacccaaacgccaacccaaacgcaaaccccaacgcaaacccaaacgcaaacccaaacgcaaacccaaacgcaaaccccaacgcaaacccaaacgcgaauccaaacgcgaacccaaacgcaaaccccaacgcgaacccaaacgcaaacccaaacgccaacccgaacgcaaaccccaacgcgaacccaaacgccaacccaaacgcaaaccccaacgccaaccccaaugcaaaccccaacgcuaacccaaacgccaaccccaacgcaaacccgaacgccaacccaaacgcaaacccaaacgcgaacccaaacgccaaccccaacgccaacccaaacgccaacccaaacgccaacccgaacgcaaacccaaacgccaacccaaacgcaaacccgaacgcaaauccgaacaaaaacaaucaaggaaacggacaaggccacaacaugcccaacgaccccaaccgcaacgucgacgaaaacgccaacgccaacaacgacgucaaaaacaacaacaacgaggaacccucggauaaacacaucgaacaguacuuaaaaaaaauccaauacucccucuccaccgaauggucacccugcagcgucaccugcggcaacggcauacaaguacgcauaaaaccaggcucagcagacaaacccaaagaccaacuagacuacgaaaacgacauagaaaaaaaaauaugcaaaauggaaaaaugcaguucaguuuucaacguaguaaacagcuccauaggccucaucauggugcucucauuccuguuccuaaacuaa

SEQ ID NO: 5736 - RNA, 1320 nt, Artificial Sequence
  derived and/or modified CDS sequence (opt11) from Pf(J2)__ACO49408.1__CSP
augagaaaacuggcaauacucuccgucucauccuuccucuucgucgaagcccuauuccaagaauaccaaugcuacggcuccuccuccaacacacgaguacucaacgaacuuaacuacgacaacgccggcacaaaccuauacaacgaacucgaaaugaacuacuacggcaaacaagaaaacugguacucccucaagaaaaacucccgcucacucggagaaaacgacgauggaaacaacaacaacggagauaacggccgugaaggcaaagaugaagacaaacgggacggcaacaacgaagacaacgaaaaacucagaaaaccaaaacacaagaaacucaaacaacccggcgacggaaaccccgaccccaacgcaaaccccaacgucgaccccaacgccaacccaaacgucgaccccaacgcaaaccccaacgucgacccaaacgcgaaccccaacgccaaccccaacgccaacccaaacgccaacccaaacgccaacccaaacgccaacccaaacgccaacccgaacgcaaacccaaacgcaaaccccaacgccaaccccaacgcgaaucccaacgccaaccccaacgcaaaccccaacgcuaacccaaacgccaaccccaacgcaaacccgaacguugacccgaacgccaaccccaacgccaacccaaacgcuaacccaaacgcaaacccaaacgcaaaccccaacgccaacccaaacgccaaccccaacgccaaccccaacgccaaccccaacgccaaccccaacgcaaacccaaacgcaaaccccaacgccaacccgaacgcaaacccaaacgcaaacccaaacgcaaaccccaacgccaaccccaacgcgaacccaaacgcaaacccaaacgccaacccaaacgcaaacccaaacgccaaccccaacgccaaccccaacgccaacccgaacgccaaccccaacaaaaacaaccaaggcaacggacaaggacacaacaugccaaacgaccccaaccgcaacgucgacgaaaacgccaacgcaaauaacgacgucaaaaacaacaacaacgaagaaccauccgacaaacacaucgaacaauaccucaagaaaauccaauacucccuaucaaccgaauggucccccugcagcguaaccugcggaaacggcauccaagucagaaucaaacccggcuccgccgacaaaccaaaagaucaacuugacuacgaaaacgacauugaaaagaaaauaugcaaaauggaaaaaugcagcuccgucuucaacgucgucaacucauccaucggacucauaaugguacucucauuccucuuucuaaacuaa

SEQ ID NO: 5737 - RNA, 1320 nt, Artificial Sequence
  derived and/or modified CDS sequence (opt11) from Pf(M4)__ACO49420.1__CSP
augagaaaacucgccauccucucaguaucaagcuuccucuucguagaagcccucuuccaagaauaccaaugcuacggaucaucauccaacacccgaguccuaaacgaacuaaacuacgacaaugcaggcacaaaccuauauaacgaacuugaaaugaauuacuacggcaaacaggaaaacugguauagccuaaaaaaaaacucacgcagccucggagaaaacgacgacggcaacaacaacaacggcgacaacggcagggaagggaaagacgaagacaaacgagacggcaacaacgaagacaacgaaaaacuccgaaaaccuaaacauaaaaaacuaaaacaacccggcgacggaaacccggacccgaacgcgaaccccaacgucgacccaaacgcaaaucccaacgucgacccaaacgccaacccaaacgcgaacccaaacgcaaaccccaacgccaaccccaacgcaaacccgaacgcuaacccaaacgcaaaccccaacgcaaaccccaacgccaaccccaacgcaaacccaaacgcaaacccaaaugcuaacccaaacgcaaacccaaacgcaaacccgaacgccaacccuaacgcaaaccccaacguagacccgaacgccaacccaaacgccaacccaaacgccaaccccaacgccaaccccaacgcaaaccccaacgccaaccccaacgcaaacccaaacgccaaccccaacgccaacccaaacgcaaacccaaacgcaaacccaaacgccaauccaaaugcaaacccaaacgccaauccgaacgcaaaccccaacgcaaacccgaacgcgaaccccaacgcaaaccccaacgcaaacccgaacgccaaccccaacgccaaccccaacgcaaacccgaacgccaacccaaacgccaaccccaacgcaaaccccaacgcaaacccaaacgccaauccgaacaaaaacaaccaagguaacggccaaggccacaacaugccaaacgaucccaaccgcaacgucgacgaaaacgccaaugccaacaacgccgucaaaaacaacaacaacgaagaacccuccgacaaacacaucaccgaauaccuaaaaaaaauccaaaacucccucagcaccgaauggucccccugcagcguaaccugcggaaauggcauccaaguccgcaucaaaccaggcucagccggcaaaucaaaagacgaacuagacuacgaaaacgacaucgaaaaaaaaauaugcaaaauggaaaaaugcuccucaguauucaacguagucaacuccucaaucggccuaaucaugguacuaucauuccuauuccuaaacuaa

SEQ ID NO: 5738 - RNA, 1320 nt, Artificial Sequence
  derived and/or modified CDS sequence (opt11) from Pf(TMS121)__ACO49498.1__CSP
augagaaaacuggccauacucuccgucucguccuuucuauuugucgaagcccucuuccaagaauaccaaugcuacggauccucauccaacacccgaguccucaacgaacucaacuacgauaacgccggcacaaaccucuacaacgaacucgaaaugaacuacuacggcaaacaagaaaacugguacagccucaaaaaaaacucccgcucccucggcgaaaacgacgacggaaacaacaacaacggcgauaacggccgcgaaggaaaagacgaagacaaacgugacggaaacaacgaagacaacgaaaaacuccgcaaacccaaacacaaaaaauugaaacaacccggcgacggcaaccccgacccaaacgccaaucccaacguagacccaaacgcaaaccccaaugucgaccccaacgcgaaccccaacguagacccgaacgccaacccaaacgccaaccccaaugccaacccaaacgcaaacccgaacgccaaccccaacgccaacccaaacgccaaccccaacgccaaccccaacgcaaacccaaacgcaaacccuaacgccaacccuaacgccaaccccaacgccaaccccaacgccaacccuaacgccaacccaaacgcaaaccccaacgccaacccaaacgcaaacccaaacgcaaacccaaacgcaaacccgaacgccaacccaaacgcaaaccccaacgccaacccgaacgccaaccccaacgccaacccaaacgccaaccccaacgcaaaccccaacgccaaccccaacgccaaccccaacgcaaauccaaacgcaaaccccaacgcuaaccccaacgccaaccccaacgcuaacccaaacgccaaccccaacgcaaacccuaacgcaaaccccaacgccaaccccaacgcuaacccaaacgcaaauccaaacgcaaaccccaacgccaacccuaacaaaaacaaccaaggaaacggccaaggccacaacaugcccaacgaccccaaccgcaacgucgacgaaaacgccaacgccaacaaugacgucaaaaacaacaacaacgaagaacccuccgacaaacacauagaacaauaccuuaagaaaauacaaaacucgcucucaaccgaauggucccccugcucugucaccugcgguaacggcauccaaguacgcaucaaaccgggcuccgccaauaaacccaaagacgaacuagacuacgaaaacgacaucgaaaaaaaaaucugcaaaauggaaaaaugcucauccguauucaacgucguaaacuccucaauaggccuaaucaugguccucucauuccucuuccucaacuaa

SEQ ID NO: 5739 - RNA, 1320 nt, Artificial Sequence
  derived and/or modified CDS sequence (opt11) from Pf(TMS180)__ACO49505.1__CSP
augcgcaaacucgccauacucucagucucauccuuccucuucguagaagcccuauuccaagaauaccaaugcuacggcuccucauccaacaccagaguccucaacgagcucaacuacgacaacgccggcaccaaccucuacaacgaacuagaaaugaacuacuacgggaaacaagaaaacugguacucccucaaaaaaaacucccgaucacuaggagaaaacgacgacggcaacaacaacaacggagacaacggccgggaaggaaaggacgaagauaaacgagacggcaacaacgaagacaacgaaaaacuacgaaaacccaaacacaaaaaacucaaacaacccggugacggcaaccccgaucccaacgccaaccccaacgucgaccccaacgccaaccccaacguagaccccaacgcgaacccaaacguggacccaaacgccaaccccaacgcaaaccccaacgcaaacccaaacgccaacccaaacgcaaacccuaacgccaacccgaacgcgaaccccaaugcgaaccccaacgcaaacccaaaugcaaacccaaacgccaacccaaacgcgaaccccaacgcaaaccccaacgccaaccccaacgcaaaccccaacgccaaucccaacgcaaacccaaacgcaaaccccaacgccaacccaaacgcgaacccaaacgcaaaccccaacgccaaccccaaugcaaaccccaacgccaacccaaacgcaaaucccaacgccaaccccaacgccaaccccaacgccaaccccaacgccaaccccaacgccaacccaaacgccaacccaaacgcaaaccccaacgcaaaccccaacgccaacccaaacgccaacccgaacgccaaccccaacgcgaacccaaacgcaaaccccaacgcgaacccgaacgcaaaccccaacgcuaacccaaacgccaaccccaacaaaaacaaccaaggcaacggccaaggccacaacaugccaaacgaccccaaccgcaacgucgacgaaaacgccaacgccaacaacgacgucaaaaacaauaacaacgaagaaccaucagacaaacacauagaacaguaccuaaaaaagauacaauacucccucucaaccgaauggucccccugcucaguaaccugcggcaacggaauccaaguacgcauaaaaccaggcuccgcagacaaaccaaaagaccaauuagacuacgaaaacgacaucgaaaaaaaaauaugcaaaauggaaaaaugcagcuccgucuucaacgucgucaauuccuccaucggacucaucaugguccuuuccuucuuauuccucaacuaa

SEQ ID NO: 5740 - RNA, 1311 nt, Artificial Sequence
  derived and/or modified CDS sequence (opt11) from Pf(836)__AAA29576.1__CSP
augaugcgcaaacucgccauacucucagucagcuccuuccucuucguagaagcccucuuccaggaauaccaaugcuacggcagcuccucaaacacccgcgucuugaacgaacuaaacuacgauaacgcaggcaucaaccucuacaacgaacucgaaaugaauuacuacggcaaacaagaaaacugguacagccugaaaaaaaacucacgcucacucggcgaaaacgacgacggcaacaacaacaacggugacaacggccgagaaggcaaagacgaagacaagcgggacggcaacaacgaagacaacgaaaaacugcgaaaacccaaacauaaaaaacucaaacagcccggcgacggaaaccccgacccaaaugccaacccaaaugucgaccccaacgcaaacccaaacgucgaccccaacgcaaaccccaacgcaaacccaaacgccaacccaaaugcaaaccccaacgccaaccccaacgcaaacccaaacgccaacccaaacgcaaaccccaacgccaacccaaacgccaacccaaacgccaaccccaacgcuaaccccaacgccaacccaaacgcaaacccaaacgccaaccccaacgucgaccccaacgccaaccccaacgcaaaccccaacgccaaccccaacgcgaaccccaacgcuaacccaaacgcaaaccccaacgccaaccccaacgccaaccccaacgcaaaccccaacgcaaaccccaaugccaaucccaacgcaaacccaaacgccaacccaaacgccaacccaaacgcgaaccccaaugccaacccaaacgcaaacccaaacgccaacccuaacgcuaacccaaacgcaaaccccaacgccaaccccaacgccaacccaaacgccaaccccaacgcaaaccccaacgcaaaccccaacgcaaacccaaacgccaaccccaacaaaaacaaccaaggcaacggccaaggucacaauaugccaaacgaccccaaccgcaacguugacgaaaacgccaacgccaacaacgccgucaaaaacaacaacaacgaagaacccucagacaagcacaucaccgaauaccucaaaaaaauccaaaacucacucuccacagaauggucccccugcuccgucacaugcggcaacggcauacaaguacgaaucaaacccggcuccgccggaaaauccaaagacgaacuggacuacgaaaacgacauagaaaaaaaaaucugcaaaauggagaaaugcuccucaguuuucaacgucgucaacuccuccaucggccucaucaugguucucucuuuccucuuccucaauuaa

SEQ ID NO: 5741 - RNA, 1311 nt, Artificial Sequence
  derived and/or modified CDS sequence (opt11) from Pf(842)__AAA29545.1__CSP
augaugcgcaaacucgccauccucucagucuccagcuucuuauucguagaggcccuguuccaggaauaccaaugcuacggcuccuccucaaacacccgcgucuuaaacgaacucaacuacgacaacgcuggcauaaaccucuacaaugaacucgaaaugaauuacuacggaaaacaagagaacugguacucccugaaaaaaaacucacgcucucucggcgaaaacgacgacggcaacaacaacaacggcgacaacggcagagaaggcaaagacgaagacaaaagggacggcaacaacgaagacaacgaaaaacuccgcaaaccaaaacacaaaaaacucaaacaaccaggcgacggcaaccccgacccuaacgcaaaccccaacgucgacccaaacgcaaaccccaacguagacccaaacgcaaacccaaacgucgaccccaacgccaaccccaacgcuaaccccaacgccaacccaaacgccaacccgaacgcaaaccccaacgccaaccccaacgccaacccaaacgccaacccaaacgcuaacccaaacgccaaccccaacgccaaccccaacgcaaacccgaacgccaacccaaacgccaaccccaacgcaaacccaaacgcaaaccccaacgccaaccccaacgccaaccccaacgccaaccccaacgccaaucccaacgccaaccccaacgccaaccccaacgcaaaccccaaugcaaaccccaaugccaaccccaaugccaaccccaacgccaacccaaacgccaaccccaacgccaacccaaacgccaaccccaacgccaaccccaacgccaaccccaacgcaaaccccaaugcaaacccuaacgcaaacccaaaugccaacccaaacgcaaacccaaacgccaaccccaacgccaacccaaacgccaacccaaacgcaaaccccaacaaaaacaaccaaggcaacggccaaggccacaacaugccaaacgaucccaaccgcaacgucgacgaaaaugccaacgccaacaacgacgucaaaaacaacaacaacgaagaacccucagacaaacacaucgaacaauaccugaaaaaaauccaauacucccuaucaaccgaaugguccccuugcuccguuacaugcggcaauggcauccaaguccgcaucaaaccaggcucugccgacaaacccaaagaccaacuggacuacgaaaacgacaucgaaaaaaaaauaugcaaaauggaaaaaugcagcuccgucuucaacguggucaacuccucuaucggccuaaucaugguccuaagcuuccuguuccuuaacuaa

SEQ ID NO: 5742 - RNA, 1311 nt, Artificial Sequence
  derived and/or modified CDS sequence (opt11) from Pf(India)__AAN87576.1__CSP
augaugcgcaaacuagcaauccuauccgucuccagcuuccuauucgucgaagcccucuuccaggaauaccaaugcuacggcaguucaagcaacacccgaguacucaacgaacuaaacuacgacaacgcuggcaccaaccuauacaacgaacucgaaaugaacuacuacggcaaacaagaaaacugguauagccucaaaaaaaacucccgcucacuaggcgaaaacgacgacggcaacaacaacaacggcgacaacggccgagaaggcaaagaugaagacaagcgcgacggcaacaacgaagacaacgaaaaacuacgcaaacccaaacacaagaaacucaaacaaccaggagauggaaacccagaccccaacgccaacccaaacguagacccaaacgccaacccaaacguagaccccaacgcaaacccaaacgccaaccccaacgcaaacccgaacgcaaacccaaacgcaaacccaaacgcaaaucccaacgccaacccaaacgcaaaccccaacgccaacccaaacgccaacccgaacgcaaaccccaacgccaacccuaacgccaacccaaacgcgaacccuaacgccaaccccaacgccaacccaaacgccaacccaaacgccaaccccaacgccaaccccaacgcaaacccaaacgcuaaccccaacgccaaccccaacgcaaacccaaacgccaacccaaacgccaacccaaacgccaacccaaacgccaaccccaacgcaaacccaaacgccaacccaaacgccaaccccaacgcaaaccccaacgcuaaccccaacgcaaacccaaacgcaaaccccaacgcaaaccccaacgccaaccccaacgcgaacccaaaugccaacccaaacgccaaccccaacgccaaccccaacgcaaaccccaacgcaaacccaaacgccaacccgaacaaaaacaaccaaggcaacggccaaggccacaacaugccaaacgacccaaaccgaaacgucgacgaaaacgccaacgcaaacaacgacgucaaaaacaacaacaacgaagagcccucagacaaacacauagaagaguaccucaaaaaaauacaaaauucacuaucgaccgaauggucacccugcagcgugaccugcggcaacggcauacaagucagaaucaaacccgggucugcaaacaaacccaaagacgaacugaacuacgaaaacgacauagaaaaaaaaauaugcaaaauggaaaaaugcuccuccgucuucaacgucgucaacuccuccaucggacuaaucaugguacuauccuuccuguucuuaaacuaa

SEQ ID NO: 5743 - RNA, 1311 nt, Artificial Sequence
  derived and/or modified CDS sequence (opt11) from Pf(India)__AAN87620.1__CSP
augaugaggaaacuagccauacucucgguaucauccuuccuauuugucgaagcccucuuccaagaauaccaaugcuacggaagcucuagcaacacacgaguacuaaacgaacucaacuacgacaacgcaggcacaaaccuauacaacgaacuggaaaugaacuacuacggaaaacaagaaaacugguauagccuaaagaaaaacucacgcucacucggcgaaaacgacgacggcaacaacaacaacggcgacaauggccgcgaaggaaaagacgaagacaaacgggacggaaacaacgaagacaacgagaaacuacgcaaaccaaaacacaagaaacuaaaacaaccagggggcgacaacccagacccaaacgcaaaccccaacgucgaccccaacgcaaacccuaacgccaacccaaacgcaaacccaaacgccaacccaaacguaaacccaaacgccaacccaaacgccaacccaaacgccaacccaaacgcgaaccccaacgccaacccaaacgccaacccaaacgcgaaccccaacgccaacccaaacgucgacccaaacgccaaccccaacgcaaacccaaacgccaaccccaacgcgaaccccaacgcaaaccccaacgccaacccaaacgccaacccaaacgcaaacccaaacgcaaaccccaacgcaaacccaaacgcaaaccccaacgccaacccaaacgccaacccaaacgccaaccccaacgcaaacccaaacgcaaacccaaacgcaaaccccaacgccaaccccaacgccaaccccaacgccaacccgaacgcaaacccaaacgcaaacccaaacgccaaccccaacgccaauccgaacgcaaacccgaacgccaacccgaacgcuaaccccaacgccaaccccaacgcuaaccccaacgcaaaccccaacgcaaacccaaacaaaaacaaucaagggaacggccaaggccacaauaugcccaacgaccccaaccgaaacguugacgaaaacgccaacgcaaacaacgccgucaaaaacaacaacaacgaagaacccucagacaaacacauagaacaauaccucaagaaaauccaaaacucgcucuccaccgaauggucccccugcuccguaaccugcggcaacggcauacaaguaagaaucaaaccaggcucagccaacaaacccaaagacgaacucgacuacgaaaacgacauagaaaagaaaaucugcaaaauggaaaaaugcagcucaguauucaacgucgucaacuccuccaucggacucaucaugguacucucauucuuauuccuaaacuaa

SEQ ID NO: 5744 - RNA, 1311 nt, Artificial Sequence
  derived and/or modified CDS sequence (opt11) from Pf(PFS19)__BAN59401.1__CSP
augaugcgcaaacucgccauccucucagucuccuccuuccuauucgucgaagcccuauuccaggaauaccaaugcuacggcagcucuagcaacacccgcguccuaaacgaacuaaacuacgacaacgcaggcaccaaccuauacaacgaauuagaaaugaacuacuacgggaaacaagaaaauugguacagccugaaaaaaaacucccgaucccuaggcgaaaacgacgacggcaauaacaacaacggagacaacggccgagaaggcaaagacgaggacaaaagagacggcaacaacgaagacaacgaaaaacuaagaaaaccaaaacacaaaaaacuaaaacaacccggagacggaaaccccgaccccaaugccaaccccaacguagacccaaacgccaaccccaacgucgaccccaacgcaaacccaaacgucgaccccaacgccaaccccaacgccaacccaaacgcaaaccccaacgcaaacccuaacgcgaacccaaacgcaaaccccaacgccaaccccaacgccaacccgaacgcaaaccccaacgcaaaccccaacgcaaaccccaacgcaaacccaaacgcuaacccaaacgccaacccaaacgccaaccccaacgccaaccccaacgccaacccaaacgccaaccccaacgcaaaccccaacgcaaaccccaacgcaaaccccaacgcaaaccccaacgcaaaccccaacgcaaaccccaacgcaaacccaaacgcaaaccccaacgcaaacccaaacgcaaacccaaacgcaaaccccaacgccaacccaaacgcaaaccccaacgccaaccccaacgccaaccccaacgccaacccaaacgccaacccaaacgccaaccccaacgccaaccccaacgccaaccccaacgccaacccaaacgccaaucccaacgccaacccgaacaaaaacaaccaagguaacggucaaggacacaacaugcccaacgacccaaaccgcaacgucgacgaaaacgccaacgccaacaacgcagucaaaaacaacaacaacgaagaacccuccgacaaacacaucgaacaauaccucaaaaaaauccaaaacucccuaucaacagaaugguccccaugcagcgucacuugcggcaacggcauccaagugagaauaaaaccaggauccgcaaacaaaccaaaagacgaacuugacuacgaaaacgacauagaaaaaaaaaucuguaaaauggagaaaugcagcuccgucuucaacgucgucaacuccuccauaggacucaucaugguccucuccuuccucuuccugaacuaa

SEQ ID NO: 5745 - RNA, 1311 nt, Artificial Sequence
  derived and/or modified CDS sequence (opt11) from Pf(Sol95-121)__BAM85068.1__CSP
augaugcgcaaacucgccauacuaucaguaucaaguuuccucuucgucgaggcccuauuccaagaauaccaaugcuacggcaguucauccaacacccgaguccuaaacgaacucaacuacgacaacgccggcacaaaccuauacaacgaacuagaaaugaacuacuacgggaaacaagaaaacugguacagccuuaaaaaaaacucccgcucccucggcgaaaaugacgacggaaacaacaacaacggcgacaacggcagagaaggaaaagaugaagacaaaagagacggcaacaacgaagacaacgaaaaacuccgaaaaccaaaacacaaaaaacucaaacaaccuguagacgggaacccagacccgaaugcaaaccccaacgucgaccccaacgcaaaccccaacguagauccgaacgcaaacccaaacgucgaccccaacgccaacccaaacgcaaacccaaacgccaacccuaacgcgaaccccaacgcaaauccuaaugcaaaccccaacgccaacccaaacgccaacccaaacgcaaaccccaacgccaacccaaaugcaaaccccaacgcaaaccccaacgccaacccaaacgccaacccaaacgcaaaccccaacgcaaacccaaacgccaaccccaacgccaaccccaacgccaaccccaacgcaaaccccaacgccaacccaaacgcaaaccccaacgccaacccaaacgcaaaccccaacgcaaacccaaacgccaaccccaacgccaacccaaacgcaaaucccaacgcaaaucccaacgccaaccccaacgcaaacccgaacgccaacccaaacgccaaccccaacgcaaaccccaacgccaacccaaacgcgaaccccaacgcaaacccuaacgccaaccccaacgcaaacccaaacgcgaaaccaaacgccaaccccaacaaaaacaaccaaggcaacggccaaggccacaauaugcccaacgaccccaaccgcaacgucgacgaaaacgccaacgcaaacaacgccgucaaaaacaacaacaaugaagagccaucagacaaacacaucgaacaauaccuaaaaaaaauacaaaacucccuaucaaccgaaugguccccaugcuccgucacaugcggcaacggcauucaaguccgcauaaaacccggcucagccgauaaaccaaaagaccaacuugacuacgaaaacgacaucgaaaaaaaaauaugcaagauggaaaaaugcuccucaguauucaacgucgucaacagcuccauaggccucaucaugguccuuuccuuccuauuccuaaacuag

SEQ ID NO: 5746 - RNA, 1311 nt, Artificial Sequence
  derived and/or modified CDS sequence (opt11) from Pf(T837)__BAM84914.1__CSP
augaugcgaaagcuagccauacucucagucucauccuuccucuucgucgaagcccucuuccaagaauaccaaugcuacggaagcuccuccaacacccgcguacugaacgaacucaacuacgacaacgccggcaccaaccucuacaacgaacucgaaaugaacuacuacggcaaacaagaaaacugguacucccucaaaaaaaacucacgcucacuaggugaaaacgacgacggcaauaacaacaacggcgacaacggcagagaaggcaaagacgaggacaaacgagacggcaacaacgaagacaacgagaaacuacgcaaacccaaacacaaaaaacuaaaacaacccggagacggaaaccccgacccgaaugcaaacccaaacgucgacccgaacgccaaccccaacgucgacccaaacgcaaacccuaacgccaacccgaacgccaacccaaacgcaaaccccaacgccaaccccaacgccaaccccaacgccaauccgaacgccaaccccaacgccaaccccaacgcaaaccccaaugccaaccccaacgcaaaccccaacgcaaaccccaacgccaacccaaacgcgaacccaaacgucgacccaaacgccaacccgaacgcgaaccccaacgcaaacccaaacgcaaacccaaacgccaaccccaacgcaaaccccaacgcaaacccaaacgccaaccccaacgcaaacccaaacgccaaccccaacgccaaccccaacgcaaaccccaacgcaaacccaaacgccaacccaaacgccaaccccaacgccaacccaaacgccaauccaaacgccaacccaaacgcaaaccccaacgccaacccaaacgccaacccaaacgccaacccaaacgccaaccccaacgccaaccccaacgccaaccccaacgccaaccccaacgcuaacccaaacaagaacaaucaaggcaacggccaaggccacaacaugccaaacgaccccaaccguaacgucgacgaaaacgcaaacgccaacaacgccguaaaaaauaacaacaaugaagaacccuccgacaaacacaucaccgaauaccucaaaaaaauccaaaacucacucuccaccgaaugguccccuugcuccguaaccugcggaaacggcauacaaguccgcaucaaacccggcucugcaggcaaauccaaagacgaacucgacuacgagaacgacaucgaaaaaaaaauaugcaaaauggaaaaaugcuccucagucuucaacgucgugaauuccucgauaggccucaucaugguacuauccuuccucuuccucaacuag

SEQ ID NO: 5747 - RNA, 1311 nt, Artificial Sequence
  derived and/or modified CDS sequence (opt11) from Pf(TiMS95-071)__BAM84865.1__CSP
augaugagaaaacucgcgauacucucagucucauccuuccucuucgucgaggcacucuuccaagaauaccaaugcuacggcuccucauccaacacacggguccuuaacgaacucaacuacgacaacgcaggcacaaacuuguacaacgaacucgaaaugaacuauuacggaaaacaagaaaacugguacagccuaaaaaaaaacucccgcucacucggcgaaaacgacgacggaaauaacaacaacggagacaacggccgcgaaggcaaagacgaagacaaaagggacggcaacaacgaggacaacgaaaaacuccgcaaacccaaacacaaaaaacucaaacaaccaggagacggaaaccccgacccaaacgccaacccgaacguagaccccaacgcaaaccccaacguagacccgaacgccaacccgaaugucgaccccaacgcaaaucccaacgccaaccccaacgcaaaccccaacgccaacccuaacgcaaaccccaacgccaaccccaacgcaaacccaaacgcaaacccaaacgccaacccaaacgccaacccaaacgccaacccaaacgcaaaccccaacgccaaccccaacgccaaccccaacgccaaccccaacgccaacccgaacgcaaaccccaacgcgaaucccaacgccaacccaaacgcgaacccaaacgccaacccgaacgccaaccccaacgccaaccccaaugcaaacccuaacgccaacccaaacgcaaacccaaacgccaacccaaacgccaaccccaacgcaaacccgaacgccaaccccaacgccaaccccaacgccaaccccaaugccaacccaaacgccaacccaaacgcaaaccccaacgccaacccaaacgccaauccaaacgcaaacccaaacgcaaaccccaacgccaaccccaacgcgaacccaaacaaaaacaaccaaggcaacggacaaggccacaacaugcccaacgaccccaaccgcaacgucgacgaaaacgccaaugccaacaacgacgucaaaaacaacaacaacgaagaacccuccgacaaacauaucgaacaauaccuaaaaaaaauccaauacucacucuccaccgaauggucccccugcagcguaacuugcggcaacggcauccaaguccguauaaaacccggcucagcugacaaacccaaagaccaacucgacuacgaaaacgacaucgaaaaaaaaauaugcaagauggaaaaaugcucaucagucuucaacguugucaacagcucgaucggacucaucaugguucuauccuuccuguuccuaaacuaa

SEQ ID NO: 5748 - RNA, 1308 nt, Artificial Sequence
  derived and/or modified CDS sequence (opt11) from Pf(TM69)__ACO49446.1__CSP
augcgaaaacucgccauccucucagucuccuccuuccucuucgucgaggcccucuuucaagaauaccaaugcuacggcuccuccagcaacacccgaguacuaaacgaacucaacuacgacaacgcgggcaccaaccucuacaacgaacuagaaaugaacuacuacggcaaacaagagaauugguacagucuaaaaaagaacucgcgcucacucggggaaaacgacgacggcaacaacaacaacggagacaacggcagagaaggcaaagacgaagacaaacgagacggcaacaacgaagacaacgaaaaacuacguaaacccaaacacaaaaaacucaaacaacccggagacggaaaccccgaccccaacgcaaacccgaacgucgaccccaacgcaaacccaaacguggacccaaacgcgaacccgaacguagaccccaacgcgaacccaaacgcaaacccaaacgccaacccaaacgccaacccaaacgcaaacccaaacgcgaaccccaacgcuaacccaaacgcaaaccccaacgcaaaccccaaugcaaacccaaacgccaacccaaacgcgaacccgaacgcaaacccaaacgccaacccaaacgcaaacccaaacgccaaccccaacgcuaaccccaacgcaaacccaaacgccaaccccaacgccaaccccaacgccaacccaaacgccaaccccaacgccaaccccaacgccaaccccaacgccaaccccaacgcgaacccgaaugccaaccccaacgcaaacccaaacgccaacccaaaugcgaacccgaacgcaaacccaaacgccaaccccaacgccaacccaaacgccaaccccaacgcaaaccccaacgcaaauccaaacgccaaccccaacgcaaaccccaacgccaaccccaacgcaaacccgaacgccaacccgaacaaaaacaaccaaggaaacgggcaaggccacaacaugcccaacgaccccaaccgcaacgucgacgaaaacgccaacgccaacaacgacgucaaaaacaacaacaacgaagaaccauccgacaaacauaucgaacaauaccucaaaaaaauccaauacucacucuccaccgaauggucacccugcucagucaccugcggcaacggaauacaaguccgaaucaaaccgggcucagcagacaaaccaaaagaccaacuagacuacgaaaacgacaucgaaaaaaaaauaugcaaaauggaaaaaugcuccuccgucuuuaacgucguaaacaguuccaucggccuaaucaugguacucucauuccucuuccuaaacuaa

SEQ ID NO: 5749 - RNA, 1308 nt, Artificial Sequence
  derived and/or modified CDS sequence (opt11) from Pf(TMS177)__ACO49503.1__CSP
augcgcaaacucgccauccucuccguaagcuccuuccucuuuguagaagcacucuuccaagaauaccaaugcuacggcuccagcuccaacacacgcguccuaaacgaacucaacuacgacaacgccggcacaaaccuauacaacgaacucgaaaugaacuacuacggcaaacaagaaaacugguacucccuaaaaaaaaacucccgcucacucggcgaaaacgacgacggaaacaacaacaacggcgacaacggccgagaaggaaaagacgaagacaaacgcgacgggaacaacgaagacaaugaaaaacuucgcaaaccuaaacacaaaaaacucaaacagccuggcgacggcaaccccgaccccaacgccaaccccaacgucgaccccaacgccaacccaaacguagaccccaacgccaacccgaaugucgacccuaacgccaacccaaacgccaacccaaacgccaaccccaaugccaaccccaacgccaaccccaacgcaaaccccaacgcaaaccccaacgccaacccaaaugccaaccccaacgccaaucccaacgccaacccaaacgccaaccccaacgccaaccccaacgcaaaccccaacgccaacccaaacgccaacccaaacgccaaccccaacgccaacccaaacgcgaaccccaacgcgaacccuaacgccaaccccaacgccaacccaaaugccaaccccaacgccaacccaaacgcaaacccgaacgccaaccccaacgccaaccccaacgccaacccaaacgccaacccuaacgccaaccccaacgcaaacccaaacgccaaccccaacgccaaccccaacgcuaaccccaacgccaaccccaacgccaaccccaacgccaacccaaacgccaaccccaacgcaaaccccaacgcaaaccccaacgcuaaccccaauaaaaacaaccaaggcaacggccaaggacacaacaugccaaacgaccccaaccguaacguagacgaaaacgccaacgccaauaacgccgucaaaaauaacaacaacgaagaacccucagacaagcacauagaacaauaccuaaaaaaaauccagaacucccucucaaccgaaugguccccuugcucagucaccugcggcaacggcauccaaguacgcauaaaacccggaucagcaaacaaaccaaaagacgaacucgacuacgaaaacgauaucgaaaaaaaaauaugcaaaauggaaaaaugcagcuccgucuuuaacgucgucaacucaucuaucggccuuaucaugguacuauccuuccucuuccucaacuaa

SEQ ID NO: 5750 - RNA, 1308 nt, Artificial Sequence
  derived and/or modified CDS sequence (opt11) from Pf(TMS178)__ACO49504.1__CSP
augaggaaacucgccauacuaucggucagcucauuccuauucgucgaggcccucuuucaggaauaucaaugcuacggaagcuccuccaacacccgcguccuaaacgaacucaacuacgacaacgccggcacaaaccucuacaacgaacucgaaaugaacuacuacggcaaacaagaaaacugguacagccuaaagaaaaacucccgcucauuaggagaaaacgacgacggaaacaauaacaacggcgacaacggccgagaaggcaaagaugaagacaaacgggacggcaacaaugaagacaacgaaaaacuacgaaaacccaaacacaagaaacucaaacaaccaggcgacggaaacccagaccccaaugccaacccaaacgucgaccccaacgcaaacccaaacgucgaccccaacgcaaaccccaacgccaaccccaacgccaacccaaacgcaaacccuaacgccaacccuaacgcaaacccaaacgccaacccgaacgcaaaccccaacgcaaacccaaacgcaaacccaaacgcaaaccccaacgcaaaccccaacgccaacccaaacgcaaacccaaacgccaacccaaacgucgacccaaacgcaaaccccaacgcaaacccaaacgcaaacccgaacgcgaaccccaacgccaacccaaacgcuaaccccaacgcaaacccaaacgcaaacccaaacgcaaacccaaacgccaaccccaacgcaaacccaaacgccaaccccaacgcaaauccaaacgcaaacccaaacgccaaccccaacgcaaaccccaacgcaaacccaaacgccaaccccaacgccaacccaaacgcaaacccgaacgccaaccccaacgcaaacccaaacgccaacccaaacgcaaacccgaacgcgaacccaaacgccaauccaaacgcaaacccaaacaaaaacaaccaaggaaacggacaaggccacaacaugccaaacgaucccaaccgcaacguagacgaaaacgccaacgccaacaacgcggucaaaaacaacaacaacgaagaacccuccgacaagcacauaaccgaauaccucaagaaaauccaaaacucccucucaacagaauggucccccugcagcgucacaugcggcaacggcauacaaguacgaauaaaaccaggcucagccggaaaaucgaaagaugaacuagacuacgaaaacgacauagaaaagaaaaucugcaaaauggaaaaaugcuccucagucuucaacgucgucaacagcucaaucggccuaaucaugguccuaucguuccucuuccuaaacuaa

SEQ ID NO: 5751 - RNA, 1305 nt, Artificial Sequence
  derived and/or modified CDS sequence (opt11) from Pf(YL864)__ADF48458.1__CSP
augcggaaacuagccauacucuccguaucaucuuuccucuucguagaagcccucuuccaagaauaccaaugcuacggaagcuccucaaacacccgcguccugaacgaacucaacuacgacaacgccggcacaaaccuauacaaugaacucgaaaugaacuacuacggaaaacaagaaaacugguauucccuaaaaaaaaauucccgaucacucggagaaaacgacgacggcaacaacaacaacggagacaacggcagagaagggaaagacgaagacaaacgcgacgguaacaacgaagacaacgaaaaacuccgcaaaccaaaacacaaaaaacuaaaacagccaggcgacggcaacccagacccaaaugccaacccgaacguagacccaaacgccaacccaaacguagacccaaacgcaaacccaaacgucgaccccaacgcgaacccaaacgccaaccccaacgccaaccccaacgcaaacccaaacgccaacccgaacgcaaaccccaacgcaaaucccaacgcgaacccaaacgccaacccaaacgcaaacccaaacgcaaacccaaacgccaacccaaacgccaacccaaacgcaaaccccaacgccaaccccaacguggacccaaacgcgaacccaaacgcaaaccccaacgcaaacccaaacgcaaacccaaacgcaaacccaaacgccaacccgaacgcaaaccccaacgcaaacccaaacgcaaacccaaacgcgaacccgaacgccaacccaaacgccaaccccaaugcaaacccaaacgccaaccccaacgcaaacccaaacgcaaacccaaacgccaacccaaacgcaaacccaaacgccaacccgaacgcaaaccccaacgcaaaccccaacgcaaacccuaacgcaaacccaaacgcaaaccccaacgcaaacccaaacaaaaacaaccaagguaacggacaaggacacaacaugccaaacgaccccaaccgcaacguugacgaaaacgccaaugcuaacaacgaugaaaauaacaacaacgaggaaccaagcgacaaacacaucgaacaauaccuaaaaaaaauacaauacagccucagcaccgaauggagccccugcucagucacuugcggcaacggcauccaaguccgaaucaaacccggaagcgcagacaaacccaaggaccaacuagacuacgaaaacgacaucgaaaaaaaaaucugcaaaauggaaaaauguucaucaguauucaacgucguaaacucguccauaggcuuaauaaugguccuaagcuuccucuuccucaacuga

SEQ ID NO: 5752 - RNA, 1299 nt, Artificial Sequence
  derived and/or modified CDS sequence (opt11) from Pf(838)__AAA29543.1__CSP
augaugcgaaaacucgccauccucucagucuccuccuuccucuuuguagaagcccuuuuccaggaauaccaaugcuacggguccucauccaacaccagaguccucaacgaacucaacuacgacaacgccggcaucaaccuauacaacgaacuggaaaugaacuacuacggcaaacaagaaaacugguacucccuaaaaaaaaacucgcgaagccucggagaaaacgacgacggcaacaacaacaacggagacaacggccgagaaggcaaagacgaagacaaacgcgacggcaacaacgaagacaacgaaaaacuccgcaaacccaaacacaagaaacuaaaacaacccggagacggcaaccccgacccaaacgccaacccuaacguagaccccaacgccaacccaaacgucgacccaaacgccaaccccaacgucgaccccaaugcaaacccaaacgcgaaccccaacgcaaaccccaacgcgaacccaaacgccaacccaaacgccaauccaaacgccaacccgaacgcaaaccccaacgccaacccaaacgccaacccgaacgccaacccuaacgcaaacccgaacgccaacccaaacgccaaccccaacgccaaccccaacgcaaacccaaacgccaaccccaacgcaaacccaaacgccaaccccaacgcaaaccccaacgcaaaccccaacgcaaaccccaacgcaaacccgaacgccaaccccaacgcaaaccccaacgcgaacccaaacgccaaccccaacgccaaccccaacgcgaaccccaacgccaacccaaacgccaaccccaaugccaaccccaacgccaacccaaacgccaaccccaacgccaaccccaacgccaaccccaacgccaaccccaacgccaacccaaacgcaaaccccaacgcgaaccccaacaaaaacaaccaaggaaacggacaaggccacaacaugcccaacgaccccaaccgcaacgucgacgaaaacgccaaugccaacaacgccgucaaaaauaacaacaacgaagaacccuccgacaaacacaucgaacaauaccuuaaaaaaauccaaaacucccucucuaccgaauggucgcccugcuccguaaccugcgguaacggaauucaaguacgaaucaaacccggauccgcaaauaaaccaaaagacgaacuagacuacgaaaacgacauagaaaaaaaaaucugcaaaauggagaaaugcagcuccgucuucaacgucgucaacuccagcauaggccuaauaaugguacucucauuccucuuccucaacuaa

SEQ ID NO: 5753 - RNA, 1299 nt, Artificial Sequence
  derived and/or modified CDS sequence (opt11) from Pf(834a)__AAA29571.1__CSP
augaugcgaaaacucgccauacucuccguuuccuccuuucucuucgucgaagcccucuuccaagaauaccaaugcuacggcuccucgagcaacacccgaguccucaacgaacucaacuacgacaacgccggaaucaacuuauacaacgaacuugaaaugaacuacuacggaaaacaggaaaacugguacagccucaaaaaaaacucacgaucccucggcgaaaacgacgacggcaacaacaacaacggcgacaacggccgagaagguaaagacgaagacaaacgcgacgggaacaacgaagacaacgaaaaacuccgcaaaccuaaacacaaaaaacucaaacaacccggugacgguaaccccgaccccaacgcaaacccuaacgucgaccccaacgcaaaccccaacgucgacccaaacgccaaccccaacguagaccccaacgcaaacccaaacguagaccccaacgcgaacccaaacgccaaccccaacgccaaccccaacgccaaucccaacgccaaccccaacgccaaccccaacgccaacccaaacgcaaaccccaacgcuaaccccaacgccaacccgaacgccaaccccaacgcaaacccaaacgccaacccgaacgcaaaccccaacgcaaacccaaacgcaaaccccaacgcaaaccccaacgccaaccccaacgccaaccccaacgcaaaccccaacgccaaccccaacgccaaccccaacgcaaacccaaaugccaacccaaacgcuaaccccaacgccaaccccaacgcaaaucccaacgccaacccuaacgccaaccccaacgccaacccaaacgccaacccaaacgcaaaccccaacgcuaaccccaacgccaaccccaacgcaaaucccaacgccaaccccaacgccaacccaaacgcuaacccaaacaaaaacaaccaagggaacggucagggucacaacaugcccaacgaccccaaccgaaacgucgacgaaaacgcaaacgccaacaacgccgucaaaaacaacaacaaugaagaacccuccgacaaacacaucgaacaauaccucaaaaaaauacaaaacucccucuccacagaauggucccccugcagcguaaccugcggcaacggaauccaaguacgaauaaaacccggcucagccaacaaacccaaagacgaacucgacuacgaaaacgacaucgaaaaaaaaauaugcaaaauggaaaaaugcuccucuguauucaacgucguaaacuccuccaucggccucaucaugguccucagcuuccucuuccucaacuaa

SEQ ID NO: 5754 - RNA, 1299 nt, Artificial Sequence
  derived and/or modified CDS sequence (opt11) from Pf(India)__AAN87622.1__CSP
augaugcgaaaacucgccauccuauccguaucaucuuuccuauucgucgaagcccuauuccaagaauaccaauguuacggcucauccagcaacacacgaguccucaacgaacucaacuacgacaacgcgggcacaaaucucuacaacgaacuagaaaugaacuacuacggcaaacaagaaaacugguauagccucaaaaaaaacucccgcucgcucggcgaaaacgacgacggaaacaacaacaacggcgacaacggccgagaaggaaaagacgaagacaaacgcgacggaaacaacgaggacaacgaaaaacuaagaaaacccaaacacaaaaaacuaaaacaaccagcugacggaaacccagacccaaacgccaaccccaacguagaccccaacgccaaccccaacgcaaacccaaacgccaacccaaacgcuaaccccaacgccaaccccaacgcaaacccaaacgccaacccaaacgcaaaccccaacgcaaaccccaacgccaaccccaacgcaaacccgaacgcgaaccccaacguagaccccaacgcaaacccuaacgccaacccaaacgcaaaccccaacgccaaccccaacgccaaucccaacgcgaaccccaacgcaaacccaaacgcaaaccccaacgccaacccaaaugccaacccaaacgccaacccaaacgccaaucccaacgccaaccccaacgcaaaccccaacgccaacccaaacgcaaacccaaacgccaacccaaacgcaaacccaaacgccaacccaaacgccaacccaaacgccaaccccaacgcaaacccaaacgccaaccccaacgcaaaccccaacgcaaacccaaacgcaaaccccaacgcaaaccccaacgcgaacccaaacgccaacccaaacgcaaaccccaacgcaaaccccaacaaaaacaaccaaggcaacggccaaggccacaacaugccgaacgaccccaaccgcaacgucgacgaaaacgccaacgcaaauaacgccguaaagaauaauaacaacgaagaacccuccgacaaacacauagaacaauaccugaaaaaaauucaaaacucccucucaacagaauggucacccugcagcgucaccugcggcaacggaauccaaguacgcauaaaacccggcuccgccaacaaacccaaagacgaacucgacuacgaaaacgauaucgaaaaaaaaaucugcaaaauggagaaaugcagcucagucuucaacguggugaacuccuccaucggacucaucaugguccucuccuuccucuuccucaacuaa

SEQ ID NO: 5755 - RNA, 1299 nt, Artificial Sequence
  derived and/or modified CDS sequence (opt11) from Pf(PFS31)__BAN59407.1__CSP
augaugcgcaaacucgcuauccucucaguauccuccuuccucuucguagaagcccucuuucaagaauaccaaugcuacggcucauccagcaacaccaggguccugaacgaacucaacuacgacaacgccggcacaaaccuguacaacgaauuagaaaugaacuacuacggaaaacaagaaaacugguauucacuaaaaaagaacucgcgaucacucggagaaaacgacgacggcaacaacaacaacggagacaacggccgagaaggcaaagacgaagacaaacgggacggcaacaacgaagacaacgaaaaauuacgcaaacccaaacacaaaaaacugaaacaacccggagacggcaacccagaccccaacgccaauccgaacgucgaccccaacgcgaacccaaacgucgaccccaacgccaacccaaacguggaccccaacgccaaccccaacgccaaccccaacgccaaccccaacgccaaccccaacgccaacccaaacgcaaaccccaacgcaaacccaaacgcaaacccaaacgcaaaccccaaugccaaccccaacgccaacccaaacgcaaaccccaacgccaacccaaacgccaaccccaacgccaaccccaacgccaaccccaacgccaaccccaacgcaaacccaaacgccaaccccaacgcaaacccaaaugccaacccaaacgccaacccaaacgccaacccaaacgcaaaccccaacgccaacccaaacgccaaccccaacgccaaccccaacgcaaacccaaacgccaaccccaacgcaaaccccaacgccaacccaaacgccaacccaaacgccaacccaaacgccaacccaaacgcaaacccaaacgccaacccgaacgcaaacccaaacgccaacccaaacgccaacccgaacgcgaaccccaacaaaaacaaccaaggcaacggccaaggacauaacaugccaaacgacccaaaccgcaacguagacgaaaacgcaaacgccaacaacgacgucaaaaacaacaacaacgaagagcccuccgacaaacacaucgaagaauaccucaaaaaaauccaaaacucccucuccacagaauggucaccaugcagcgugaccugcggaaacggcauccaagucagaaucaagccaggauccgccaacaaacccaaagacgaacuaaacuacgaaaacgauauugaaaaaaaaauaugcaaaauggaaaaaugcuccuccguguucaacguaguaaacuccucaauaggccucaucaugguccucagcuuccuuuuccuaaacuaa

SEQ ID NO: 5756 - RNA, 1299 nt, Artificial Sequence
  derived and/or modified CDS sequence (opt11) from Pf(PNG912-070)__BAM85010.1__CSP
augaugcggaaacucgccauauuaucagucucauccuuccucuucgucgaggcccuauuccaggaauaccaaugcuacggcucaagcuccaacacccgaguucuaaacgaacucaacuacgauaacgccggaaccaaccucuacaacgaacuagaaaugaacuacuacggaaaacaggaaaacugguacucccucaaaaaaaacucccgcucgcucggcgaaaacgacgacggcaacaacaacaacggcgacaacggccgggaaggcaaagacgaagacaaacgagacggaaacaacgaagauaacgaaaaacuccguaaacccaaacauaagaagcucaaacaacccgucgacggcaacccagacccaaacgccaaccccaacgucgaccccaacgcaaaccccaacgucgaccccaacgccaaccccaacgucgaccccaacgccaaccccaaugcuaacccaaacgcaaaucccaacgcaaaccccaacgccaacccgaacgccaaccccaacgccaaccccaacgccaacccgaacgccaacccaaacgcaaacccaaacgccaaccccaacgccaaccccaacgcaaacccaaacgcaaacccaaacgccaaccccaacgcaaacccaaacgcaaacccaaacgcaaaccccaacgcaaacccaaacgcgaacccaaacgccaacccuaacgccaacccaaacgccaacccaaacgcuaacccgaacgccaacccaaacgcuaaccccaacgcaaacccaaacgcaaacccaaacgccaaccccaacgccaacccuaacgcgaacccgaacgccaaccccaacgccaaccccaacgcaaaccccaacgcgaaccccaacgcaaacccaaacgcaaaccccaacgcaaacccaaacgccaaccccaacgccaacccaaacaaaaacaaccaaggcaacggccaaggccacaacaugcccaacgacccaaaccgcaacgucgacgaaaacgcaaaugcaaacaacgccgucaaaaacaacaacaacgaagaacccuccgacaaacacaucgaacaauaccucaaaaagauccaaaacucacucucgaccgaguggucacccuguuccguaaccugcggcaacggaauccaaguccgcaucaaaccaggauccgccgacaaacccaaagaccaacuagacuacgaaaacgacauagaaaaaaaaaucugcaaaauggaaaaaugcagcucaguauucaauguagucaacucguccaucggacuuauaauggugcuaucauuucuauuccucaacuaa

SEQ ID NO: 5757 - RNA, 1299 nt, Artificial Sequence
  derived and/or modified CDS sequence (opt11) from Pf(PVS20)__BAN59429.1__CSP
augaugcgcaaacuagccauccuauccguaucuucauuccuauucgucgaagcccucuuccaagaauaccaaugcuacggaagcucaucuaacacccgagucuuaaacgaacucaacuacgacaacgcaggaaccaaccucuacaacgaacuggaaaugaacuacuacggcaaacaagaaaacugguacagccugaaaaaaaacucgcgcucccuaggcgaaaacgacgacggcaacaacaacaacggagacaacggcagagaaggcaaagacgaagacaaacgcgacggcaacaacgaagacaacgagaaacuucgcaaaccaaagcauaaaaaauugaaacaacccggagacggcaacccagacccaaacgcgaaccccaacgucgaccccaacgcaaaccccaacguagacccgaaugccaacccaaacguagauccaaacgcaaaccccaacgccaacccaaacgccaaccccaacgcaaacccaaacgcaaacccaaacgcaaaccccaacgcaaaccccaaugcaaacccaaacgcaaaucccaaugcaaacccaaacgccaaccccaacgccaauccuaacgcgaacccgaacgcaaaccccaacgcaaaccccaacgccaaccccaacgccaaccccaacgccaaccccaacgcaaacccaaacgcaaaccccaacgcaaaccccaacgccaacccaaacgcaaaccccaacgcgaaccccaacgccaaccccaacgccaacccgaacgccaaccccaacgcgaaccccaacgcaaacccaaacgccaacccgaacgccaacccgaacgcaaacccaaacgcgaaccccaacgccaaccccaacgccaacccaaacgcaaacccaaacgccaaccccaacgccaacccaaacgccaacccaaacgccaacccaaauaaaaacaaccaagggaacggccaaggccacaauaugcccaacgaucccaaccgcaacgucgaugaaaacgccaacgccaacaacgcagucaagaacaacaacaacgaagaacccucggacaaacacauagaacaguaccuaaaaaaaauccaaaacucacucuccaccgaauggucacccugcuccgucaccugcggaaacggcauccaaguccgcauuaaacccggcucagccaacaaaccaaaagacgaacuagacuacgaaaacgacauagaaaaaaaaaucuguaaaauggagaaaugcuccucugucuucaacgucgucaacagcucaaucggccucauaaugguacuaucauuucuauuccuaaacuag

SEQ ID NO: 5758 - RNA, 1299 nt, Artificial Sequence
  derived and/or modified CDS sequence (opt11) from Pf(Sol95-241)__BAM85085.1__CSP
augaugcgaaaacuugcaauccucuccgucucuuccuuccucuucgucgaagcccuauuccaagaauaccaaugcuacggcagcucaagcaacacccgaguacucaacgaacuaaacuacgauaacgcaggcaccaaccucuacaacgaacucgaaaugaacuacuacggcaaacaagaaaacugguacucccucaaaaaaaacucaagaucacuaggcgaaaacgacgacggcaacaacaacaacggagacaacggccgcgaaggcaaagacgaagacaaacgggacggcaacaacgaagacaacgaaaaacuccgcaaaccaaaacauaagaaacucaaacaacccggggacggcaaccccgaccccaacgcaaaccccaacguggacccuaacgccaauccaaacgucgaccccaacgcuaaccccaacguagacccaaacgccaacccaaacguagaccccaacgcaaacccaaacgcaaacccaaacgcaaaccccaacgcaaacccaaacgccaaccccaacgcaaacccaaacgccaaccccaacgccaaccccaacgcgaaccccaacgccaaccccaacgcaaaccccaacgccaaccccaacgcuaacccgaacgcgaacccaaacgccaaccccaacgccaaccccaacgccaacccgaacgccaacccgaaugccaaccccaacgccaaccccaaugcgaaccccaacgccaacccaaacgcaaaccccaacgccaacccaaacgccaacccaaacgccaacccaaacgccaacccaaacgcaaacccgaacgcaaaccccaacgcaaaccccaacgccaaccccaacgcaaaccccaaugccaaccccaacgcgaaccccaacgccaaccccaacgccaacccaaacgccaaccccaacgccaaccccaacaaaaacaaccaagguaacggccaaggccacaacaugccaaaugaccccaaccgcaacgucgacgaaaacgccaacgccaacaacgcaguaaaaaacaacaacaacgaagagcccuccgacaaacacaucgaacaauaucucaaaaaaauccaaaacucucucuccaccgaauggucgcccugcuccguaaccugcggcaacggaauccaaguccgaaucaaacccggcucugccaacaaacccaaagacgaacucgacuacgaaaacgacaucgaaaaaaaaauuugcaaaauggagaaaugcuccucggucuucaacguaguaaacuccucgaucggccucaucaugguccuaucauuccucuuccuuaacuaa

SEQ ID NO: 5759 - RNA, 1299 nt, Artificial Sequence
  derived and/or modified CDS sequence (opt11) from Pf(TiMS95-198)__BAM84895.1__CSP
augaugagaaaacuagccauacuaucgguuucauccuuccuauucgucgaagcccucuuccaagaauaccaaugcuacggaagcuccucaaacacacguguccucaacgaacucaacuacgacaacgccggaacuaaccuauacaacgaacucgaaaugaacuacuacggaaaacaagaaaauugguacagccucaagaaaaacagucgaucccucggcgaaaacgacgacggcaacaacaacaacggagacaacggacgcgaaggaaaagacgaagacaaacgcgacgguaacaaugaagacaacgaaaaacuccgcaaaccuaaacacaagaaacucaaacaaccaggcgacggcaacccagaccccaacgcaaaccccaacgucgacccuaacgcaaaccccaacguagaccccaacgccaacccaaacgucgaccccaacgccaaccccaacgccaacccaaacgcaaaucccaacgcaaaccccaacgccaacccaaacgcuaaccccaacgccaaccccaacgccaaccccaacgccaaccccaacgccaaccccaacgcaaaccccaacgcaaaccccaacgcaaaccccaacgcaaacccaaacgcaaauccaaacgcuaaccccaacgccaacccaaacgccaaccccaacgcaaaccccaacgccaacccaaacgccaaccccaacgccaacccgaacgccaacccaaacgccaacccaaaugccaaccccaacgccaacccaaaugcaaaccccaacgccaauccaaacgccaaccccaacgccaaccccaacgccaaccccaacgccaaccccaacgccaaccccaacgcaaaccccaacgccaaccccaacgccaaccccaacgccaauccgaacgcaaaccccaacgccaacccaaacgcaaacccaaacaaaaacaaccaaggcaacggacaaggccacaacaugcccaacgaccccaaccgcaacgucgacgaaaacgccaacgcaaacaacgcagucaaaaacaacaacaacgaggaacccucagacaaacacaucgaacaauaccuaaagaacauccaaaacucacucucaacugaguggucccccugcucagucacaugcggcaacggcauccaaguccgaaucaaaccaggaucagccaacaaacccaaagacgaacucgacuacgaaaacgacauagaaaagaaaauuugcaaaauggaaaaaugcuccuccguauucaacguagucaacagcuccaucggacucauaaugguacucuccuuccucuuccugaacuag

SEQ ID NO: 5760 - RNA, 1296 nt, Artificial Sequence
  derived and/or modified CDS sequence (opt11) from Pf(D164)__ACO49368.1__CSP
augcgcaaacucgccauacucuccguuuccuccuuccucuucgucgaggcccuauuccaagaauaccaauguuacgguuccuccucaaacacacgaguacuaaacgaacucaacuacgauaacgccggcaccaaccuauacaacgaacucgaaaugaacuacuacggcaaacaagaaaacugguauucccucaagaaaaacucaaggucacucggcgaaaacgacgacggcaacaacaacaacggagacaacggcagggaaggaaaagacgaagacaaacgcgacggcaacaacgaagacaacgaaaaacucagaaaacccaaacacaagaaacuaaaacagcccggcgacgggaaccccgaccccaacgccaauccaaaugucgaccccaacgccaacccgaacgucgacccuaacgccaaccccaacguagacccaaacgccaaccccaacgucgacccuaacgccaaccccaacgccaaccccaacgcgaacccaaacgcgaaccccaacgccaacccuaacgccaacccaaacgcaaaucccaacgccaaccccaacgcuaaccccaacgccaacccaaacgccaacccgaacgcaaaccccaacgcaaaccccaacgccaacccaaacgccaacccaaacgcaaacccaaacgcaaacccgaacgccaaccccaacgccaacccuaacgccaaccccaacgcuaaucccaacgccaacccaaacgcaaaccccaacgccaacccgaacgcaaacccaaacgccaaccccaacgccaaccccaacgccaaccccaacgccaaccccaacgcgaacccaaacgcaaaccccaacgcaaacccaaacgccaacccaaacgcaaaccccaacgcaaaccccaacgccaacccaaacgcaaaccccaacgccaaccccaacaaaaacaaccaaggcaacggccaaggccacaacaugccaaacgacccuaaccgaaacgucgaugaaaacgccaacgcaaacaaugcagucaaaaacaacaacaacgaagaacccuccgacaaacacaucgaacaauaccucaaaaagauccaaaacucccucuccaccgaauggucccccugcuccguaaccuguggaaacggaauacaaguccgcauuaaacccggaucagccaacaaaccaaaagacgaacucgauuacgaaaacgacaucgaaaagaaaauaugcaaaauggaaaaaugcagcucuguauucaacgucgucaacagcucaaucggauuaaucaugguccucucguuccuauuccucaacuaa

SEQ ID NO: 5761 - RNA, 1296 nt, Artificial Sequence
  derived and/or modified CDS sequence (opt11) from Pf(E28)__ACO49378.1__CSP
augcggaaacucgccauccucucaguuuccagcuuccucuucgucgaagcccucuuccaagaauaccaaugcuacgggagcuccucaaacacccgcguccugaacgaacucaacuacgacaacgccggcacaaaccucuacaaugagcuagaaaugaacuacuacggaaaacaagaaaacugguacucccucaaaaagaacucccgaucccuaggagaaaaugacgacggcaacaacaacaacggugacaacggccgcgaaggaaaagacgaagacaaacgagacggaaacaacgaagacaacgaaaaacuucgcaaacccaaacacaaaaaacuaaaacagccaggcgacggcaacccagacccgaacgccaacccaaacgucgaccccaacgcaaaccccaacguggaccccaacgccaacccaaacgucgaccccaacgcgaaccccaaugcaaacccaaacgccaaccccaacgcuaaccccaacgcaaacccaaacgccaacccaaacgcaaaccccaacgccaacccgaacgccaacccaaacgccaaccccaacgcaaaccccaacgccaaccccaacgcaaacccaaacgccaaccccaacgcaaaccccaacgccaacccaaacgcaaaucccaacgcaaaccccaacgccaacccaaacgccaaccccaacgccaacccaaaugccaacccaaacgccaaccccaaugccaacccaaacgcaaacccgaacgcaaauccgaacgccaacccaaacgcaaacccaaacgccaacccaaacgcaaaccccaacgccaaccccaacgccaacccaaacgccaaccccaacgcaaauccuaacgcaaaccccaacgccaaccccaacgcaaaccccaacgcaaacccaaacgccaacccaaacgcaaacccaaacaaaaacaaccaaggcaacggacaaggacacaacaugcccaacgacccaaaccgcaacgucgacgaaaacgcaaacgcaaacaacgcagucaaaaacaacaacaacgaagaaccaucagacaaacacaucgaacaauaccucaagaacauccaaaacucccuauccaccgaauggucacccuguagcgucaccugcggcaacggcauccaaguaagaaucaaacccggcucagccaacaaacccaaagacgaacucgacuacgaaaacgacaucgaaaaaaaaauaugcaaaauggaaaaaugcagcucagucuucaacgucgucaacuccucaaucggccucauuaugguacucucauuccucuucuuaaacuaa

SEQ ID NO: 5762 - RNA, 1296 nt, Artificial Sequence
  derived and/or modified CDS sequence (opt11) from Pf(TM121)__ACO49457.1__CSP
augcgcaaacuggcaauccuaucaguaucaucauuccuauucgucgaagcccuauuccaagaauaucaauguuacggcagcagcagcaacaccagaguacuuaacgaacugaacuacgacaacgcaggcacaaaccuauacaacgaacuagaaaugaacuacuacggaaaacaagaaaacugguauucccuaaaaaaaaacucacgaucacuuggcgaaaacgacgacggcaacaacaauaacggagacaacggccgggaagggaaagacgaagacaaacgagacggcaacaacgaagacaacgaaaaacuacgcaaacccaaacacaaaaaacucaaacaacccggagacggcaaccccgaccccaacgccaacccaaacguagacccaaacgccaaccccaacgucgacccgaacgccaacccaaacgucgaccccaacgcaaaccccaacgcaaacccgaacgccaacccaaacgccaaccccaacgcaaacccaaacgcaaaccccaacgcaaacccaaaugcgaaccccaacgcaaaucccaaugccaaccccaacgccaaccccaacgcgaaccccaacgccaacccaaacgccaaccccaacgccaaccccaacgcgaacccgaacgcaaacccaaacgcaaacccgaacgcaaacccuaacgcaaaccccaacgcaaaccccaacgccaaccccaacgcaaacccaaacgccaaccccaaugcaaacccuaacgccaacccuaacgccaaccccaacgccaaccccaacgcaaaccccaacgcaaaccccaacgccaauccgaacgccaaccccaacgccaacccaaacgcgaaccccaacgcgaacccaaacgccaacccaaaugcgaaccccaacgccaaucccaacgccaaccccaacgccaacccaaacaaaaacaaccaaggaaacggacaaggacacaacaugcccaacgacccaaaccgcaacgucgacgaaaacgccaacgcaaacaacgacgucaaaaacaauaacaacgaagaacccucugacaaacacaucgaacaauaccuaaaaaaaauacaauacucccuaucaacagaauggucccccugcuccgucaccugcggcaacggcauccaaguccgcauaaaacccggcuccgccaacaaacccaaagacgaacuagacuacgaaaacgacauagaaaaaaaaauaugcaagauggaaaaaugcucaucugucuucaacguaguaaacuccucaaucggacucaucaugguccucuccuuccucuuccucaacuag

SEQ ID NO: 5763 - RNA, 1296 nt, Artificial Sequence
  derived and/or modified CDS sequence (opt11) from Pf(TM176)__ACO49467.1__CSP
augcggaaacuagccauacucucggucuccagcuuccucuucgucgaagcacuauuccaagaauaccaaugcuacggauccucauccaacacccggguccucaacgaacucaacuacgacaaugccggcacaaaccuauacaacgaacuagaaaugaacuacuacgggaaacaagaaaauugguacucccucaaaaaaaacucccgcucccucggcgaaaacgacgacggcaacaacaacaacggcgacaacggccgcgaaggcaaagacgaagacaaaagagacggaaacaacgaagacaacgaaaaacuccgcaaacccaaacacaaaaaacucaaacaaccaggagacggaaaccccgaccccaacgcaaacccaaacgucgaccccaacgccaaccccaacguagaccccaacgccaacccaaaugucgacccaaacgcaaacccaaacgccaacccaaacgcaaauccaaacgcaaacccaaacgccaaccccaacgcaaaccccaacgcaaaccccaacgcaaaccccaacgccaacccaaacgcgaacccaaacgcuaaccccaacgccaacccaaacgcaaaccccaacgcuaaccccaacgccaacccaaacgccaaccccaacgccaaccccaacgccaacccaaacgccaaccccaacgcuaaucccaacgccaaccccaacgccaaccccaacgccaacccaaacgccaacccaaacgccaacccaaacgcaaaccccaacgcaaaucccaacgccaaccccaacgccaaccccaacgccaacccgaacgccaaccccaacgccaacccaaacgccaaccccaacgcuaaccccaacgccaaccccaacgccaaccccaacgcaaaccccaacgccaaccccaacgccaacccaaacgccaacccaaacaaaaacaaccaaggcaacggucaaggccacaacaugcccaacgacccaaaccgcaacgucgacgaaaacgcaaacgccaacaacgaugucaaaaacaacaacaacgaagagcccucagacaaacacaucgaacaauaccuaaaaaaaauccaauacucacuauccacagaauggucccccugcuccgucaccugcggaaacggcauacaaguccgcaucaaacccggaucagccgacaaaccuaaagaccaauuagacuacgaaaacgacauagaaaaaaaaauuuguaaaauggaaaaaugcucauccguauucaacgucgucaacucaucaauaggccucaucaugguacuauccuuccuauuccucaacuaa

SEQ ID NO: 5764 - RNA, 1296 nt, Artificial Sequence
  derived and/or modified CDS sequence (opt11) from Pf(TSY650)__ACO49541.1__CSP
augcgcaaacucgccauccucuccguuuccuccuuccucuucgucgaagcacucuuccaagaauaccaaugcuacggcuccucgucaaacacccgcguccuuaacgaacucaacuacgauaacgccggcacaaaccucuacaacgaacuagaaaugaacuauuacggcaaacaagaaaauugguacagccucaagaaaaacucccgaucccuaggcgaaaacgacgacggcaacaacaacaacggcgauaacggcagagaaggcaaagacgaagacaaaagagacggcaacaacgaagacaacgaaaaacuccgcaaaccaaaacacaagaaacugaaacaacccggcgacgguaaccccgacccaaacgcaaaccccaacgucgaccccaacgcaaaccccaacgucgaccccaacgcaaaccccaacgucgaccccaacgcaaaccccaacgcuaacccaaacgccaaccccaacgccaaccccaacgcaaacccaaacgcaaaccccaacgccaacccaaacgccaacccgaacgcgaaccccaacgcaaacccgaacgccaauccaaacgcaaaccccaacgccaaccccaacgccaaccccaacgccaaccccaacgccaacccgaacgccaacccaaacgcuaacccaaacgccaaccccaacgccaaccccaacgcaaaccccaacgcaaacccaaacgccaaccccaacgccaacccuaacgccaacccaaacgcaaacccgaacgccaaccccaacgccaaccccaaugccaacccaaacgcaaaccccaacgcaaaccccaacgccaacccuaacgccaacccaaaugccaaccccaacgccaacccaaacgccaaccccaacgcuaacccaaaugccaaccccaacgcaaaccccaacgccaacccaaacaaaaacaaccaaggaaacggccaaggccacaacaugcccaacgaccccaaccgcaacgucgacgaaaacgccaaugccaacaacgccgucaaaaacaacaacaacgaagaacccuccgacaaacacaucgaacaauaccucaagaaaauccaaaacucccucucaacagaauggucccccugcuccguaaccugcggcaacggcauacaaguacgcauaaaacccggcucagccaacaaaccgaaagacgaacucgacuacgaaaacgacauagaaaagaaaauuugcaaaauggaaaaauguagcuccguauucaacguagucaacucaucaauuggccucauaaugguucucuccuuccucuuccucaacuaa

SEQ ID NO: 5765 - RNA, 1296 nt, Artificial Sequence
  derived and/or modified CDS sequence (opt11) from Pf(TSY682)__ACO49544.1__CSP
augcgaaaacucgccauccucucaguauccagcuuccucuucgucgaagcccuauuccaagaauaucaaugcuacggcuccucaucaaacacccgcguccuaaacgagcucaacuacgacaacgccggcacaaaccuauacaacgaacucgaaaugaacuacuacgggaaacaagaaaacugguacucccuaaaaaaaaacucccgcucccucggcgaaaacgacgacggaaacaacaacaacggagacaacggacgggaaggaaaggacgaagacaaacgcgacggcaauaacgaagacaacgaaaaauugcgcaaacccaaacacaaaaaacucaaacaaccaggcgacggaaaccccgacccaaacgcaaaccccaacguugacccaaacgccaacccaaacguagacccaaacgcgaacccaaacguagaccccaacgccaacccaaacgcaaaccccaacgccaaccccaacgcaaaccccaacgccaaccccaacgccaaccccaacgcaaaucccaacgcaaaccccaacgccaacccaaacgccaaccccaacgcaaaccccaacgcgaacccaaacgcaaacccaaacgccaaccccaacgccaaccccaacgcaaaccccaacgcaaaccccaacgcaaacccaaacgcaaaccccaacgccaaccccaacgcaaaccccaacgccaacccaaacgcaaaccccaacgccaaccccaacgcgaacccaaacgccaacccgaacgccaacccgaaugcaaaccccaacgccaacccaaacgccaacccaaacgcaaaccccaacgccaacccaaacgcaaacccaaacgcaaacccaaacgcaaaccccaacgcaaaccccaacgcaaaccccaacgccaaccccaacgccaaccccaacgccaaccccaacaaaaacaaccaaggcaacggacaaggccacaacaugcccaacgaccccaaccgcaacgucgacgaaaacgcaaacgcaaauaacgacgucaaaaacaacaacaacgaggaacccucggacaagcacaucgaggaauaccuaaaaaaaauccagaacucccucuccaccgaauggucaccaugcuccgucacuugcggcaacggcauacaagugcgaaucaaacccggcucagcuaacaaacccaaagacgaacucaacuacgaaaacgacauagaaaaaaaaaucugcaaaauggaaaaauguagcucagucuucaacgucgucaacuccucgaucggacucaucaugguccucucauuccuauuccuuaacuaa

SEQ ID NO: 5766 - RNA, 1287 nt, Artificial Sequence
  derived and/or modified CDS sequence (opt11) from Pf(India)__AAN87575.1__CSP
augaugagaaaacucgccauccucucggucuccuccuuccucuucguagaagcacuauuccaggaauaccaaugcuacggauccuccuccaacacacgaguccugaacgaauuaaacuacgacaacgcaggcaccaaccuauacaacgaacucgaaaugaacuacuacggcaaacaagaaaacugguacucccuaaaaaaaaacucccguucccuaggcgaaaacgacgacggaaacaacaacaacggcgacaacggccgggaaggcaaagacgaagacaaaagagacggcaacaacgaagacaacgaaaaacucaggaaacccaaacacaaaaaacucaaacaacccggggacggaaacccagacccaaacgccaacccaaacgucgaccccaacgcaaacccaaacguagaccccaacgccaaccccaacgcaaaccccaacgccaacccaaacgccaacccuaacgcaaaccccaacgccaacccgaacgccaaccccaacgcaaaccccaacgcaaaccccaacgccaaccccaacgccaaccccaacgccaaccccaacgcgaacccgaaugcgaaccccaacgccaaccccaacgcaaacccgaacgcaaaccccaacgccaaccccaacgccaacccaaacgccaaucccaaugcaaaccccaacgccaaccccaacgccaacccaaacgccaacccaaacgcaaacccaaacgcaaaccccaacgcaaaccccaacgccaacccaaacgcgaacccaaacgcaaaccccaacgccaaccccaacgccaaucccaacgcaaaccccaacgccaacccgaacgccaaccccaacgcaaacccaaacgcaaacccaaacgcaaacccaaacgccaacccgaacgcaaacccaaacgcaaaccccaacaaaaacaaucaaggaaacggccgaggccacaacaugccgaacgaccccaaccgcaacgucgacgaaaacgccaacgccaacaacgacgucaaaaacaacaauaaugaagaacccucagacaaacacauugaagaauaccucaaaaaaauccagaacucucucuccaccgaaugguccccaugcuccgucaccugcggcaacggaauacaaguaagaaucaaaccaggcucugccaacaaaccaaaagacgaacucaacuacgaaaacgacauagaaaagaaaaucugcaagauggagaaaugcagcucggucuucaacguaguaaauuccucaaucggacucauaaugguccuuuccuuccuuuuccucaacuaa

SEQ ID NO: 5767 - RNA, 1287 nt, Artificial Sequence
  derived and/or modified CDS sequence (opt11) from Pf(Pal97-082)__BAM84946.1__CSP
augaugagaaaacucgccauccucuccgucuccuccuuccuuuucgucgaagcccuauuccaagaauaccaaugcuacggcucaucaagcaacacacgcguucuaaacgagcucaacuacgacaacgccggcacaaaccucuacaacgaacuggaaaugaacuacuacggcaaacaagaaaacugguacagccuaaaaaaaaacucccgcucccucggagaaaacgacgacggcaacaacaacaacggcgacaacggccgcgaaggcaaagacgaagacaaacgagacggcaacaacgaagacaacgagaaacuacgaaagccaaaacacaaaaaacugaaacaaccaggcgacggaaacccagacccaaacgcaaaccccaacgucgacccaaacgcaaacccaaacgucgacccaaacgccaacccgaacguggacccaaacgccaaccccaacgcaaaccccaacgcaaacccgaacgcaaauccgaacgcaaacccaaacgcaaacccaaacgcuaacccaaacgcaaaccccaacgcaaacccaaacgcaaaccccaacgccaaccccaacgcaaaccccaacgccaacccaaaugccaaccccaacgccaaccccaacgcaaacccaaacgcaaacccgaacgccaaccccaacgcaaacccaaacguagaccccaacgccaacccaaacgccaaccccaacgcaaacccaaacgccaacccaaaugccaacccaaacgcaaaccccaacgccaaccccaacgccaacccaaacgccaaccccaacgcaaaccccaacgccaaccccaacgccaacccgaacgccaacccgaacgccaaccccaacgcgaaccccaacgccaacccaaaugcgaacccaaacgcaaacccaaacgcgaacccaaacaaaaacaaccaaggcaacggacaaggacacaacaugcccaacgaccccaaucgaaacgucgacgaaaacgccaacgccaacaacgcggucaaaaacaacaacaacgaagaaccauccgacaaacacauagaacaauaccugaaaaaaauccaaaacucccuuuccacagaauggucccccugcagcguaacaugcggcaacggcauacaaguccgaauaaaaccgggcuccgccggaaaauccaaagacgaacuggacuacgaaaaugacaucgaaaaaaaaaucugcaaaauggaaaaaugcagcuccguauucaacguggucaacagcuccauaggacucaucaugguacucucauuccuauuccucaacuaa

SEQ ID NO: 5768 - RNA, 1287 nt, Artificial Sequence
  derived and/or modified CDS sequence (opt11) from Pf(Pal97-084)__BAM84947.1__CSP
augaugcgaaaacucgccauacucucagucuccagcuuccuuuucgucgaagcccuuuuccaagaauaccaaugcuacggcagcucaagcaacaccaggguccucaacgaacucaacuacgacaacgccggcacgaaucuauacaacgaacuugaaaugaacuacuauggcaaacaagaaaacugguacucccucaaaaagaacucacgcucccuaggcgaaaacgacgacgguaacaacaacaacggcgacaacggccgggaaggaaaagacgaagacaaacgcgacggaaacaacgaagacaacgaaaaacuccgcaaaccaaaacacaagaaacucaaacaacccggcgacggcaaccccgaccccaacgccaaccccaacguagaccccaacgccaaccccaacguagaccccaacgccaaccccaacgucgacccaaacgcgaaccccaacgccaaccccaacgccaaccccaacgccaacccaaacgccaacccaaacgccaaccccaacgccaacccaaacgccaacccuaacgcaaacccgaaugccaacccgaacgccaaccccaacgcaaacccaaacgccaacccaaacgcaaaccccaacgccaaccccaacgccaaccccaacgccaaccccaacgcaaacccaaacgccaaccccaacgcaaacccaaacgccaaccccaacgcaaacccaaacgccaaccccaacgcaaaccccaacgcgaacccaaacgccaacccgaacgcaaaccccaacgcaaaucccaacgcaaaccccaaugcaaaccccaaugccaacccaaacgcaaacccgaaugccaacccuaacgccaacccaaacgccaaccccaacgccaacccaaacgccaaccccaacgcaaaccccaacgccaaccccaacaaaaacaaccaaggcaacggacaaggccacaacaugcccaaugaccccaaccgcaacgucgacgaaaacgccaacgccaacaacgccgucaaaaacaacaacaacgaagaacccuccgaccaacacauagaaaaauaccuaaaaauaauccaaaacucucucucaacagaauggucccccugcagcguaaccugcggcaacggcauccaaguccgcaucaaaccaggaucagcagacaaacccaaagaccaacucgacuaugccaacgacauagaaaagaaaaucugcaaaauggaaaaaugcucaucaguauuuaacgucguaaacuccucaaucggccucaucaugguacugucauuccucuuccucaacuaa

SEQ ID NO: 5769 - RNA, 1287 nt, Artificial Sequence
  derived and/or modified CDS sequence (opt11) from Pf(PFS54)__BAN59412.1__CSP
augaugagaaaacuagccauccucucugucucaucauuccucuucgucgaggcacucuuccaagaauaccaauguuacgggagcucgucaaacacaagaguccugaacgaacucaacuacgacaacgcaggcacaaaccucuacaacgaacucgaaaugaacuacuacgguaaacaggaaaacugguacagccugaagaaaaacucacgcucccuaggcgaaaacgacgacggcaauaacaacaacggcgacaacggccgcgaaggcaaagacgaagacaaacgagacggcaacaacgaagacaacgaaaaacuacgaaaaccaaaacacaagaaacuaaaacaacccggcgacgacaaccccgacccaaacgccaacccaaacgucgaccccaacgccaaccccaacguugaccccaacgcaaaucccaacgcaaaucccaacgccaaccccaacgcaaaccccaacgccaacccaaacgccaacccaaacgccaaccccaacgccaacccuaacgcaaaccccaacgccaacccaaacgccaacccaaacgcaaacccuaacgcaaaccccaacgccaaccccaacguggaccccaaugcaaacccaaacgcaaaccccaacgcaaaccccaacgccaaccccaacgccaaccccaacgcaaaccccaacgccaacccuaacgcgaacccuaacgcaaaccccaacgccaaccccaacgccaaccccaacgccaaccccaacgccaaccccaacgccaacccgaacgcaaacccaaacgccaaccccaacgcaaacccgaacgccaaccccaacgccaacccgaacgcaaacccaaacgcaaaccccaacgcaaaccccaacgccaacccaaacgccaaccccaacgcaaacccaaacgcaaacccaaacaaaaacaaccaaggcaacggacaaggucacaacaugcccaacgaccccaaccgcaacgucgacgaaaacgccaacgcaaacaaugcaguaaagaacaacaacaacgaagaacccuccgacaaacacaucgaacaauaccucaaaaagauccaguacucccuaucgaccgaaugguccccaugcagcgucacuugcggcaacggcauccaaguccgaauaaaaccaggcuccgcagacaaacccaaagaccaacuugacuacgaaaacgacauagaaaagaaaauaugcaaaauggaaaaaugcagcucaguauucaacgucgucaacuccuccauaggccucaucaugguacucuccuuccuguuccuaaacuaa

SEQ ID NO: 5770 - RNA, 1287 nt, Artificial Sequence
  derived and/or modified CDS sequence (opt11) from Pf(PFS79)__BAN59422.1__CSP
augaugcgaaaacuagccauacuauccgucucaagcuuucucuucgucgaagcccuguuccaggaauaccaaugcuacggcagcuccucuaacaccagagucuuaaacgaacuaaacuacgacaacgccggcaccaaccucuauaacgaacucgaaaugaacuacuacggcaaacaagaaaacugguacucacugaaaaaaaacucacgcucgcucggagaaaacgacgacggcaacaacaacaacggugacaacggccgggaaggaaaagacgaagacaaacgcgacggaaacaacgaagacaacgagaaacuacgaaagcccaaacacaaaaaacucaaacaacccggagacggaaacccagaccccaacgccaacccaaacgucgaccccaacgccaacccaaacgucgaccccaacgcaaacccaaacgucgacccaaacgccaaccccaacgcaaacccaaacgccaaccccaacgccaauccuaacgcaaaccccaacgcaaacccaaacgcaaacccaaacgccaacccaaacgcgaacccaaacgcaaacccaaacgcaaacccaaacgcaaacccaaacgccaaccccaacgccaaccccaacgccaacccuaacgccaacccaaacgccaacccaaacgcaaaccccaacgcaaaccccaacgcgaacccgaacgccaaccccaacgccaacccaaacgccaaccccaacgcaaaccccaacgcaaaccccaacgccaaccccaacgccaaccccaacgcaaaccccaaugccaaccccaacgcuaaccccaacgccaaccccaacgcaaaccccaacgccaacccaaacgccaaucccaacgccaaccccaacgcaaacccaaacgccaacccuaacgccaacccuaacgccaaccccaacaaaaacaaccaaggcaacggacaaggccacaacaugcccaacgaccccaaccgcaacgucgacgaaaacgcaaacgcaaacaacgccgucaaaaacaacaacaacgaagaaccuuccgacaagcacauagaacaauaccuaaaaaaaauccaaaacucccucuccaccgaauggucccccugcagcgucaccuguggaaacggcauacaaguccgaaucaaaccaggcuccgccaauaaacccaaagaugaacucgacuacgaaaacgacaucgaaaaaaaaaucugcaaaauggaaaaauguagcagcgucuucaacgucgucaacagcucaauuggcuuaaucaugguccucuccuuccucuuccucaacuaa

SEQ ID NO: 5771 - RNA, 1287 nt, Artificial Sequence
  derived and/or modified CDS sequence (opt11) from Pf(PFS83)__BAN59424.1__CSP
augaugagaaaacuggcuauccucucaguaagcagcuuccucuucgucgaagcacuauuccaagaauaccaaugcuacggauccucaagcaacacccgaguccuaaacgaacucaacuacgacaacgccggcacaaaucucuacaacgaacuagaaaugaacuacuacggcaaacaagaaaacugguacucacuaaaaaaaaacucccguucacucggugaaaacgacgacggaaauaacaacaacggugacaacggccgagaaggaaaagacgaagacaaaagagacggcaauaacgaagacaacgaaaaacuccgcaaacccaaacacaagaaacuaaaacaaccaggagacggcaaccccgaccccaaugccaaccccaacgucgaccccaacgccaacccaaacgucgaccccaacgccaaccccaacgucgaccccaacgcaaaccccaacguagauccaaacgcuaacccaaacgccaaucccaacgcaaacccaaacgcaaacccaaacgccaacccaaacgcaaaccccaacgccaacccgaacgcaaaucccaacgcaaaccccaacgcaaaccccaacgcaaaccccaacgccaaccccaacgcgaacccgaacgcaaaccccaacgcaaaccccaacgccaacccaaacgcuaaccccaacgccaaccccaacgcaaaucccaacgccaaccccaacgccaaccccaacgcaaaccccaacgcaaacccaaacgccaaccccaacgcaaaccccaacgcaaacccaaacgccaacccaaacgccaaccccaacgcgaaccccaacgcaaaccccaacgcaaacccaaacgccaaccccaacgccaaccccaacgcaaaccccaacgcaaauccaaacgcuaacccaaacgccaaccccaacaagaacaaccaaggaaacggccaaggccacaacaugcccaacgaucccaaccgaaacgucgacgaaaacgccaacgcaaacaacgcagucaaaaacaacaacaacgaagaacccucggauaaacacauagaacaauaccucaaaaaaauccaaaacucacuauccaccgaguggucacccugcagcgugaccugcggaaacggcauacaaguccgaauaaaaccaggcucagccaacaaacccaaagaugaacuggacuacgaaaacgacaucgaaaaaaaaaucugcaaaauggaaaaaugcagcuccguauucaacguaguaaacuccucaaucggacucaucauggucuuauccuuccuauuccucaacuaa

SEQ ID NO: 5772 - RNA, 1287 nt, Artificial Sequence
  derived and/or modified CDS sequence (opt11) from Pf(TiMS95-112)__BAM84878.1__CSP
augaugcggaaacucgccauacucuccgucuccagcuuccucuucgucgaagcccuauuccaagaauaccaaugcuacggaagcuccuccaacacccgaguccuaaacgaacucaacuacgacaacgccggaacaaaccucuacaacgaacuagaaaugaacuacuacggcaaacaagaaaacugguacucccuaaaaaaaaacucccguucgcuaggagaaaacgacgacggcaacaacaacaacggagacaacggccgggaaggcaaagacgaagacaaacgcgacggcaacaacgaagacaacgaaaaacuccgaaaacccaaacacaaaaaacucaaacagcccggagacggaaaccccgaccccaacgcaaaccccaacguggaccccaacgccaacccaaauguagacccaaacgcaaacccaaacgucgacccaaacgccaacccaaacgccaaccccaacgccaaccccaacgcaaaucccaacgccaaccccaacgccaaccccaacgccaaucccaacgccaacccgaacgcaaaccccaacgccaacccaaacgccaaccccaacgccaaccccaacgccaacccgaacgccaauccaaacgcaaacccaaacgccaauccgaacgcaaacccaaacgccaacccaaacgcaaaccccaacgccaaccccaacgcaaaccccaacgccaacccgaacgccaaucccaacgcaaacccaaacgccaaccccaacgccaaccccaacgccaaccccaacgccaaccccaacgccaaccccaacgccaacccaaacgcaaaccccaacgccaaccccaacgcaaacccaaacgcaaacccaaacgccaacccaaacgcaaaccccaacgcaaaccccaacgccaacccaaacgcaaacccgaacaaaaacaaccaaggaaacggccaaggccacaacaugcccaacgaccccaaccgcaacgucgacgaaaacgcaaacgccaacaacgacgucaaaaacaauaacaacgaagaacccucagacaaacacauagaacaauacuuaaaaaaaauccaauacucccuaucaacagaguggucgcccugcucggucaccuguggaaacggaauacaaguccgaaucaaacccggcucggccgacaaacccaaagaccaacuagacuaugaaaacgacaucgaaaagaaaauaugcaagauggaaaaaugcagcucagucuucaacgucgucaacuccucaaucggccuaauaaugguccucucuuuccuguuccuaaacuaa

SEQ ID NO: 5773 - RNA, 1284 nt, Artificial Sequence
  derived and/or modified CDS sequence (opt11) from Pf(E103)__ACO49384.1__CSP
augcgaaaacucgccauccuauccgucuccagcuuccuuuucgucgaagcccucuuccaagaauaccaaugcuacggcuccucauccaauaccagaguccuaaacgaacucaacuacgacaacgccggaacaaaccucuacaacgaacucgaaaugaacuacuacggcaaacaagaaaacugguacucccucaaaaaaaacucgcgcucccucggcgaaaacgaugacggcaacaacaacaacggggacaauggccgcgaagggaaagacgaagacaaaagagacggaaauaacgaagauaacgaaaaacugcgcaaacccaaacacaaaaaacucaaacaaccaggagacggaaacccugaccccaacgccaacccaaacguagacccaaacgcaaaccccaacguagaccccaacgccaaccccaacgucgaccccaacgcaaaccccaacgccaacccuaacgccaaccccaacgccaaccccaacgcaaaccccaacgcaaaccccaacgccaaccccaacgcaaaccccaacgcaaaccccaacgccaaucccaacgcaaacccaaacgcaaaccccaacgccaaccccaacgcgaaccccaacgccaacccaaacgcgaaccccaacgccaacccgaacgccaacccaaacgcgaaccccaacgccaacccaaacgcaaacccaaacgccaacccaaacgcaaacccaaacgccaacccaaacgcaaaccccaacgccaaccccaacgcuaaccccaacgccaaccccaacgcuaaccccaacgcaaacccaaacgccaacccaaacgccaacccaaacgccaaccccaacgccaaccccaacgccaaccccaacgcuaacccaaacgccaacccaaacgccaacccgaacgccaaccccaacaaaaacaaucaaggaaauggccaaggacacaacaugcccaacgaccccaaccguaacgucgacgaaaacgccaacgccaacaacgcggucaagaacaacaacaacgaagaacccucggacaagcacaucgaacaguaccucaaaaacauccaaaacucccuaucaaccgaguggucacccugcucaguaaccugcggcaacggcauacagguccgaaucaaacccggcuccgccaacaaaccaaaagacgaacucgacuacgaaaacgauauagaaaaaaaaauaugcaaaauggaaaaaugcucuuccgucuuuaaugucgucaacagcuccaucggccucaucaugguccuauccuuccucuuccuaaacuaa

SEQ ID NO: 5774 - RNA, 1284 nt, Artificial Sequence
  derived and/or modified CDS sequence (opt11) from Pf(TMS75)__ACO49490.1__CSP
augcgcaaacucgccauccuauccguuuccuccuuccuuuucguagaagcccucuuccaagaauaccaaugcuacggguccucaucaaacacccgaguacuuaacgagcucaacuacgacaacgcaggcacgaaccuauacaacgaacuagaaaugaacuacuacgguaaacaagaaaacugguacagccucaaaaaaaacucgcgcucccucggagaaaacgacgacggcaacaacaacaacggagacaacggaagagaaggcaaggacgaagacaaaagagacggcaacaacgaagauaaugaaaaacugcgcaaacccaaacacaagaaacucaaacaacccggagacggcaaccccgaccccaacgccaacccaaacguagaccccaacgccaaccccaacguagaccccaacgccaacccuaaugucgacccaaacgccaaucccaacguggaccccaacgccaacccaaacgcaaaccccaacgcaaacccaaacgccaacccaaacgcaaauccaaacgccaacccaaacgccaaccccaacgccaaccccaacgccaacccaaacgccaacccgaacgcaaacccaaacgcgaaccccaacgcgaaccccaacgccaaccccaacgccaaccccaacgcaaacccaaacgcgaaccccaacgccaaccccaacgccaacccuaacgccaacccaaacgcgaacccaaacgccaacccaaacgccaacccaaacgcaaacccaaacgcaaaccccaacgccaauccaaacgccaaccccaacgcaaacccgaacgccaacccuaacgcaaacccaaacgcgaaccccaacgcaaacccaaacgccaacccaaacgccaaccccaacgccaaccccaacgccaaccccaacgcaaacccaaacaaaaauaaccaaggaaacggccaaggacacaacaugcccaacgaccccaaccgcaacgucgacgaaaacgccaacgccaacaacgccguaaaaaacaacaacaacgaagaacccuccgacaaacacaucgaacaauaccucaaaaaaauccaaaacucccucuccaccgaauggucgcccuguagcgucacaugcggcaacggcauccaagugcgcauaaaaccaggcucagccaacaaaccaaaagaugaacucgacuacgaaaacgacaucgaaaaaaaaauaugcaaaauggaaaaaugcagcagcgucuucaacguaguaaacuccuccaucggacucaucaugguacucuccuuccuauuccuaaacuaa

SEQ ID NO: 5775 - RNA, 1284 nt, Artificial Sequence
  derived and/or modified CDS sequence (opt11) from Pf(TSY621)__ACO49538.1__CSP
augcgcaaacuagccauccuuuccgucuccagcuuccuauucgucgaagcacucuuccaagaauaccaaugcuacggcagcucauccaacacccgaguacucaacgaacuuaacuacgacaacgcaggcacaaaccuauacaacgaacucgaaaugaacuacuacggcaaacaagaaaacugguacucccucaaaaaaaacucacgcucacucggagaaaacgacgacggcaacaacaacaacggagacaacggccgcgaaggcaaagacgaagacaaaagggacggaaacaacgaagacaacgaaaaacuacgcaagcccaaacacaaaaaacucaaacaacccggagacgggaacccagacccaaacgccaaccccaacgucgacccuaacgccaaccccaacguagacccaaacgccaacccaaacguggaccccaacgcaaacccgaacgcaaaccccaacgcaaaccccaacgccaacccaaacgccaaccccaacgccaaccccaacgccaaccccaacgcgaacccgaacgccaacccaaacgcgaacccaaacgccaaccccaacgccaauccaaacgccaaccccaaugccaacccaaacgcaaaccccaacgcaaacccaaacgccaaccccaacgccaacccgaaugccaacccaaacgcaaaccccaacgccaaccccaaugcaaacccaaacgccaacccaaacgcaaaccccaacgcaaacccaaacgcaaaccccaacgccaacccaaacgccaacccaaacgcaaacccaaacgccaaucccaacgcaaaccccaacgcaaaccccaacgccaacccgaacgcaaaccccaacgccaaccccaacgccaacccaaacgccaaccccaaugccaacccaaacgcuaaccccaacaaaaacaaccaaggcaacggacaaggccacaacaugccgaaugaccccaaccguaacgucgacgaaaacgcaaacgccaacaacgacgucaaaaacaacaacaacgaagaacccuccgacaaacacauagaacaauaccuaaaaaaaauccaauacagccuaucgaccgaguggucccccugcagcgucaccugcggcaacggaauacaaguccgcauaaaacccggcuccgcagauaaacccaaagaccaacuggacuacgaaaacgacaucgaaaaaaaaauaugcaaaauggaaaaaugcuccucaguauucaacguagucaacagcuccauaggccucaucaugguccucucuuuccuguuccucaacuaa

SEQ ID NO: 5776 - RNA, 1284 nt, Artificial Sequence
  derived and/or modified CDS sequence (opt11) from Pf(TSY646)__ACO49540.1__CSP
augagaaaacucgccauccucucagucucauccuuccuauucgucgaagcacuguuccaggaauaccaaugcuacggcucauccagcaacaccagaguacuaaacgaacucaacuacgacaacgcaggaaccaaccuauacaacgaacucgaaaugaacuacuacggcaaacaagaaaauugguacuccuuaaaaaaaaacucccgaucccuaggcgagaacgaugacggcaacaacaacaacggagacaacggaagagaaggaaaagacgaagacaaacgagacggcaacaacgaagacaacgaaaaacugcgcaaacccaaacacaaaaaacucaaacaacccggagacggaaacccagacccuaacgccaaccccaacgucgaucccaacgcaaacccaaacgucgaccccaacgccaaccccaacguggaccccaacgccaacccaaacgccaacccaaacgccaacccaaacgcgaaccccaacgccaacccaaacgcaaacccaaacgccaacccgaacgccaacccaaacgcgaaccccaacgcaaaccccaacgccaacccaaacgccaaccccaacgcgaaccccaacgccaaccccaacgcaaaccccaacgccaacccaaacgccaacccaaacgccaaccccaacgccaacccaaacgccaaccccaacgcaaacccaaacgccaaccccaaugccaaccccaacgccaaccccaacgccaaccccaacgcaaacccaaacgccaaccccaacgcgaacccaaacgccaaccccaacgccaaccccaacgcgaaccccaacgcaaacccaaacgcaaaccccaacgcaaacccaaacgccaacccaaacgccaaccccaacgcgaaccccaacgccaacccaaacgccaacccgaacaaaaauaaccaaggcaacggacaaggccacaacaugccaaacgaccccaaccgaaacgucgaugaaaacgccaacgcaaauaacgcagucaaaaacaacaacaacgaagaaccuucagacaaacacauagaacaauaccuaaaaaaaauacaaaacucccuauccaccgaaugguccccaugcuccguaaccugcggaaacggcauccaaguacgcaucaaacccggcuccgcaaacaaaccaaaagaugaacuagacuacgaaaacgacauagaaaaaaaaauaugcaaaauggaaaaaugcuccucaguauucaacguggucaacuccucaaucgggcucaucauggugcucuccuuccucuuccuaaacuag

SEQ ID NO: 5777 - RNA, 1275 nt, Artificial Sequence
  derived and/or modified CDS sequence (opt11) from Pf(806)__AAA29562.1__CSP
augaugcgcaaacucgccauauuaucggucucaagcuuccuuuucguagaagcccuauuccaagaauaccaaugcuacggcuccucuagcaacacccgaguccuaaacgaacucaacuacgacaacgcggguaucaaccucuacaacgaacucgaaaugaacuacuacggcaaacaagaaaacugguacucccuuaaaaaaaacucccgcucacucggcgaaaacgacgacggcaacaacaacaacggcgacaacggccgagaagggaaagacgaagacaaacgcgacggaaacaacgaagacaacgaaaaacuccgcaaacccaaacacaaaaaacucaaacaacccggcgacggcaaccccgaccccaacgcaaaucccaacguagaccccaacgcaaaccccaacgucgacccaaacgccaaccccaacgucgaccccaacgccaaccccaacgccaaccccaacgcaaaccccaacgccaaccccaacgcaaaccccaacgcuaaccccaacgccaaccccaaugccaaccccaacgccaacccaaacgccaacccaaacgcaaaccccaacgccaaccccaacgcaaacccaaacgcgaaccccaacgcaaaccccaacgccaaccccaacgccaacccaaacgcgaacccaaacgcaaaccccaacgccaaccccaacgccaaccccaacgccaaccccaaugcaaaccccaacgccaaccccaacgcaaaccccaacgccaauccaaacgcuaaccccaacgcaaaccccaacgcaaaccccaacgccaacccgaacgccaacccaaacgcaaaccccaacgcaaaccccaacgcaaaccccaacgccaaccccaacgccaaccccaacgccaaccccaacgccaaccccaacaaaaacaaccaaggcaacggccaaggucacaacaugccgaacgaccccaaccgaaacguagacgaaaacgcaaacgccaacaacgccguaaaaaacaacaacaacgaagaaccauccgacaaacacaucgaacaauaccuaaaaaaaauccaaaacucccucuccaccgaauggucccccuguuccguaaccugcgguaacggaauccaaguacgcaucaaaccuggcuccgcaaauaaacccaaagacgaacucgacuacgaaaacgacauagaaaaaaaaaucugcaaaauggaaaaaugcagcucagucuucaacgucgucaacuccuccaucggccuaaucaugguacucucauuccuguuccucaacuaa

SEQ ID NO: 5778 - RNA, 1275 nt, Artificial Sequence
  derived and/or modified CDS sequence (opt11) from Pf(Pal97-100)__BAM84952.1__CSP
augaugcgaaaacuagccauacuaucgguaucauccuuccucuucguagaagcccuauuccaagaauaccaaugcuauggcuccucauccaauaccagaguucuaaacgaacucaacuacgauaacgccggcacaaaccuuuacaacgaacucgaaaugaacuacuacggcaaacaggaaaacugguauuccuugaaaaaaaacucccgcucccucggagaaaacgaugacggcaacaacaacaacggcgacaacggcagagaaggcaaagacgaagacaaacgcgacgggaacaacgaagacaacgaaaaacuccgcaaacccaaacacaaaaaacucaaacagcccggagacggaaaccccgacccgaacgcaaaccccaaugucgaccccaacgcgaaccccaacgucgacccaaacgcgaaccccaacguagacccaaacgcuaaccccaacgccaaccccaacgccaaccccaacgcaaacccuaacgcaaacccaaacgcaaaccccaacgcaaacccaaacgcaaacccgaacgccaacccaaacgcaaacccaaacgccaaccccaacguagacccaaacgcgaacccaaacgcaaacccaaacgccaaccccaaugcaaaccccaacgccaacccgaacgcaaaccccaacgccaacccaaacgcgaaccccaacgcgaaccccaaugccaacccaaacgcgaacccuaacgcgaacccgaacgccaacccaaacgcgaaccccaacgccaacccaaacgccaaccccaacgccaaccccaacgccaacccaaacgcaaacccgaacgcaaacccgaacgccaacccaaacgcaaaccccaacgccaacccaaacgccaaccccaacgccaaccccaacgcgaaccccaacaaaaacaaccaaggcaacggccaaggccacaacaugcccaacgauccaaaccgaaacgucgaugaaaacgccaacgccaacaacgcagucaaaaacaacaacaacgaagaacccuccgacaaacacaucacagaauaccucaaaaaaauccaaaacucccucuccacagaauggucacccugcagcguaaccugcggaaacggcauacaaguaagaaucaaaccagguucggccggcaaauccaaagacgaacucgacuacgaaaacgacauagaaaagaaaauaugcaaaauggaaaaaugcagcucuguauucaacgucgucaacagcucuaucggccucauaaugguccuuuccuuccucuuccuaaacuaa

SEQ ID NO: 5779 - RNA, 1275 nt, Artificial Sequence
  derived and/or modified CDS sequence (opt11) from Pf(PFS89)__BAN59425.1__CSP
augaugagaaaacucgcaauccucucagucagcagcuuccucuucgucgaagcccucuuccaagaauaccaaugcuacggcagcucaucuaauacccgaguucugaacgaacucaacuacgacaacgccggcaccaaccuauacaacgaacuagaaaugaacuacuacggcaaacaagaaaacugguacagccuuaaaaaaaacucccgcucgcucggagaaaacgacgacgguaacaacaacaacggagacaacggccgagaaggaaaagacgaagacaaacgcgacggcaacaacgaagacaacgaaaaacucagaaagccaaaacacaaaaaacucaaacaaccaggcgacggcaacccagaccccaacgcaaaccccaacgucgacccaaacgcuaacccaaacguagaucccaacgccaaccccaacgucgaccccaacgcaaaccccaacgccaaccccaacgccaaccccaacgcgaacccaaacgcuaaccccaacgcaaaccccaacgcaaaccccaacgcaaaccccaacgccaaccccaacgcaaaccccaacgccaaucccaacgcaaacccaaacgccaaccccaacgccaaccccaacgcaaaccccaacgcaaacccaaacgcaaaccccaacgccaacccaaacgcaaacccaaacgccaaccccaacgccaaccccaacgccaaccccaacgcaaacccaaacgcaaacccaaacgccaacccaaacgccaaccccaacgcaaaccccaacgccaaccccaacgcuaacccaaacgccaaccccaacgcaaacccaaacgccaacccaaacgccaaccccaacgccaaccccaacgccaacccaaacgccaacccaaacgccaaccccaacgcaaacccaaacaaaaacaaucaaggcaacggacaaggccacaacaugcccaacgacccaaaccgcaacgucgacgaaaacgccaacgcuaacaacgcaguaaaaaacaacaacaacgaagaacccucggacaaacacaucgaacaauaccuaaaaaaaauccaaaacucacucucuaccgaaugguccccaugcuccgucaccugcggaaacggaauacaaguccgcauaaaacccggcagcgccaacaaacccaaagaugaacuagacuaugaaaacgacauagaaaaaaaaauuugcaaaauggaaaaaugcuccuccgucuucaacgucgucaacagcucaaucggccucaucaugguacucucauuccucuuccucaacuaa

SEQ ID NO: 5780 - RNA, 1275 nt, Artificial Sequence
  derived and/or modified CDS sequence (opt11) from Pf(PNG912-035)__BAM85007.1__CSP
augaugcgaaaacuagccauccuaagcgucucaagcuuccucuucgucgaggcccuauuccaggaauaccaaugcuacggcagcucuagcaacacccgaguccuaaacgagcucaacuacgacaacgcaggcaccaaccucuacaacgaacuagaaaugaacuacuacggcaaacaagaaaacugguacucccucaaaaagaacucccgcucccucggcgaaaacgacgacggcaauaacaacaacggcgacaacggccgcgaaggcaaagacgaagacaaacgagacggcaacaacgaagacaacgagaaacuacgcaagcccaagcacaaaaaacucaaacaaccaggagacggcaaccccgacccaaacgccaaucccaacguagaccccaacgccaacccaaacguagaccccaacgcgaaccccaacguagacccaaacgccaacccaaacgccaacccaaacgccaacccaaacgccaacccaaaugcaaaccccaacgccaaccccaacgcaaacccaaacgccaacccaaacgccaauccaaacgcaaaccccaacgccaacccgaacgcgaauccaaacgcaaacccuaacgcaaacccuaacgcaaacccaaacgccaacccgaacgcaaaccccaacgcaaaccccaacgucgaccccaacgccaacccgaacgcaaacccgaacgcaaaccccaacgccaacccaaacgcuaacccaaacgcaaacccaaacgcgaacccgaacgcgaaccccaacgcgaacccaaacgccaacccaaacgccaacccaaacgccaacccaaacgccaaccccaacgcuaacccaaacgcaaaccccaacgcaaacccaaacgcgaacccaaacgccaacccuaacgccaaccccaacaaaaacaaccaaggcaacggccaaggacacaacaugcccaacgaccccaaccgaaacgucgacgaaaacgcaaacgccaacaacgcaguaaaaaacaacaauaacgaagaacccucagacaaacacaucgaacaauaccucaaaaaaauccaaaacucacucucaaccgaauggucccccugcuccguaaccugcggcaacggcauccaaguccgcauaaaacccggcuccgccgacaaacccaaagaccaacuagacuacgaaaacgacauagaaaaaaaaauaugcaaaauggaaaaaugcagcucagucuucaacguaguaaacuccucuaucggacuuauaaugguccuaucguuccuauuccuaaacuaa

SEQ ID NO: 5781 - RNA, 1275 nt, Artificial Sequence
  derived and/or modified CDS sequence (opt11) from Pf(Sol95-308)__BAM85089.1__CSP
augaugagaaaacucgccauccucucaguauccagcuuccuauucgucgaagcccucuuccaagaauaccaaugcuacggauccucauccaacacccgcguccucaacgagcuaaacuacgacaacgccggcaccaaccucuacaacgaacucgaaaugaacuacuacggaaaacaagaaaacugguacucccucaaaaaaaacucacgcucacuaggcgaaaaugacgacggcaacaacaacaacggcgacaacggccgagaaggcaaagacgaagacaaacgcgacggaaacaacgaagauaacgaaaaacuccgcaaacccaaacacaagaaacuaaaacagccaggagacggaaaccccgacccaaacgcaaaccccaacguagacccuaacgcaaaccccaacgucgacccgaacgccaaccccaacgucgaccccaacgcaaaccccaacgucgaccccaacgccaaccccaacgcgaaccccaacgccaaccccaacgccaacccaaacgccaacccaaacgcaaacccaaacgccaacccaaacgccaacccaaaugcuaaccccaacgccaaccccaacgcaaacccaaacgccaaccccaacgccaacccaaacgccaaccccaacgccaaccccaacgcaaaccccaacgccaaccccaacgccaaccccaacgcaaacccgaacgcaaacccaaacgccaaccccaaugccaacccaaaugccaaccccaaugccaacccaaacgcaaacccaaaugcaaacccaaacgcuaaccccaacgccaaccccaacgccaaccccaacgcaaacccaaacgccaacccaaacgccaacccaaacgccaaccccaaugccaacccgaacgcgaacccaaacgccaaccccaacaaaaacaaccaaggaaacggccaaggccacaacaugccaaacgacccaaaccgcaacgucgacgaaaacgccaacgccaacaacgccguaaaaaacaacaacaacgaagaacccagcgacaaacacauagaacaauaccucaaaaaaauacaaaacucgcucucaacagaauggucccccugcucagucaccugcggcaacggcauccaaguccgcaucaaacccggcuccgcaaacaaaccaaaagacgaacucgauuacgaaaacgacaucgaaaaaaaaaucugcaaaauggaaaaaugcuccucgguauucaacguagucaacagcuccauaggccuaauaaugguacucuccuuccuguuccucaacuaa

SEQ ID NO: 5782 - RNA, 1275 nt, Artificial Sequence
  derived and/or modified CDS sequence (opt11) from Pf(Sol95-346)__BAM85102.1__CSP
augaugcgcaaacucgcaauccucucagucuccuccuuccucuucgucgaagcccucuuccaagaauaccaaugcuacggcucauccuccaacacccgaguccugaacgaacucaacuacgacaacgcgggcaccaaccucuacaacgaacuagaaaugaacuacuacggcaaacaagaaaacugguacucucucaagaaaaacucacgcucgcuuggagaaaacgacgacggaaacaacaacaacggcgacaacggaagagaaggaaaagacgaagacaaacgggacgggaacaacgaagacaacgagaaacuccgcaaacccaaacacaagaaacuaaaacaacccggcgacggaaacccagacccaaacgcaaaccccaacguagacccaaacgcuaaccccaacgucgacccaaacgcaaaccccaacgucgacccaaacgccaaccccaacgcuaacccaaacgccaaccccaacgccaaccccaacgccaaccccaaugcaaacccaaacgccaacccaaacgcaaacccgaacgccaaccccaacgccaacccaaacgcaaaccccaacgccaauccgaacgccaaccccaacgccaacccaaacgcaaaccccaacgcaaaccccaacgcaaaucccaacgccaaccccaacgucgacccaaacgccaaccccaacgcuaacccaaacgccaaccccaacgcaaaccccaacgcgaaccccaacgccaacccaaacgccaaccccaacgcaaacccaaacgcaaaccccaacgccaaucccaacgcaaacccaaacgcaaaccccaacgcaaaccccaacgcuaacccaaacgcgaaccccaacgcaaacccaaacgcaaaccccaacgccaacccaaacgccaaccccaacaaaaacaaccaaggcaacggccaaggccacaacaugcccaacgaucccaaccgcaaugucgacgaaaacgcaaaugccaacaaugcaguaaaaaacaacaacaacgaagagccaucagacaaacacauagaacaauaucuuaaaaaaauccaaaacucccucuccaccgaauggucacccugcuccgucacaugcggcaacggcauccaaguccgcauaaaaccgggcucagccgguaaauccaaagacgaacuagauuacgaaaacgacauagaaaagaaaauaugcaaaauggaaaaauguagcucagucuucaacgucgucaacagcuccaucggccuaaucaugguccucucauuccucuuccugaacuaa

SEQ ID NO: 5783 - RNA, 1275 nt, Artificial Sequence
  derived and/or modified CDS sequence (opt11) from Pf(T4 Thailand)__AAA29555.1__CSP
augaugcgaaaacucgcaauacucuccgucuccuccuuccuauucguagaagcccucuuccaagaauaccaaugcuauggauccucauccaacaccagaguccucaacgaacucaacuacgacaacgcaggaacaaaccuauauaacgaacucgaaaugaacuacuacggaaaacaggaaaacugguacucccuaaaaaaaaacucccgcucccucggcgaaaacgacgacggcaacaacaacaacggcgacaacaaccgcgaaggaaaagacgaagacaaacgagacgggaacaacgaagacaacgaaacccuacgaaaacccaaacacaaaaaacucaaacaacccggcgacggaaaccccgaccccaacgccaaccccaacguggacccaaacgcaaaccccaacgucgacccaaacgccaacccaaacgucgacccuaacgccaaucccaacgccaacccuaacgcgaacccaaacgcaaacccaaacgccaaccccaacgcaaacccaaacgccaaccccaaugcgaaccccaacgccaacccaaacgccaacccuaacgccaaccccaacgccaaccccaacgccaacccaaacgccaaccccaacgccaaccccaacgccaacccaaacgcaaaccccaacgcaaacccgaacgccaaccccaacgcuaaccccaacgcaaaccccaacgcaaaccccaacgccaaccccaacgccaaccccaacgcaaacccaaacgcaaaccccaacgcgaaccccaacgccaaccccaacgccaaccccaacgccaaccccaacgccaaccccaacgcaaacccuaacgcaaaccccaacgccaacccaaacgcaaacccaaacgcaaaccccaacgcaaacccgaacgccaacccaaacaaaaacaaccaaggcaacggacaagggcacaacaugccaaacgaccccaaccgcaacgucgacgaaaacgccaaugccaacaacgcagucaaaaacaacaacaacgaagagccaucugacaaacacauagaacaguaccucaaaaaaauccagaacucccucucaaccgaauggucccccugcuccguaaccugcggcaacggcauacaagucagaaucaaacccggcagcgccaacaaacccaaagacgaacuugacuacgaaaacgauaucgaaaaaaaaauaugcaagauggaaaaaugcucauccgucuucaacgucgucaacuccucuauaggucucaucaugguacuuuccuuucuguuccuaaacuaa

SEQ ID NO: 5784 - RNA, 1275 nt, Artificial Sequence
  derived and/or modified CDS sequence (opt11) from Pf(Tz03-025)__BAM84798.1__CSP
augaugagaaaacuggccauccuaucggucuccagcuuccucuucgucgaagccuuauuccaagaauaccaaugcuacggcagcucgucaaacacccgcguucuaaacgaacuaaacuacgacaacgcaggaaccaacuuauacaacgaacuagaaaugaacuacuacggcaaacaagaaaacugguacucucucaaaaaaaacucccguucccucggcgaaaacgacgacggcaacaauaacaacggagacaacggccgagaaggaaaagacgaagacaaacgagacggcaacaacgaagacaacgagaaacuucgcaaacccaaacacaaaaaacuaaaacagcccgccgacggcaacccagacccuaacgccaaccccaacgucgacccuaacgccaacccaaacgucgacccaaacgccaaccccaacguagacccaaacgccaacccaaacgcgaaccccaacgccaaccccaacgcaaaccccaacgcaaaccccaacgccaaccccaaugcaaacccaaacgcgaaccccaacgcgaaccccaacgccaacccaaaugccaaccccaacgcaaaccccaacgccaacccaaacgcgaaccccaacgccaaccccaacgcaaacccaaacgcaaacccaaacgccaacccaaacgucgaccccaacgcaaaccccaaugcaaacccgaacgcaaaccccaacgcaaaccccaacgccaaccccaacgccaacccaaacgcaaaccccaacgccaacccgaacgcgaacccgaacgccaacccgaacgccaaccccaacgccaaccccaacgcaaacccaaacgccaaccccaacgcaaacccaaaugccaaccccaacgcaaaccccaacgcaaaccccaacgccaacccaaacaaaaacaaccaaggaaacggacaaggccacaacaugccaaacgaccccaaccgcaacgucgacgaaaacgccaacgccaacaacgcagucaaaaacaacaacaacgaagagcccucagaccaacacauagaaaaauaccucaaaacaauaaaaaacucccucucaacagaauggucacccugcagcgucaccugcggcaacggaauacaaguacgcauaaaacccggaucagccaacaaaccaaaagaccaacucgacuacgccaacgacaucgaaaaaaaaaucugcaaaauggaaaaaugcucauccguuuucaacgucgucaacuccuccaucggacucauaaugguccuauccuuccuauuccucaacuaa

SEQ ID NO: 5785 - RNA, 1272 nt, Artificial Sequence
  derived and/or modified CDS sequence (opt11) from Pf(NR62)__ADF48375.1__CSP
augagaaaacucgccauacuaucaguauccuccuuccucuucguagaagcccuguuccaagaauaccaaugcuacggcuccucaagcaauacccgaguccuaaacgaacucaacuacgacaacgccggcaccaaccucuacaacgaacucgaaaugaacuacuacggaaaacaagaaaacugguacucccucaaaaaaaacucacgcucucucggcgaaaacgacgacgguaacaacaacaauggcgacaacggccgcgaaggaaaagacgaagacaaaagagacggcaacaaugaagacaacgaaaaacuucgcaaaccaaaacacaagaaacucaaacagccaggcgacggcaaccccgacccgaacgcuaacccaaacgucgaccccaacgcuaaccccaacgucgacccaaacgccaacccaaacgucgaccccaacgccaacccaaacguagaccccaacgccaaccccaacgccaauccgaacgccaacccaaacgccaacccgaacgcaaacccaaacgcaaaucccaacgccaacccaaacgcaaaccccaaugccaacccaaacgcaaacccgaacgccaacccaaacgcaaaccccaacgcgaacccaaacgccaacccaaacgccaacccaaacgcgaaccccaacgcaaaccccaacgccaaccccaacgcaaaccccaacgccaacccaaacgccaacccaaacgcgaaccccaacgccaaccccaacgcaaaccccaacgccaacccaaacgccaaccccaacgcaaauccaaacgccaaccccaacgccaaccccaacgccaacccaaacgcaaaccccaacgcaaaccccaacgccaacccaaacgccaaccccaacgccaaccccaacgcgaacccaaacaaaaacaaccaaggcaacgggcaaggccacaacaugcccaacgaccccaaccgcaacguagacgaaaacgccaacgccaacaacgccguaaaaaacaacaacaacgaagaaccaucagacaaacacaucgaacaauaccucaaaaaaauccaaaacagccucuccacagaauggucgcccugcuccgucacaugcggcaacggcauacaaguccgcaucaaacccggcucugccaacaaacccaaagacgaacucgacuacgaaaacgacaucgaaaaaaaaaucuguaaaauggaaaaaugcagcucaguauucaacguagucaacucgucaaucggccucaucaugguccuauccuuccucuuccucaacuaa

SEQ ID NO: 5786 - RNA, 1272 nt, Artificial Sequence
  derived and/or modified CDS sequence (opt11) from Pf(TSY673)__ACO49542.1__CSP
augcgcaaacucgccauacuauccguuuccuccuuccuauucgucgaagcccucuuccaagaauaccaaugcuacggaagcucauccaacacccgaguccuuaacgaacucaacuacgacaacgcgggcacaaaccucuacaacgaacucgaaaugaacuacuacggcaaacaagaaaacugguacagccuaaaaaaaaacucccgcucacucggcgaaaacgacgacggcaacaacaacaacggagacaacggacgcgaaggcaaagacgaagacaaacgcgacggcaacaacgaagacaacgaaaaacuccgcaaacccaaacacaaaaaacuuaaacaacccggagacgggaaccccgacccaaacgccaacccaaacgucgacccaaacgccaaccccaacgucgacccuaacgcaaaccccaacgucgaccccaacgccaacccaaacgccaacccaaacgccaacccuaaugccaauccaaacgccaaccccaacgcaaacccaaacgcaaacccaaacgccaacccaaacgcuaacccgaacgcaaaccccaaugccaacccaaacguggaccccaacgccaaccccaacgccaacccaaacgcaaacccaaacgccaacccaaacgccaaccccaacgccaacccaaacgcaaacccaaacgcgaaccccaacgccaacccaaacgccaaccccaacgcaaacccaaacgccaaccccaacgccaacccaaacgccaaccccaacgcaaaccccaacgcaaacccaaacgccaaccccaacgccaaccccaacgcaaacccaaacgccaacccaaacgccaacccaaacgccaaccccaacgccaacccuaacgccaaccccaacgccaacccaaacgccaacccaaacaaaaacaaccaaggcaacggacaaggccacaacaugccaaacgacccaaaucgaaacgucgacgaaaacgcaaacgcaaacaacgcagucaaaaacaacaacaacgaagaaccauccgacaaacacaucaccgaauaccuaaaaaaaauccaaaacucacucuccaccgaauggucacccugcagcgucaccugcggaaacggcauccaaguaagaauaaaacccggcuccgccgguaaauccaaagacgaacuggacuacgaaaacgacauagaaaagaaaaucugcaaaauggagaaaugcuccuccgucuucaacguagucaacuccucaaucggccucauaaugguccuaucauuccuauuccuaaacuaa

SEQ ID NO: 5787 - RNA, 1272 nt, Artificial Sequence
  derived and/or modified CDS sequence (opt11) from Pf(TSY688)__ACO49545.1__CSP
augcgcaaacucgcaauccucucagucuccuccuuccucuucguagaagcccucuuccaagaauaccaaugcuacggauccagcuccaacacaagaguccucaacgagcucaacuacgacaacgccggcaccaaccuauacaacgaacuagaaaugaacuacuacggaaaacaagaaaacugguacagccucaaaaagaacucccgcucccuaggggaaaacgacgacgguaauaacaacaacggcgacaacggcagagaaggaaaagacgaagacaaacgcgacgggaacaacgaagauaacgaaaaacuacgaaagccaaaacacaagaaacucaaacaacccggcgacggcaaccccgaccccaacgccaaccccaacgucgaccccaacgccaacccaaacgucgacccaaacgcuaacccaaacgucgacccaaacgccaacccaaacgccaaccccaaugccaaccccaacgccaauccaaacgcaaacccaaaugccaaccccaacgccaaccccaacgccaacccaaacgccaacccaaacgccaaccccaacgccaacccaaacgccaacccaaacgccaaccccaacgccaacccaaacgccaacccaaacgcgaaccccaacgcaaacccaaaugccaacccaaacgcaaacccaaacgccaacccaaacgccaacccaaacgcaaacccuaacgcaaaccccaacgccaacccaaacgccaaccccaacgcaaauccaaacgcaaaccccaacgcuaacccgaacgccaaccccaacgccaacccaaacgcaaacccaaacgcgaacccaaacgcaaacccaaacgcaaaccccaacgcaaaccccaacgccaaccccaacgccaaccccaacgccaacccaaacaaaaacaaccaagggaacggacaaggccacaacaugccaaacgaccccaaucgcaacgucgacgaaaacgccaacgccaacaacgcagucaaaaacaacaauaacgaagaacccucagacaaacacaucgaacaguaccucaagaaaauccaaaacuccuuauccaccgaauggucccccugcuccguaaccugcggaaacggcauccaaguacgaauuaaaccaggcuccgccaacaaacccaaagacgaacuagacuacgaaaacgacaucgaaaagaaaauaugcaaaauggaaaaauguucauccgucuucaacguggucaacuccuccaucggacucaucaugguacuaucauuccuauuccugaacuag

SEQ ID NO: 5788 - RNA, 1263 nt, Artificial Sequence
  derived and/or modified CDS sequence (opt11) from Pf(835b)__AAA29574.1__CSP
augaugagaaaacucgccauccucuccgucuccuccuuccucuucgucgaagcccuguuccaagaauaccaaugcuacggaagcuccagcaacaccagaguucucaacgaacuaaacuacgacaaugccggcaucaaccuauacaacgaacuagaaaugaacuacuacggcaaacaagaaaacugguacucccuaaaaaaaaacucacgaucacucggcgaaaacgacgacggcaacaauaacaacggcgacaacggccgagaaggcaaagacgaagacaaacgagacggcaacaacgaagacaacgaaaaacuccgcaaaccuaaacacaaaaaacuaaaacaacccggcgacggaaaccccgaccccaacgccaacccaaacguagacccaaacgccaaccccaacguagaccccaacgccaacccaaaugucgacccaaacgccaaccccaacgccaacccaaacgccaaccccaacgccaaccccaacgccaaccccaaugcaaaccccaacgccaacccaaacgcaaaccccaacgccaaccccaacgcaaaccccaacgcuaacccaaacgcaaaccccaacgccaacccaaacgccaacccaaacgccaacccaaacgcaaaccccaacgcaaaccccaacgccaaccccaacgcaaaccccaacgucgaccccaacgccaacccaaacgccaacccaaacgcaaaccccaacgccaacccaaacgccaaccccaacgccaacccgaacgcaaaccccaacgcaaaccccaacgcaaaccccaacgccaaccccaaugcaaacccaaacgccaaccccaacgccaaccccaacgccaacccaaacgccaaccccaacgccaacccuaacgcaaaccccaacaaaaacaaccaaggcaacgggcaaggacacaacaugccuaacgaccccaaccgaaacgucgacgaaaacgcuaacgcaaacaacgccgucaaaaacaacaacaacgaagaacccucagacaaacacauaaaagaauaccucacaaaaauccagaacagcaucuccaccgaauggucccccugcagcgucaccugcggaaacggaauccaaguccgcaucaaacccggcuccgccggcaaacccaaagacgaacuagaauacgaaaacgauauagaaaaaaaaauaugcaagauggaaaaaugcuccucagucuucaacgucguaaacuccucaaucggccucaucaugguacucucauuccucuuccucaacuaa

SEQ ID NO: 5789 - RNA, 1263 nt, Artificial Sequence
  derived and/or modified CDS sequence (opt11) from Pf(FCC1/HN)__AAW59565.1__CSP
augaugcgcaaacucgccauccucucaguauccucauuccucuucgucgaagcucuauuccaagaauaccaaugcuacggcuccuccagcaacacccgaguacuaaacgaacucaacuacgacaacgccggcaccaaccucuacaacgaacucgaaaugaacuacuacggaaaacaagaaaacugguauagccuaaaaaaaaacucacgcucccucggcgaaaacgacgacggcaacaacaacaacggagacaacggaagagaaggcaaagaugaagacaaacgcgacggaaacaacgaagacaacgaaaaacuacguaaacccaagcacaaaaaacucaaacaacccggcgacggaaaccccgaccccaacgcaaaucccaacguagaccccaacgccaaccccaacgucgaccccaacgcaaacccuaacgucgaccccaacgccaaccccaacgccaaccccaacgcaaaccccaacgcaaacccaaacgcaaaccccaacgcaaaccccaacgccaaccccaacgccaaccccaacgccaaccccaacgcaaaccccaacgcaaacccaaacgccaaccccaacgcaaaccccaacgccaauccaaacgcaaaccccaacgcaaacccaaacgccaaccccaacgcuaaccccaacgccaacccuaacgccaaccccaacgcaaaccccaacgccaacccaaacgcaaacccaaacgccaaccccaacgccaaccccaacgccaaccccaacgccaaccccaacgccaacccaaacgcaaaucccaacgcaaaccccaacgccaaccccaacgcaaaccccaacgccaacccaaacgccaaccccaacgccaacccgaacgcaaaccccaacgccaaccccaacaaaaauaaccaaggaaacggacaaggccacaacaugcccaacgaccccaaccgaaaugucgacgaaaacgccaacgccaacaacgccgucaaaaacaauaacaacgaagaacccucagacaaacacauagaacaauaccuuaaaaagauccaaaacucacuauccacugaguggucaccaugcuccgugaccugcggcaacggcauccaagcacgcaucaaaccaggcuccgccaacaaacccaaagacgaacuagacuacgaaaacgacauagaaaaaaaaaucugcaaaauggaaaaaugcuccuccgucuucaacgucgucaacucaucaaucggauuaaucaugguccucucuuuccuauuccucaacuaa

SEQ ID NO: 5790 - RNA, 1263 nt, Artificial Sequence
  derived and/or modified CDS sequence (opt11) from Pf(K1)__AAA29552.1__CSP
augaugagaaaacucgcuauccucuccguuucauccuuccucuucgucgaggcccuauuccaagaguaccaaugcuacggcagcucauccaacaccagaguacucaacgaacuaaauuacgacaacgccggaauaaaccucuacaacgaacuagaaaugaacuacuacggcaaacaagaaaacugguacucccuaaaaaaaaacucucgcucacucggagaaaacgacgacggcaacaacaacaacggagacaacggccgcgaaggcaaagacgaagacaaaagagacggaaacaacgaagacaacgaaaaacuccgcaaacccaaacauaagaaacuaaaacaacccggagacggaaacccagaccccaacgcaaacccaaacguagacccgaacgcaaaccccaacgucgaccccaacgccaacccaaacguagacccgaacgcgaacccgaacgcaaaccccaacgccaaccccaacgccaaccccaacgcaaaccccaacgcaaaccccaacgccaaccccaacgccaacccuaacgcaaauccgaacgccaaccccaacguggaccccaacgccaacccaaacgcaaaccccaacgccaacccaaacgccaacccaaacgccaaccccaacgccaaccccaacgcaaacccgaacgccaacccaaacgcaaacccaaacgcaaaccccaacgccaaccccaacgcaaaccccaaugccaaccccaacgccaacccuaacgccaacccaaaugccaaccccaacgcgaaccccaacgccaaccccaacgcaaacccaaacgcaaaccccaacgccaacccaaacgcaaaccccaacgccaaucccaacgcgaacccaaaugcaaaccccaacgcgaacccgaacaagaacaaucaaggaaacggucaaggccacaacaugcccaacgaccccaaccgaaacgucgacgaaaacgcaaacgccaacaacgacgucaaaaacaacaacaacgaagaaccuucagacaaacacaucgaacaauaccuaaaaaaaauccaauacucccuaucaaccgaauggucacccugcagcguaaccugcggcaacgguauccaagugcgcaucaaacccggcuccgccgacaaacccaaagaucaacuagacuacgaaaacgacaucgaaaaaaaaaucugcaaaauggagaaaugcagcuccgucuucaacguagucaacuccuccaucggccucauaaugguacuauccuuccuauuccucaacuaa

SEQ ID NO: 5791 - RNA, 1263 nt, Artificial Sequence
  derived and/or modified CDS sequence (opt11) from Pf(K1)__BAD73952.1__CSP
augaugcgaaaacucgcaauccucucaguauccuccuuccuauucgucgaagcccucuuccaagaauaccaaugcuacggauccuccucaaacacacgaguccucaacgaacucaacuacgacaacgccggcacaaaccucuacaaugaacucgaaaugaacuacuacggcaaacaagaaaacugguacucccugaaaaaaaauucccgaucguuaggagaaaacgacgacggcaauaacaacaacggggacaacggccgggaagguaaagacgaagauaaacgcgacggcaacaaugaagacaacgaaaaauuacgcaaacccaaacacaaaaaacucaaacaacccggagacggcaaccccgacccaaacgccaacccaaacgucgacccaaacgcaaaccccaacguagacccgaacgccaacccaaacgucgaccccaacgcaaacccaaacgcaaacccaaacgcuaaccccaacgccaacccuaacgccaaccccaacgccaaccccaacgcaaaccccaacgcaaaccccaacgcaaaccccaacgccaauccgaacguagaccccaacgccaaccccaacgcgaacccuaacgccaacccaaacgcaaaccccaacgccaaccccaacgccaacccgaacgccaaccccaacgcaaauccaaacgcaaaccccaacgccaaccccaacgccaacccaaacgccaaccccaacgccaacccaaacgcuaaccccaaugccaaccccaacgcaaaccccaaugcaaacccaaacgccaacccgaacgccaaccccaacgcaaaccccaacgcaaacccaaacgccaaccccaacgccaaucccaacgccaacccaaacgcaaacccaaacgccaaccccaacaaaaacaaccaaggcaacggacaaggccacaauaugccaaacgaccccaaccgcaacgucgaugaaaacgcaaacgccaacaacgaugucaaaaacaacaacaacgaagaaccuucugacaagcacaucgaacaauaccucaaaaaaauacaauacucccucucgacagaauggucacccugcuccgucaccugcggcaacggcauccaaguucgcauaaaaccaggcucggccgacaaacccaaagaccaacuagacuacgaaaacgacauagaaaaaaaaaucugcaaaauggaaaaauguuccucaguauucaauguugucaacucuucaauaggccucaucaugguacucucauuccucuuccucaacuaa

SEQ ID NO: 5792 - RNA, 1263 nt, Artificial Sequence
  derived and/or modified CDS sequence (opt11) from Pf(Pal97-074)__BAM84944.1__CSP
augaugcgcaaacuagcaauccucucagucuccuccuuccucuucgucgaagcccuuuuccaagaauaccaaugcuacggauccucauccaacacccggguccucaacgaacuuaacuacgauaacgcaggcacaaaccucuacaacgaacuagaaaugaacuacuacggcaaacaagaaaacugguacagccuaaaaaaaaacucgcgcucccucggcgaaaacgacgacggaaacaacaacaacggagacaacggacgugaaggcaaagacgaagacaaacgagacgggaacaacgaagacaacgaaaaacuacgcaaacccaaacacaaaaaacucaaacaaccagucgacggcaacccggacccuaacgcaaacccaaacgucgacccaaacgcaaacccaaacgucgaccccaacgccaacccaaacguagaccccaacgcaaauccgaacgccaaccccaacgccaaccccaacgccaacccaaacgccaaccccaacgccaacccaaacgccaaccccaacgcaaaccccaacgccaacccaaacgccaacccaaacgccaaccccaacgccaaccccaacgccaacccaaacgcaaaccccaacgcaaaucccaacgccaaucccaacgcaaacccaaacgcuaaccccaacgcgaaccccaacgcaaacccgaacgccaacccaaacgcgaaccccaacgccaaccccaacgcaaaccccaacgccaaccccaacgcaaaccccaacgccaacccaaacgccaacccaaacgcaaacccaaacgcaaaccccaacgccaaccccaacgcgaaucccaacgccaaccccaacgcaaaccccaaugccaacccaaacgccaaccccaacgcaaacccuaacaagaacaaucaaggcaacggacaaggacacaacaugccaaacgaccccaaccgaaacguagacgaaaacgccaacgccaauaacgccgucaaaaacaacaacaacgaagaacccuccgaccaacacaucgaaaaauaccugaaaaucauccaaaacucccuuucaaccgagugguccccaugcucagucaccugcggcaacggcauccaaguccgaaucaaacccggcucagccgacaaaccaaaagaccaacuagacuacgccaaugacauagaaaaaaaaaucugcaaaauggaaaaaugcuccucgguauucaacgucguaaacuccuccaucggccucauaaugguccucucauuccucuuccuuaacuaa

SEQ ID NO: 5793 - RNA, 1263 nt, Artificial Sequence
  derived and/or modified CDS sequence (opt11) from Pf(Pal97-108)__BAM84957.1__CSP
augaugcgaaaacucgccauucucucagucucauccuuccucuucgucgaagcccucuuccaagaauaccaaugcuacggcucuuccuccaauacacgaguccucaacgagcucaacuacgacaacgccggcaccaaccuauacaaugaacuagaaaugaacuacuacggcaaacaagaaaacugguacucccuuaaaaaaaacucccgaucacuaggcgaaaacgacgacggaaauaacaacaacggcgacaacggccgcgaaggcaaagacgaagacaaacgagacggcaacaacgaagacaacgaaaaacuucgcaaacccaaacacaaaaaacucaaacagccuggcgacggaaacccggaccccaacgccaaccccaacguagacccaaacgcaaaccccaacgucgacccaaacgcaaaccccaacgucgaccccaacgccaacccaaacgccaacccgaacgcaaaccccaacgcaaaccccaacgccaacccaaacgccaaccccaacgccaaccccaacgccaaccccaacgccaaccccaacgcaaacccaaacgcaaaccccaacgccaaccccaacgcaaaccccaacgccaaccccaacgccaacccaaacgcaaaccccaacgccaaccccaacgccaacccaaacgcaaacccaaacgccaaccccaacgcaaaccccaacgcaaacccaaacgccaaccccaacgccaacccaaacgccaacccuaacgccaaccccaacgccaacccaaacgcaaaccccaacgcaaacccaaacgccaaccccaacgcuaaccccaaugcaaaccccaacgcaaaccccaacgcaaacccaaacgccaaccccaacgccaaccccaacgcaaacccaaacaaaaacaaccaaggcaacggccaaggacacaacaugcccaacgaccccaaccgcaacgucgacgaaaacgcuaacgccaacaacgccgucaaaaacaacaacaacgaagaacccucagacaaacacauaaaagaauaccucacuaaaauccagaauuccaucuccaccgaaugguccccaugcagcguaaccugcggcaacgguauacaaguucgcauaaaaccaggcuccgccggaaaaccaaaagacgaacucaacuacgaaaacgacauagaaaaaaaaaucuguaaaauggaaaaaugcuccucggucuucaacgucgucaacuccucgaucggacucauaauggugcucuccuuccuuuuccuaaacuaa

SEQ ID NO: 5794 - RNA, 1263 nt, Artificial Sequence
  derived and/or modified CDS sequence (opt11) from Pf(PNG225-053)__BAM85032.1__CSP
augaugcgaaaacuagccauccucuccgucuccagcuuccuauucgucgaagcccuauuccaggaauaucaaugcuacggauccuccuccaacacccgcguccuaaacgaacuaaacuacgacaacgcaggaacaaaccuauacaaugaacuagaaaugaacuacuacggaaaacaagaaaacugguacucacucaaaaaaaacucuagaucccuaggcgaaaacgacgacggaaacaacaacaacggcgacaacggccgagaaggaaaagacgaagacaaaagagacggaaacaacgaagacaacgaaaaacugcgcaaacccaaacacaagaagcuaaaacaacccggagacggaaacccagaccccaacgccaaccccaacgucgaccccaacgccaaccccaacgucgacccaaacgccaacccaaacguagaccccaacgcaaaccccaaugcaaacccgaacgcaaacccuaacgcaaacccaaacgccaaccccaacgccaacccgaacgcaaaccccaacgccaaccccaacgcaaacccgaacgccaacccgaacgccaaccccaacgcaaaccccaacgcaaaccccaacgccaaccccaacgcaaaccccaacgccaacccaaacgcaaacccaaacgccaacccgaacgccaacccgaacgccaaccccaacgccaaccccaacgccaacccgaacgcaaaccccaacgcaaaccccaacgccaacccgaacgccaaccccaacgcaaaccccaacgccaacccaaacgccaacccgaacgccaacccaaacgcuaacccaaacgccaacccgaacgcaaaccccaacgcaaaccccaacgccaaccccaacgcaaacccuaacgccaacccaaacaaaaacaaccaaggcaacggacaaggacacaacaugcccaacgaccccaaccgcaacgucgacgaaaacgccaacgccaauaacgccgucaaaaacaacaacaacgaagaaccaucagacaaacacauagaacaauaccucaaaaaaauccaaaacucacucuccacagaguggucaccaugcuccgucaccugcggaaacggcauucaagugcgaaucaaaccaggcuccgccaacaaacccaaagacgaacucgacuacgaaaacgacaucgaaaaaaaaaucugcaaaauggaaaaaugcuccuccgucuucaacgucgucaauucaagcaucggccucaucaugguacuuucauuccuuuuccucaauuag

SEQ ID NO: 5795 - RNA, 1263 nt, Artificial Sequence
  derived and/or modified CDS sequence (opt11) from Pf(Sol95-113)__BAM85062.1__CSP
augaugcgcaaacucgccauccucuccgucucuagcuuccucuucguugaagcacuauuccaagaauaccaaugcuacggcagcuccaguaacacacgcguccucaacgaacucaacuacgacaacgccggaacaaaccucuacaacgaacucgaaaugaacuacuacggcaaacaagaaaacugguacagccucaaaaaaaacucgcgaucccucggcgaaaacgacgacggcaacaacaacaacggagauaacggccgagagggcaaagacgaagacaaaagagacgggaacaacgaagacaacgaaaaacugcgcaagccaaaacacaaaaaacuaaaacagcccggagacggcaaccccgaccccaaugccaacccaaacgucgacccgaacgcaaauccaaacgucgaccccaaugcaaacccaaacgucgacccaaacgccaaccccaacguagacccaaaugccaacccaaacgccaaccccaacgccaaccccaacgcgaacccaaacgccaacccaaacgccaacccaaacgcaaacccaaacgcaaaccccaacgcaaacccaaacgcaaaccccaacgccaaccccaacgccaacccaaacgcaaacccgaacgcaaaccccaacgccaacccaaacgccaacccgaacgccaacccaaacgccaaccccaacgcaaaucccaacgcgaacccaaacgccaaccccaacgcaaaccccaacgcuaaccccaacgcaaaccccaacgcaaaccccaacgccaaccccaacgccaaccccaacgcaaaccccaacgcaaacccaaacgcgaacccgaacgcaaacccaaacgcaaaccccaacgcaaaccccaacgccaaccccaacgccaacccaaacaaaaacaaccaaggcaacggccaaggacacaacaugccaaacgaccccaaccgcaacgucgacgaaaacgcaaaugccaacaacgcagucaaaaacaacaacaacgaagaacccuccgacaaacacaucgaacaauaccucaaaaaaauccaaaacucacucuccaccgaauggucccccugcuccgucaccugcggcaacggcauccaaguccgcaucaaacccggcucugccaacaaaccaaaagacgaauuagauuacgaaaacgacauagaaaaaaaaauaugcaaaauggaaaaaugcucaucagucuuuaacgucgucaacuccagcaucggccucauaaugguccucucauuccucuuccuaaacuaa

SEQ ID NO: 5796 - RNA, 1263 nt, Artificial Sequence
  derived and/or modified CDS sequence (opt11) from Pf(Sol95-328)__BAM85093.1__CSP
augaugcgaaaacuagccauacuauccgucucgagcuuccuauucgucgaagcccucuuccaggaauaccaaugcuacggauccuccuccaacacccgaguauuaaacgaacucaacuacgacaacgccggaacgaaccuauacaacgaacucgaaaugaacuacuacggcaaacaagaaaacugguacucccuaaagaaaaacucacgcagccucggagaaaacgacgacggaaauaacaacaacggcgacaacggccgcgaaggaaaagacgaagacaaaagggacggaaacaacgaagacaacgaaaaacuccgaaaacccaaacacaagaaacucaaacaaccaggcgacggcaacccagacccaaacgccaaccccaaugucgaccccaacgccaacccgaacgucgaccccaacgcaaaccccaacgucgacccaaacgccaaccccaacgccaacccaaacgccaacccaaacgcaaaccccaacgcaaacccaaacgcaaaccccaacgcaaaccccaacgcaaacccaaacgcaaacccaaacgcaaacccuaacgccaacccaaacgccaaccccaacgccaaccccaacgccaacccaaacgccaacccgaacgccaacccgaacgcaaaccccaacguagacccaaacgcaaaccccaacgccaaccccaacgccaaccccaacgccaaccccaacgcaaaccccaacgccaaccccaacgcaaaccccaaugcaaaccccaacgccaaccccaacgccaaccccaacgccaacccaaacgccaaccccaacgccaaccccaacgccaacccaaacgcaaaccccaacgcaaacccaaacgcaaacccaaacgccaaccccaacgccaaccccaacaaaaacaaucaaggcaacggccaaggucacaacaugcccaacgaccccaaccgcaacgucgaugaaaacgcaaacgcaaacaacgcagucaaaaacaacaacaacgaagaacccuccgacaaacacauagaacaauaccucaagaaaauccaaaacucacuaucaaccgaauggucccccugcuccgucacaugcggcaacggaauccaaguaagaaucaaacccggcucugcagacaaacccaaagaccaacucgacuacgaaaacgauaucgaaaagaaaaucugcaaaauggagaaaugcagcuccgucuucaacgucgucaacuccucaaucggacucauaaugguccuauccuuccuuuuccuuaacuaa

SEQ ID NO: 5797 - RNA, 1263 nt, Artificial Sequence
  derived and/or modified CDS sequence (opt11) from Pf(TiMS95-208)__BAM84896.1__CSP
augaugagaaaacucgccauacucucugucuccuccuuccuauucgucgaagcccuauuccaagaauaccaaugcuacggcuccuccuccaacaccagaguccuaaacgaacuaaauuacgauaacgccggcacaaaccucuacaaugaacuagaaaugaacuacuacggaaaacaagaaaacugguacagccuaaaaaaaaacucccgcucccucggcgaaaacgacgacggcaacaacaacaacggagacaacggccgagaaggcaaagacgaagacaaacgagacggcaacaacgaggacaacgaaaaacuacgcaagccuaaacacaaaaaacucaaacaacccggcgacggcaaccccgacccaaacgccaaccccaacgucgaccccaaugccaaccccaacguagaccccaacgcaaauccgaacguagaccccaacgccaacccgaacgccaaccccaacgcaaaucccaacgcaaaccccaacgcuaacccaaacgcuaacccuaacgcgaacccuaacgcaaaccccaacgcaaacccuaacgcaaaccccaacgccaaccccaacgccaacccuaacgccaacccuaacgccaacccuaaugccaaccccaacgcaaaccccaacgccaaccccaacgcuaaccccaacgccaaccccaacgccaaccccaacgccaacccaaacgccaaucccaacgccaaccccaaugcuaaccccaacgcaaaccccaacgccaaccccaacgcaaaccccaacgccaaccccaacgcaaaccccaacgccaacccaaaugcaaacccaaacgccaaccccaacgccaacccaaacgccaaccccaacgccaaccccaacgcaaacccgaacgcuaaccccaacaaaaacaaccaaggcaacggccaaggccauaacaugcccaacgaccccaacagaaacgucgacgaaaacgcaaacgccaacaacgacgucaaaaacaacaacaaugaagaaccuucugacaaacacauagaacaauaccucaaaaaaauccaauacucccucuccaccgaaugguccccauguuccguaaccugcggaaacggcauccaaguccgcaucaaacccggcuccgccgacaaacccaaagaccaacuagacuacgaaaacgacaucgaaaaaaaaaucugcaaaauggaaaaaugcuccucagucuucaacguggucaacagcuccauaggccucaucaugguccucuccuuccucuuccucaacuaa

SEQ ID NO: 5798 - RNA, 1263 nt, Artificial Sequence
  derived and/or modified CDS sequence (opt11) from Pf(TiMS95-260)__BAM84907.1__CSP
augaugcgaaaacuggccauccucucagucucauccuuccucuucgucgaagcucuauuccaagaauaccaaugcuacggcuccagcuccaacacccgcguccucaacgagcucaacuaugacaacgcaggcacaaaccuguacaaugaacuagaaaugaacuacuacggcaaacaagaaaacugguacuccuuaaaaaaaaacucccgcucccucggcgaaaacgacgacggaaacaauaacaacggcgacaacggcagagaagggaaagacgaagacaaacgcgacggcaacaacgaagacaacgaaaaacuccgcaagccaaaacacaaaaaacucaaacaacccggcgacgguaaccccgaccccaacgccaacccaaacguagaccccaacgccaauccaaacgucgacccgaacgcgaaccccaacgucgaccccaacgccaaccccaacgcgaacccgaacgccaaccccaacgcaaacccaaacgcaaaccccaacgccaacccaaacgcaaacccaaacgcgaacccaaacgcaaaccccaacgccaaccccaacgcaaaccccaacgccaacccaaacgccaacccaaacgccaacccaaacgccaaccccaacgcuaaccccaacgcaaacccaaacgccaaccccaacgccaaccccaacguagacccaaacgccaacccaaacgccaaccccaacgccaaccccaacgccaacccaaacgcaaacccaaacgccaacccaaacgcaaacccaaacgcgaaccccaacgcgaacccaaacgcaaacccgaacgcaaacccaaacgccaacccaaacgccaacccgaacgcaaaccccaacgcaaaccccaacgcaaacccaaacgcgaaccccaacaaaaacaaccaagggaacggacaaggccacaacaugccaaacgaccccaaccgcaacgucgacgaaaacgccaacgcaaacaacgcagucaaaaacaacaacaacgaagaacccuccgacaagcacauaaaagaauaccucacaaaaauccagaacucaaucuccaccgaauggucaccaugcagcgucaccugcggaaacggcauacaaguccgcauaaaacccggcuccgcaggaaaacccaaagaugaacuaaacuacgaaaacgacauagaaaaaaaaaucugcaaaauggaaaaaugcagcuccgucuucaacgucgucaacagcucgaucggccuaaucaugguccucucguucuuauuccuaaacuag

SEQ ID NO: 5799 - RNA, 1263 nt, Artificial Sequence
  derived and/or modified CDS sequence (opt11) from Pf(Tz93-030)__BAM84756.1__CSP
augaugcgcaaacuagcaauacuauccgucucaagcuuccucuucgucgaagcccucuuccaagaauaccaaugcuacggaagcagcuccaacacccggguccucaacgaacucaacuacgacaaugccggaacgaaccuauacaacgaacuggaaaugaacuacuacggaaaacaagaaaacugguacuccuuaaaaaaaaacucacgcucccucggggaaaacgacgacggcaacaacaacaacggggacaacggcagagaaggcaaagacgaagacaaacgcgacggcaacaacgaagacaacgaaaaacuaagaaaacccaaacacaaaaaacucaaacaaccaggcgacggcaacccagacccaaacgccaacccaaacgucgacccuaacgccaacccuaacguggaccccaacgcaaaccccaacgucgacccuaacgccaaccccaacgccaacccaaacgccaacccaaacgcgaaccccaacgccaaccccaacgcaaaccccaacgcgaauccaaacgccaaccccaacgcgaacccaaacgccaaccccaacgccaacccaaacgccaaccccaacgccaacccaaacgcaaaccccaacgccaacccaaacgcaaacccgaacguugaccccaacgccaaccccaacgccaacccaaaugccaacccaaacgccaaccccaacgcaaacccaaacgccaaccccaacgcaaacccaaacgccaacccaaacgcaaaccccaacgcaaacccaaacgccaaccccaacgccaaccccaacgcaaaccccaacgccaaccccaacgcaaaccccaaugcgaacccaaacgccaacccaaacgccaacccaaacgccaacccgaacgcaaacccaaacaaaaacaaccaaggcaacggccaaggccacaacaugccaaacgaccccaaccgaaacgucgacgaaaacgccaacgcgaacaacgccgucaaaaacaacaacaacgaagaacccuccgacaaacacaucaaagaauaccucaacaaaauacaaaacuccaucucaacagaaugguccccaugcuccguaaccugcggcaacggcauccaaguccgcauaaaacccggaucagcugacaaaccgaaagaccaacucgacuacaucaacgacaucgaaaaaaaaauaugcaaaauggaaaaaugcuccucggucuucaacguaguaaacuccucgaucggacuaauaaugguccucagcuuccuauuccuaaacuaa

SEQ ID NO: 5800 - RNA, 1263 nt, Artificial Sequence
  derived and/or modified CDS sequence (opt11) from Pf(Tz93-038)__BAM84758.1__CSP
augaugagaaaacuggccauccucucuguuucauccuuccucuucguagaagcccuguuccaagaauaccaaugcuacggcagcucauccaacaccaggguccucaacgaacuaaacuacgacaacgccggcaccaaccuauacaacgaacuugaaaugaacuacuacggcaaacaagaaaacugguacucccucaaaaaaaacucccgaucucucggcgaaaaugacgacggcaacaacaacaacggcgacaauggccgagaaggcaaagacgaagacaaacgcgacggcaacaacgaagacaacgaaaaacuccgcaagcccaaacacaaaaaacugaaacaacccggagacgggaaccccgaccccaaugcgaacccgaacguagaccccaacgccaaccccaacguagacccaaacgcaaaccccaacgucgacccaaacgccaaccccaacgcaaaccccaacgcaaacccaaacgcaaacccgaacgccaacccaaaugcaaaccccaacgccaaccccaacgcaaaccccaacgcaaaccccaaugccaacccaaacgcaaacccaaacgccaaccccaacgccaaccccaacgcaaacccaaacgccaacccuaacgccaaccccaacgccaaccccaacguggaccccaacgccaacccaaacgccaaccccaacgccaacccaaaugccaacccgaacgccaaccccaacgccaacccaaacgccaacccaaacgccaaccccaacgccaacccuaacgcaaacccaaacgccaaccccaacgccaacccgaacgcaaaccccaacgccaacccaaacgccaaccccaacgccaaccccaacgcuaacccaaacgccaacccgaacgccaaccccaacaaaaacaaccaaggaaacggacaaggucacaacaugcccaacgaccccaaccgcaacgucgacgaaaacgccaacgccaacaacgccgucaaaaacaacaacaacgaagaacccucagacaaacacauaaaagaauacuuaaacaaaauccaaaacucgaucucaaccgaauggucccccugcagcgugaccugcggcaacggcauacaaguccgcaucaaaccaggcucagccgacaaacccaaagaccaacuggacuacaucaacgacaucgaaaaaaaaauaugcaaaauggagaaauguuccucagucuucaacguagucaacuccuccaucggacucaucaugguacucucguuccucuuccuaaacuag

SEQ ID NO: 5801 - RNA, 1260 nt, Artificial Sequence
  derived and/or modified CDS sequence (opt11) from Pf(TMS31)__ACO49480.1__CSP
augcggaaacucgcaauacucucagucuccuccuuccucuucgucgaagcccuuuuccaagaauaccaaugcuacggcucaucaucaaacacacgaguccucaacgagcucaacuacgacaacgccgguaccaaccucuacaacgaacucgaaaugaacuauuacggcaaacaagaaaacugguacucccuaaaaaagaauucacgaucacucggcgaaaacgacgacggcaacaacaacaacggcgacaacggccgagaaggcaaagacgaagacaaacgcgacggaaacaacgaagacaacgagaaacuccgaaaacccaaacacaaaaaacuuaaacaacccggagacggaaacccagacccaaacgcaaaccccaacguagaccccaacgcaaacccaaacgucgaccccaacgccaaccccaacguagacccaaacgcgaacccaaacgccaaccccaacgccaacccaaaugcaaauccaaacgcaaaucccaacgccaacccaaacgcaaacccaaacgccaaccccaacgcaaaccccaacgccaaccccaacgccaacccuaacgccaaccccaacgccaacccaaacgcaaauccaaacgcuaaccccaacgccaaccccaacgccaacccgaacgcuaaccccaacgcaaacccaaacgccaauccaaacgccaaccccaacgccaaccccaacgccaacccgaacgcaaacccaaacgcaaaccccaacgcaaaccccaacgcgaaccccaacgccaacccaaacgcaaaccccaaugccaacccaaacgccaacccgaaugcaaacccaaacgccaaccccaacgccaaccccaacgcaaacccaaaugccaaccccaacgcaaacccaaacaaaaauaaccaaggaaacggacaaggccacaauaugccaaacgaccccaaccgcaacgucgacgaaaaugcuaacgccaacaacgccgucaaaaacaacaacaacgaagaacccucagacaaacacaucgaacaauaccuaaaaaaaaugcaaaacucacuaagcaccgaauggucuccaugcagcguuaccugcggcaacggcauccaaguuagaauaaaaccaggauccgccaacaaacccaaagacgaacuagauuacgaaaacgacaucgaaaaaaaaaucugcaaaauggaaaaaugcagcucgguauucaacguggucaacuccucuaucggccucaucaugguccucucauuccucuuccuaaacuag

SEQ ID NO: 5802 - RNA, 1260 nt, Artificial Sequence
  derived and/or modified CDS sequence (opt11) from Pf(TSY172)__ACO49517.1__CSP
augaggaaacuagccauccuauccgucucguccuuccucuucgucgaagcccuauuccaggaauaccaaugcuacggcucaucaagcaacacucgcguccucaacgaacucaacuacgacaacgccggcaccaaucucuacaacgaacuagaaaugaauuacuacggcaaacaagaaaacugguacucccucaaaaaaaacagccgcucccucggagaaaacgacgacggaaacaacaauaacggcgacaacggcagagaaggcaaagacgaagacaaacgcgacggcaacaacgaagacaacgaaaaacugcgcaaacccaaacacaaaaaacuaaaacaaccaggcgacggaaaccccgaccccaacgccaaccccaacguagacccgaacgccaacccgaacgucgaccccaaugcaaaccccaaugucgacccaaacgccaaccccaacgccaacccaaacgccaacccaaacgccaaccccaacgccaaccccaacgcaaacccaaacgcaaaccccaacgccaaccccaacgcaaaccccaacgccaaccccaacgccaacccaaacgcaaaucccaacgcaaaccccaacgcaaaccccaacgccaacccaaacgcaaacccaaacgccaacccgaacgcaaaccccaacgccaaccccaacgccaacccaaacgcaaacccaaacgccaaccccaacgccaaccccaacgcaaacccaaacgccaaccccaaugcaaaccccaacgcaaauccaaacgcuaaccccaacgccaacccaaacgcaaaccccaacgcaaaccccaacgcaaaccccaacgccaacccaaacgcaaauccaaacgcaaaccccaacgcgaacccuaacgcuaaccccaacaagaacaaccaaggaaacggacaaggccacaauaugccgaacgaccccaaccgcaacgucgacgaaaacgccaacgccaacaacgccguaaaaaauaacaacaacgaagaaccauccgacaaacacaucgaacaauaccucaaaaaaauccaaaacagccuauccaccgaaugguccccaugcucaguaaccugcggcaauggcauccaaguccgcaucaaaccaggcuccgcaaacaaaccaaaagacgaacucgacuacgaaaacgacaucgaaaaaaagaucugcaaaauggaaaaaugcagcuccgucuucaacguggucaacuccagcaucggacucauaaugguccuauccuuccucuuccucaacuaa

SEQ ID NO: 5803 - RNA, 1251 nt, Artificial Sequence
  derived and/or modified CDS sequence (opt11) from Pf(Asembo Bay)__AAN87591.1__CSP
augaugcgaaaacuagccauccucuccguuuccuccuuccuauucgucgaagcccuauuccaggaauaccaaugcuacggauccucauccaacacccgaguccuuaacgaacucaacuacgacaacgccggaacaaacuuauacaacgaacucgaaaugaacuacuacggaaaacaagaaaacugguacagccucaaaaaaaacucacgcucacucggagaaaacgacgacggcaauaacaacaacggcgacaacggaagagaagggaaagacgaagacaaacgcgacggcaacaacgaagacaacgaaaaacuccgcaaaccaaaacacaaaaaacuaaaacaacccggcgacggcaaccccgacccaaacgcaaaccccaacguagacccaaacgccaaccccaacguggacccaaacgccaaccccaacguagaccccaacgcaaacccaaacgccaaccccaacgccaacccgaacgcgaaccccaacgcaaacccgaacgcaaaccccaacgcaaacccgaacgcaaaccccaacgcaaacccaaacgccaaccccaacgccaaccccaacgccaacccaaacgcaaaccccaacgccaacccaaacgcaaaccccaacgcaaacccaaacgcaaaccccaacgucgaccccaacgccaaccccaacgcaaacccaaacgcaaaccccaacgccaacccaaacgcaaacccaaacgcaaauccgaacgcaaacccaaacgcgaaccccaacgccaacccaaacgcaaaccccaacgcgaacccaaacgccaaccccaaugcaaaccccaacgccaacccgaacgccaaccccaacgccaaccccaacgcaaaccccaacgccaaccccaacaaaaacaaucaaggaaacggccaaggacacaacaugccaaacgacccaaaccgcaacguagacgaaaacgccaacgcaaauaacgcagucaaaaacaacaacaacgaagaaccaucagaccagcacaucgaaaaauaccucaaaacaauacaaaacucccucuccaccgaauggucgcccugcuccguaaccugcggcaacggaauccaaguccgcaucaaaccaggauccgccaacaaaccaaaagaccaacucgacuacgccaacgauaucgaaaaaaagaucugcaaaauggaaaaaugcagcucaguauucaacguggucaacuccuccauaggccuaaucaugguccucucauuccuauuccucaacuaa

SEQ ID NO: 5804 - RNA, 1251 nt, Artificial Sequence
  derived and/or modified CDS sequence (opt11) from Pf(Asembo Bay)__AAN87590.1__CSP
augaugcgcaaauuagcaauacuauccguaucauccuuccucuucgucgaggcccucuuccaagaauaccaaugcuauggcuccuccuccaacacccgcguccuaaacgaacuuaacuacgacaacgcaggcaccaaccuguauaacgaacuugaaaugaacuacuacggcaaacaagaaaauugguacagccucaaaaaaaacucacgaucccuaggagaaaacgaugacggaaacaacaauaacggcgacaacggccgugaaggcaaagacgaagacaaacgagacggcaacaacgaagacaacgaaaaacuacgaaaacccaaacacaaaaaacugaaacaacccggagacggcaauccagacccaaacgccaaccccaacgucgaccccaacgcaaaccccaacgucgaccccaacgccaacccaaacgucgacccaaacgccaacccaaacgcaaacccuaacgccaacccaaacgccaaccccaacgccaacccaaacgccaaccccaacgcaaaccccaacgcaaaccccaacgcgaaccccaacgccaacccaaacgccaaccccaacgccaacccaaacgucgaccccaacgcaaaccccaacgccaaucccaacgccaaccccaacgcaaacccgaacgccaaccccaacgcaaaccccaacgccaaccccaacgcaaaccccaacgcaaaccccaacgccaaccccaacgcaaacccaaacgcaaacccaaacgccaaccccaacgccaaccccaacgcaaaccccaacgccaaccccaacgcaaaccccaacgcuaaccccaacgcaaaccccaacgccaacccaaacgcaaaccccaaugccaaccccaacgccaaccccaacaaaaacaaccaaggcaacggacaaggccacaacaugccaaacgacccaaaccgcaacguagacgaaaacgccaacgccaacaacgccgucaaaaacaacaauaaugaagaaccaucagaccaacacaucgaaaaauaccugaaaaccauccaaaacucccucuccacagaaugguccccaugcucagucacaugcggcaacggcauccaagugcgcaucaaacccggcucugccaauaaacccaaagaucaacucgacuacgccaacgacauagaaaaaaaaauaugcaaaauggaaaaaugcagcucugucuucaacguaguaaacuccucaaucggccucauaaugguacucuccuuccucuuccuaaauuaa

SEQ ID NO: 5805 - RNA, 1251 nt, Artificial Sequence
  derived and/or modified CDS sequence (opt11) from Pf(Gha1108-097)__BAM84820.1__CSP
augaugcgaaaacuagccauucucucagucuccuccuuccuauucgucgaagcccuguuccaagaauaccaaugcuacggaagcucaagcaauacccgaguccuaaacgaacucaacuacgacaacgcaggcaccaaccuauacaacgaacucgaaaugaauuacuacggcaaacaagaaaacugguacucacucaaaaaaaacggccgaucccucggcgaaaacgacgauggaaacaacaacaacggcgacaacggacgagaaggcaaagacgaagacaaaagagacggcaacaacgaagacaacgaaaaacugcgaaaacccaaacacaaaaaacuaaaacaaccagccgacggcaaccccgaccccaaugccaaccccaacgucgaccccaacgccaacccaaacgucgaccccaacgcaaaccccaacguagaccccaacgccaacccaaacgccaacccaaacgccaacccuaacgcaaacccaaacgccaaccccaacgccaaccccaacgccaacccaaacgccaaccccaacgcaaaccccaacgccaaccccaacgccaaccccaacgcaaaccccaacgcaaaccccaacgccaaccccaacgccaaccccaacgcaaaccccaacguagaccccaacgcaaacccuaacgcaaacccgaacgccaaccccaacgcaaaccccaacgcaaaccccaacgccaacccaaacgccaaccccaacgcaaauccuaacgcaaacccaaacgccaaccccaacgcaaaccccaacgccaaccccaacgccaaccccaacgccaaccccaacgccaaccccaacgcaaacccaaacgcgaaccccaacgcaaaccccaacgccaaccccaacaaaaacaaccaagguaacggccaaggacacaacaugccaaacgacccaaaccgcaacgucgacgaaaacgccaacgccaacaacggcgucaaaaacaacaacaacgaagaacccuccgacaaacacaucgaacaauaccucaaacgcauacaaaacucccucuccacagaauggucacccugcagcgucaccugcggcaacggcauccaaguccgcaucaaaccaggcuccgccaacaaaccaaaagacgaacucaacuacgaaaaugacaucgaaaaaaaaaucugcaaaauggaaaaaugcagcucugucuucaauguaguuaacuccuccaucggccuuaucaugguccucuccuuccucuuucucaacuaa

SEQ ID NO: 5806 - RNA, 1251 nt, Artificial Sequence
  derived and/or modified CDS sequence (opt11) from Pf(MAD20)__AAA29550.1__CSP
augaugagaaaacuagccauccucucugucucgagcuuccuuuucguagaagcccuauuccaagaauaccaaugcuacggcuccucaucaaacacccgcguacucaacgaacucaacuacgacaacgccggcaucaaccucuacaacgaacuagaaaugaacuacuauggaaaacaagaaaacugguacucgcuaaaaaaaaacucacgcucacucggagaaaacgacgacggcaacaacaacaacggcgacaacggccgagaaggcaaagaugaagacaaaagagacggaaacaacgaagacaacgaaaaacuacgcaaaccaaaacacaaaaaacuaaaacaacccggagacggaaaccccgacccaaacgccaaccccaacguagacccaaacgcaaaccccaacguagacccaaaugcaaacccuaacgucgaccccaacgcaaaccccaacgcaaaccccaacgccaaccccaacgcaaacccaaacgccaaccccaacgccaacccaaacgcaaacccaaacgccaaccccaacgcaaaccccaacgcgaacccaaacgccaaccccaacgcaaaccccaacgccaacccaaacgcaaacccaaaugcaaacccuaaugcaaauccgaacgucgacccaaacgccaaccccaacgcaaacccaaacgcaaacccgaacgcaaacccaaacgcaaaccccaacgccaaccccaacgccaaccccaacgccaaccccaacgccaacccgaacgccaacccaaacgcgaacccgaacgccaacccaaacgcaaaccccaacgccaacccaaacgccaaccccaacgcaaaccccaacgcgaaccccaacgcaaaccccaacgccaacccaaacaaaaacaaccaaggcaacgggcaaggccacaacaugccaaacgaccccaaccgaaacguagacgaaaacgccaacgccaacaacgcagucaaaaacaacaacaacgaagaacccucagacaagcacaucgaacaauaucugaaaaaaauccaaaacucgcucucaaccgaauggucccccugcagcgucaccugcggcaacggcauccaaguacguaucaaaccaggaucagccgacaaacccaaagaccaacucgacuacgaaaacgacaucgaaaagaaaaucugcaaaauggaaaaaugcuccuccgucuucaacgucgucaauagcucaauagggcuuaucaugguccucucauuccuauuccugaacuag

SEQ ID NO: 5807 - RNA, 1251 nt, Artificial Sequence
  derived and/or modified CDS sequence (opt11) from Pf(Pal97-002)__BAM84917.1__CSP
augaugcgcaaacucgccauccucucagucucauccuuccucuucgucgaggcacuauuccaagaauaccaaugcuacggcagcucaucaaacacaagaguucucaacgaacucaacuacgacaacgcaggcacaaaccucuacaacgaacucgaaaugaacuacuacggcaaacaagaaaacugguacucccuaaaaaaaaacucacgcucccucggcgaaaacgacgauggcaacaacaacaacggcgacaacggacgagaaggcaaagacgaagacaaacgagacggcaacaacgaagauaacgaaaagcuacgcaaaccaaaacacaaaaaacucaaacaacccggcgacggcaaucccgacccaaacgccaacccgaacgucgacccaaacgccaaccccaacgucgacccaaacgcaaacccaaacgucgacccaaacgccaaccccaacgcaaaccccaacgcaaaccccaacgcaaacccgaacgccaaccccaacgccaacccaaacgccaacccuaacgccaaccccaacgccaaccccaacgcaaaccccaaugcgaacccaaacgcaaaccccaacgcaaaccccaacgcaaaccccaacgccaaccccaacgccaacccgaaugucgaccccaacgcaaauccaaacgccaaccccaacgcaaaucccaacgccaacccuaacgccaacccaaacgcaaacccaaacgcaaaccccaacgcaaacccaaacgccaaccccaacgccaaccccaacgccaacccaaacgcaaaccccaacgccaaccccaacgccaaccccaacgccaaccccaacgcaaaccccaacgccaaccccaacgccaacccaaacgcaaacccaaacaaaaacaaccaaggaaacggccaaggucacaacaugcccaaugaccccaaccgcaacgucgacgaaaacgccaacgcaaacaaugccguuaaaaacaacaacaacgaagaacccuccgaccaacacaucgagaaauacaucaaaaaaauccagaacucccucuccaccgaauggucgcccugcucugucaccugcggcaacggcauccaaguccgcaucaaacccggcagcgccgauaaaccgaaaaacgaacucgacuaugaaaacgacaucgaaaaaaaaaucugcaaaauggaaaaaugcaguuccgucuucaacgucguuaacuccucaaucggccucaucaugguacucuccuuccuauuccucaacuaa

SEQ ID NO: 5808 - RNA, 1251 nt, Artificial Sequence
  derived and/or modified CDS sequence (opt11) from Pf(Pal97-102)__BAM84954.1__CSP
augaugcgcaaacucgccauccucuccgucucauccuuccucuucguagaagcccucuuccaagaauaccaaugcuacggaagcucaucaaacacacgcguacucaacgaacuaaauuacgacaacgcuggcacaaaccuauacaacgaacucgaaaugaacuacuacggcaaacaagaaaacugguacucacuaaaaaaaaacucacguucccucggcgaaaaugacgacggaaacaacaacaacggcgacaacggccgggaaggaaaagacgaagacaaaagagacggcaacaacgaagacaacgaaaaacuacgaaagccaaaacacaaaaaacuuaaacagcccggagacggaaaccccgaccccaacgcaaauccgaacgucgaccccaacgccaacccaaacgucgacccaaacgcaaacccaaacguagaccccaacgccaaccccaacgccaaccccaacgccaaccccaacgccaacccaaacgcaaacccaaaugccaaccccaacgcaaacccaaacgccaaccccaacgcaaaccccaacgcaaaccccaacgccaacccaaacgcaaaccccaacgccaacccaaacgccaaccccaacgccaacccaaacgccaacccgaacgccaacccgaacgccaaccccaacgcaaaccccaacgccaaccccaacgccaacccaaacgcaaacccaaacgccaaccccaacgcaaacccaaacgccaaccccaacgcgaaccccaacgccaacccgaacgccaaccccaacgccaacccaaacgcaaaccccaacgcaaacccaaacgccaacccaaacgccaaucccaacgccaaccccaacgccaacccaaacgcaaaccccaacaaaaacaaccaaggaaacggccaaggccacaacaugccgaacgaccccaaccgcaacgucgaugaaaacgccaacgccaacaaugccgucaaaaacaacaacaacgaagaacccucagacaaacacaucaaagaauaccucacuaaaauccaaaacucaaucucaaccgaauggucacccugcagcgucacuugcggcaacggcauccaaguacgcaucaaacccggcucagccggcaaaccaaaagacgaacucaacuacgaaaacgacauagaaaaaaaaaucugcaaaauggaaaaaugcuccuccgucuucaacgucgucaacagcuccaucggccucaucaugguccuauccuuccuauuccucaauuaa

SEQ ID NO: 5809 - RNA, 1251 nt, Artificial Sequence
  derived and/or modified CDS sequence (opt11) from Pf(PNG227-255)__BAM85044.1__CSP
augaugcgcaaacuagccauccuauccguuucauccuuccucuucgucgaggcacuauuccaagaauaucaaugcuacggaucaucauccaacaccagaguccuaaacgaacucaacuacgacaacgcaggcaccaaccucuacaacgaacucgaaaugaacuacuacggcaaacaagaaaacugguacucccucaaaaaaaacucgcgcucacuaggcgaaaacgacgauggcaacaacaacaacggagacaacggccgugaaggaaaggacgaagacaaacgcgauggcaauaacgaagacaacgaaaaacuccgcaaacccaaacacaaaaaacuaaaacagcccggcgacggcaacccugacccaaacgcaaacccaaacguagaccccaacgccaaccccaacgucgaccccaacgccaaccccaacgucgaccccaacgcaaaccccaacguugaccccaacgccaacccaaacgccaaccccaacgccaaucccaacgcuaaccccaacgccaaccccaacgccaacccaaacgcaaaccccaacgccaacccaaacgccaacccaaacgcaaacccuaacgccaaccccaacgcaaaccccaaugcaaaccccaacgccaaccccaacgucgaccccaacgccaacccaaacgccaacccaaacgcaaaccccaacgccaaccccaacgccaaucccaacgccaaccccaacgccaaccccaacgccaaccccaaugccaacccaaacgcaaaccccaacgcuaacccaaacgccaaccccaacgccaacccgaacgccaacccaaacgccaaccccaacgccaacccgaacgcaaacccaaacgcgaacccaaacgccaaucccaacaaaaacaaccaaggaaacggccaaggccacaacaugcccaacgacccaaaccgcaacgucgacgaaaacgccaacgccaacaacgcagucaaaaacaacaacaacgaagaacccuccgacaaacacauagaacaauaccucaaaaaaauccagaacucccucucaaccgaauggucccccugcuccguaaccugcggcaacggcauccaaguacgaauaaaaccaggcucggcagacaaaccaaaagaccaacuagacuacgagaacgacaucgaaaaaaaaauaugcaaaauggaaaaaugcucaucagucuuuaacgucgucaacagcuccaucggacuaaucaugguacuaucauuccuauuccucaacuag

SEQ ID NO: 5810 - RNA, 1251 nt, Artificial Sequence
  derived and/or modified CDS sequence (opt11) from Pf(PNG228-063)__BAM85045.1__CSP
augaugcgaaaacucgccauacucagcguaucaagcuuccucuucgucgaggcucucuuccaggaauaccaaugcuacggcagcucauccaacacccguguccuuaacgaacucaacuacgacaacgccggcaccaauuuauacaacgaacuagaaaugaacuacuacggcaaacaagaaaacugguacagccucaaaaaaaacucacgcucacuaggcgaaaacgacgacggcaacaacaacaauggggacaacggcagagaaggaaaagacgaagauaaacgcgacggcaacaacgaagacaacgaaaaacuacgcaaacccaaacacaaaaaacuaaaacaacccggagacggaaacccagaccccaacgccaacccaaacgucgaucccaacgccaaccccaacgucgacccaaacgcaaaccccaacguagacccaaacgccaaccccaacgccaacccaaacgccaaccccaaugcaaacccaaacgccaaccccaacgcaaaccccaacgcaaacccaaacgccaaucccaacgcgaaccccaacgccaaccccaacgcgaacccaaacgccaaccccaacgcaaaccccaacgccaacccaaacgcaaaccccaacgccaaccccaacguagaccccaacgcaaauccaaacgccaacccaaacgccaacccuaacgcaaacccgaacgccaaccccaacgcaaaccccaacgccaacccaaacgcaaaccccaacgccaaccccaacgccaaccccaacgccaacccaaacgccaaccccaacgccaacccuaacgccaacccaaacgccaaucccaacgccaaccccaacgccaaccccaacgcaaaccccaacgccaacccaaacaaaaacaaccaaggcaacggacaaggacacaacaugccaaacgaccccaaccgcaacgucgacgaaaaugccaacgccaacaacgcuguaaaaaacaacaacaaugaagaaccaucagacaaacacauugaacaauaccuaaaaaaaauacaaaacucccucucaaccgaaugguccccaugcuccguaaccugcggcaacggcauccaaguccgcauaaaaccaggcuccgcagguaaaucgaaagacgaacuagacuacgaaaacgacaucgaaaaaaaaauaugcaaaauggaaaaaugcuccucaguauucaacgucgucaacagcuccaucggccuaauaaugguacucuccuuccuguuccuaaacuaa

SEQ ID NO: 5811 - RNA, 1251 nt, Artificial Sequence
  derived and/or modified CDS sequence (opt11) from Pf(PNG830-058)__BAM84987.1__CSP
augaugagaaaacucgcaauacucagcguauccuccuuccucuucgucgaagcccuauuccaagaauaccaaugcuacggcucaucaagcaauacacgaguacucaacgaacucaacuacgacaacgccggcacaaaccuauacaacgaacucgaaaugaacuacuacgguaaacaagaaaacugguacucccucaaaaaaaacucgagaucacucggcgaaaacgacgacggcaacaacaacaacggggacaacggucgcgaaggaaaagacgaagacaaacgagacggaaacaacgaagacaacgaaaaacuccgcaaacccaaacacaaaaaacugaaacaaccuggcgacggcaacccagaccccaacgccaaccccaacgucgaccccaacgccaaccccaacguggaccccaacgccaaccccaacguggaccccaacgccaaccccaacguagaccccaacgcaaaccccaacgcaaaccccaacgccaaucccaacgcaaaccccaacgcaaaccccaacgcaaaccccaacgccaacccgaacgcaaaccccaacgcaaaccccaacgcgaaccccaacgccaacccaaacgccaaccccaacgccaaccccaacgcaaacccgaacgccaaccccaacgccaaccccaacgcaaacccaaacgccaacccaaacgcaaaccccaacgccaaccccaacgccaacccaaacgcaaacccaaacgccaaccccaacgccaaccccaacgccaaccccaacgccaaccccaacgccaaccccaacgccaaccccaacgcaaaccccaacgccaaccccaacgccaacccaaacgccaacccaaacgccaacccgaacgcuaacccaaacaaaaacaaccaaggaaacggacaaggacacaacaugcccaacgaccccaacagaaacgucgacgaaaacgccaacgcaaacaacgcagucaaaaauaauaacaacgaagaaccauccgacaaacacaucgaacaauaccucaaaaaaauacaaaacucccuaucaacagaauggucaccaugcuccguaaccugcggaaacggcauccaaguacgcauaaaaccgggcuccgccaacaaaccaaaagacgaacuagacuacgaaaacgacauagaaaaaaaaaucugcaagauggaaaaaugcagcucaguauucaacgucgucaacuccucaaucgguuuaaucaugguacucucauuccucuuccucaacuaa

SEQ ID NO: 5812 - RNA, 1251 nt, Artificial Sequence
  derived and/or modified CDS sequence (opt11) from Pf(PNG903-136)__BAM84993.1__CSP
augaugagaaaacucgccauacucuccguauccuccuuccuauucguagaagccuuauuccaagaauaccaauguuacggaagcuccagcaacacccgcguccugaacgaacucaacuacgacaacgccggaaccaaccuauacaacgaacucgaaaugaacuacuacggcaaacaagaaaacugguacagccuaaaaaaaaacucacgcucacucggagaaaacgacgacggcaacaacaacaacggcgacaauggacgcgaaggaaaagacgaagacaaacgagacggcaacaacgaagacaacgagaaacuacgcaaacccaaacacaagaaacucaaacaacccggcgacggcaacccggaccccaacgccaacccaaacguggacccaaacgccaacccaaacgucgaccccaacgcgaaccccaacgucgaccccaacgccaaccccaacgcgaacccaaacgcaaacccaaacgcuaacccgaacgcgaaccccaacgccaaccccaacgccaacccaaacgccaacccuaacgccaacccaaacgccaaccccaacgccaaccccaacgcaaaccccaacgcgaacccaaaugccaaccccaacgccaaccccaacgccaacccgaacgucgaccccaacgcaaacccaaacgcgaacccuaacgccaaccccaacgccaacccaaacgccaaccccaacgcaaacccaaacgcaaaccccaacgccaaccccaacgcaaaccccaacgccaaccccaacgcaaacccgaacgccaauccaaacgccaacccaaacgccaacccaaacgcaaacccaaacgcaaacccaaacgccaaccccaacgcaaaccccaacgcaaacccaaacaaaaacaaccaaggaaacggccaagggcacaacaugccaaacgacccaaaccgcaacgucgacgaaaacgccaacgccaacaaugccgucaaaaacaacaacaaugaagaacccagcgacaaacacaucgaacaauaccucaaaaagauacagaacucccuauccaccgaauggagccccugcuccgucacaugcggcaacggaauccaaguccgcauaaaaccuggcuccgccaacaaaccaaaagacgaacuggacuacgaaaacgacauagaaaaaaaaaucugcaaaauggaaaaauguuccucaguauucaacgugguaaacagcuccaucggccucaucaugguacucuccuuccucuuccuaaacuag

SEQ ID NO: 5813 - RNA, 1251 nt, Artificial Sequence
  derived and/or modified CDS sequence (opt11) from Pf(Tz03-086)__BAM84805.1__CSP
augaugcgaaaacuagccauccuaucagucuccuccuuccuauucgucgaagcccucuuccaggaauaccaaugcuacggaagcuccagcaacacccgaguacuaaacgaacucaacuacgacaacgcgggcaccaaccuauacaacgaacuagaaaugaacuacuacgguaaacaagaaaacugguacucccucaaaaaaaacucacgcucucucggagaaaacgacgacggcaacaacaacaacggcgacaacggacgagaaggcaaagacgaagacaaacgagacggcaacaacgaagacaacgaaaaacuccgaaaaccaaaacacaaaaaacuaaaacaacccgcagacgggaacccagaccccaacgccaaccccaacguggacccaaacgcaaaccccaacgucgaccccaacgcaaaccccaacgucgaccccaacgcaaaccccaacgcaaacccaaacgccaacccaaacgcaaacccaaacgccaacccaaacgcaaaccccaacgcaaaccccaacgccaaccccaacgccaacccaaacgcaaaccccaacgcaaacccaaacgcaaaccccaacgccaacccuaacgcaaauccaaacgccaacccaaacgccaaccccaacgcaaacccaaacgccaacccaaacgucgacccaaacgccaacccgaacgcaaacccaaacgccaaccccaacgccaaccccaacgccaacccaaacgcgaacccaaacgcaaacccaaacgccaacccaaacgcaaaccccaacgccaacccgaacgccaacccuaacgccaaccccaacgcaaacccgaacgcaaaccccaacgccaaccccaacgccaacccaaacgcaaaccccaacaaaaacaaccaaggcaacgggcaaggacacaacaugcccaacgacccuaaccguaacguagacgaaaacgccaacgccaacaacgcagucaaaaacaacaauaacgaagaaccaucagacaaacacauaaccgaauaccugaaaaaaauccaaaacucccucucaacagaauggucacccugcuccgucaccugcgguaacggcauccaaguccgcaucaaacccggcuccgccggaaaauccaagaacgaacucgacuacgaaaacgacauugaaaaaaaaauaugcaaaauggagaaaugcucuucggucuucaauguagucaacuccuccauaggacucaucaugguccucuccuuccuguuccucaacuaa

SEQ ID NO: 5814 - RNA, 1251 nt, Artificial Sequence
  derived and/or modified CDS sequence (opt11) from Pf(Tz93-009)__BAM84750.1__CSP
augaugcgaaagcucgcaauacucuccguaucaagcuuccuuuucgucgaagcccucuuccaagaauaccaaugcuacggcagcuccuccaacacccgcguacuaaacgaacucaacuacgacaacgccggcaccaaccuauacaacgaacucgaaaugaacuacuacggaaaacaagaaaacugguacagccucaaaaaaaacucacgcucacucggagaaaacgacgacggcaacaacaacaacggcgacaacggcagagaaggaaaagacgaagacaaaagagacggcaacaacgaagacaacgaaaaacuucggaaacccaaacacaaaaaacuaaaacaaccaggcgacggcaaccccgacccaaaugccaacccaaacguagacccaaacgccaaccccaacgucgacccgaacgccaacccaaacgucgacccgaacgcgaacccaaacgccaacccaaacgcaaaccccaacgcaaaucccaacgcaaacccaaacgcuaaccccaacgcaaacccaaacgccaaccccaacgccaaccccaacgcgaacccaaacgccaaccccaacgcaaacccaaacgcaaauccgaacgcuaaccccaacgcaaaccccaacgccaaccccaacguagaccccaacgcaaacccaaacgccaaccccaacgccaaccccaacgcaaacccaaacgcaaaccccaacgcaaaccccaaugcgaaucccaacgccaaccccaacgccaacccaaacgcaaaccccaacgccaacccaaacgccaaccccaacgcgaaccccaacgccaaccccaacgcaaaccccaacgccaaccccaacgccaaucccaacgcaaacccaaaugccaauccgaacaagaauaaccaaggcaacggccaaggccacaacaugcccaacgacccaaaccgcaacguagacgagaacgccaacgccaacaacgccgucaaaaacaacaacaacgaagagccuucagacaaacacaucaaagaguaccucaccaaaauaaaaaacucuaucuccacagaauggucccccugcagcgugacaugcggcaauggaauacaaguacgaauaaaaccaggcuccgccaacaaaccaaaagacgaacuagacuacgaaaacgacaucgaaaaaaaaaucugcaaaauggaaaaaugcuccucagucuuuaacguagucaacagcuccauaggccucauaaugguccucucauuccuauuccuuaacuaa

SEQ ID NO: 5815 - RNA, 1251 nt, Artificial Sequence
  derived and/or modified CDS sequence (opt11) from Pf(Van98M305-147)__BAM85260.1__CSP
augaugaggaaacuagccauccuguccgucuccuccuuccucuucguagaagcccucuuccaggaauaccaaugcuacggaagcucauccaacacccgcguacuaaacgaacucaacuaugacaacgccggaacaaaucuauacaacgaacucgaaaugaacuacuacggaaaacaagaaaacugguacucacuaaaaaaaaacucccgcucccucggggaaaaugacgacggcaacaacaacaacggggacaacggcagagaaggcaaagacgaagacaaacgagacggcaacaacgaagacaacgaaaaacugcgaaaacccaaacacaaaaaacucaaacaaccaggcgacggcaacccagaccccaacgccaacccaaacgucgaccccaacgcaaaccccaacgucgacccgaacgcgaaccccaacguugaucccaacgccaacccaaacgcgaacccaaacgcuaaccccaacgcgaacccaaacgccaaccccaacgccaaccccaacgccaacccaaacgccaaccccaacgccaaccccaacgcaaacccaaacgcaaacccaaacgccaaccccaacgcaaaccccaaugcaaacccaaacgcgaaccccaacgccaaccccaacguagacccaaacgccaacccaaacgccaacccaaacgccaacccgaacgcaaacccgaacgcaaacccaaacgcgaaccccaacgccaaccccaacgcgaaccccaacgccaaccccaacgccaacccaaacgcaaaccccaacgcaaaccccaacgccaaccccaacgccaaccccaacgcgaaucccaacgccaacccaaacgccaaccccaacgcaaaccccaacgccaacccaaacaaaaacaaccaaggcaacggccaaggacacaacaugccaaacgaccccaaccgcaacguagacgaaaacgccaacgcaaacaaugccgucaaaaacaacaacaacgaagaacccucggacaaacacaucgaacaauaccuaaaaaaaauccaaaauucccucuccaccgaauggucacccugcucugucacuugcggcaacggcauacaagucagaauaaaacccggcuccgcagacaaaccgaaagaccaauuagacuacgaaaacgacauagaaaaaaaaaucugcaaaauggagaaaugcagcuccguauucaacgucgucaacuccucaauaggacucauaaugguccuaucauuccuauuccuaaacuag

SEQ ID NO: 5816 - RNA, 1251 nt, Artificial Sequence
  derived and/or modified CDS sequence (opt11) from Pf(Van98P226-97)__BAM85298.1__CSP
augaugcgcaaacucgccauccuaucagucucaagcuuccucuucgucgaagcacuauuccaagaauaccaaugcuacggcuccucaagcaacaccagaguccucaacgaacucaacuacgacaacgcgggcaccaaccucuacaacgaacucgaaaugaacuacuacggaaaacaagaaaacugguacucccucaaaaaaaacucccgcucgcuaggcgaaaacgacgacggaaacaacaacaacggagacaacggccgagaaggcaaagacgaagauaaacgcgacgguaacaacgaagacaacgaaaaacuccgcaaacccaaacacaaaaaacuaaagcaacccggagacggcaacccagaccccaacgccaacccaaacguugacccaaacgcaaaccccaacgucgaccccaacgccaacccaaacgucgacccaaacgccaacccaaacgccaacccgaacgcuaacccaaacgccaaccccaacgccaaccccaacgcaaacccuaacgccaaccccaacgccaacccgaacgccaacccaaacgcaaacccaaacgccaacccuaacgccaaccccaacgccaaucccaacgccaacccaaacgcgaacccaaacgccaacccuaacgcaaacccaaacgccaaccccaacgcuaaccccaacgccaacccaaacgccaaccccaacgccaacccaaacgcgaaccccaacgccaacccaaacgccaacccaaacgccaaccccaacgcaaacccaaacgcaaacccaaacgcuaauccaaacgccaaccccaaugcgaacccaaacgcaaaccccaacgcgaaccccaacgccaaccccaacgcaaaccccaacgcaaaccccaacaaaaacaaccaaggcaacggccaaggccacaacaugccaaacgaucccaaccgaaacgucgacgaaaaugccaacgccaacaacgccgucaaaaacaacaacaaugaagaacccagcgacaaacacaucgaacaauaccucaaaaaaauacaaaacagccucucaacagaauggagccccugcuccguaaccugcggcaacggcauccaaguacgcaucaaacccgguucggccaauaaaccaaaagacgaauuagacuacgaaaacgacauagaaaaaaaaaucugcaaaauggaaaaaugcuccucaguauucaacgucgucaacuccucgaucggacuaauaaugguccucuccuuccuuuuccucaacuag

SEQ ID NO: 5817 - RNA, 1251 nt, Artificial Sequence
  derived and/or modified CDS sequence (opt11) from Pf(Yaounde)__AAN87614.1__CSP
augaugcgaaaacuagccauccuuucaguuucaucauuccucuucgucgaagcacucuuccaagaauaccaaugcuacggcuccucaagcaacacccgcguacucaacgaacucaacuacgacaacgcgggcacuaaucuauacaacgaacuagaaaugaacuacuacggcaaacaagaaaacugguacucccuaaaaaaaaacucccgaucccuaggcgaaaacgacgacggcaacaacaacaacggcgacaacggccgcgaaggaaaagacgaagacaaacgcgacggaaacaacgaagacaacgaaaaacuccgcaaaccuaaacacaaaaaacuuaaacaacccgcagacggaaacccagaccccaacgccaacccaaacguagaccccaacgccaaucccaacgucgacccuaacgcaaaccccaacgucgaccccaacgcaaacccaaacgccaacccgaacgcaaaccccaacgcaaacccuaacgcaaaucccaacgccaaccccaacgccaaccccaacgccaaccccaacgccaaccccaacgccaacccaaacgcgaacccuaacgccaaccccaacgccaacccgaacguagacccaaacgcgaacccgaacgccaacccaaacgccaacccaaacgccaacccgaacgccaacccaaaugcaaaccccaacgcaaacccaaaugcaaacccaaacgcaaaccccaacgcaaaccccaacgcaaaccccaacgccaacccgaaugcaaaccccaacgcgaaccccaacgcaaaccccaacgccaacccaaacgccaaccccaacgccaaccccaacgccaaccccaacgcgaacccgaacgcaaacccaaacgcaaacccaaacaaaaacaaccaaggcaacggccaaggccacaacaugcccaacgaccccaaccgaaacgucgacgaaaacgcaaacgccaacaacgcagucaaaaacaacaacaacgaagaaccaucagaccaacacauagaaaaauaccucaaaauuaucaaaaacucccuaucgaccgaauggucacccugcuccguaaccugcggaaacggcauccaagucagaaucaaacccggaucagcaaacaaacccaaagaccaacucgacuacgccaacgacaucgaaaaaaaaaucugcaaaauggaaaaaugcagcuccgucuucaacguaguaaacuccucaaucggccucaucaugguacuauccuuucuguuccuaaacuaa

SEQ ID NO: 5818 - RNA, 1248 nt, Artificial Sequence
  derived and/or modified CDS sequence (opt11) from Pf(A98)__ACO49328.1__CSP
augagaaaacuagcaauccucucaguuagcagcuuccuauucgucgaggcccuuuuccaagaauaccaaugcuacggcucaucaagcaacacccgcguacuaaacgaacucaacuacgacaacgccggcacaaaccuguacaacgaacuagagaugaacuacuacggaaaacaagaaaacugguacucccuaaaaaaaaacucucgcucgcucggagagaaugacgauggaaacaacaacaacggcgacaacggcagagaaggaaaagacgaagacaaacgugacgggaacaacgaagacaacgaaaaacuacgcaaacccaaacauaagaaacucaaacaaccaggcgacggaaaccccgaccccaacgccaaccccaacgucgacccaaacgcaaaccccaacgucgaccccaacgcuaaccccaaugucgaccccaacgccaaccccaacgccaaccccaacgccaacccgaacgccaacccuaacgccaacccaaacgcaaacccaaacgcaaacccaaacgcgaacccgaacgcaaacccaaacgccaacccaaacgccaaccccaacgccaacccuaacgccaacccgaacgccaaccccaacgccaacccaaacgcaaacccaaacgccaacccaaacgcaaacccaaacgcaaaccccaacgcaaaccccaacgccaacccaaacgccaacccaaacgcaaaccccaacgcaaaccccaacgccaacccaaacgcaaacccaaacgccaacccaaacgcaaaccccaacgcaaaccccaacgccaacccgaacgccaaccccaacgcaaaccccaacgccaaccccaacgccaaccccaaugccaacccaaaugccaacccaaacaaaaacaaccaaggcaacgggcaaggccacaacaugcccaacgacccaaaccgcaacguagacgaaaacgccaacgccaacaacgcagucaaaaacaacaacaacgaagaaccaucagacaaacacauagaacaauaccuaaaaaacauacaaaacucacuauccaccgaauggucacccugcagcgucaccugcggcaacggcauccaaguacgcaucaaacccggcuccgcuaacaaacccaaagacgaacuggacuacgaaaacgacauagaaaaaaaaaucugcaaaauggaaaaaugcagcucaguauucaacguagucaacagcuccaucgggcucaucaugguacucagcuuccuauuccucaacuaa

SEQ ID NO: 5819 - RNA, 1248 nt, Artificial Sequence
  derived and/or modified CDS sequence (opt11) from Pf(B60)__ACO49339.1__CSP
augagaaaauuagccauacucucagucuccuccuuccuuuucgucgaagcacuauuucaagaauaccaaugcuacggcucaucauccaacaccagaguacugaacgaacuaaacuacgacaacgccggcaccaaccucuacaacgaacucgaaaugaacuauuacggcaaacaagagaacugguacagccucaaaaaaaacucacgcucccuaggagaaaacgacgacggcaacaacaacaacggcgacaacggccgagaaggcaaagacgaagacaaacgagacggcaacaacgaagacaacgagaaacuacgaaaacccaagcacaaaaaacucaaacaaccaggcgacggcaaccccgacccaaacgcgaacccaaacgucgaccccaacgcaaaccccaacgucgaccccaaugccaacccaaacgucgaccccaacgcaaaccccaacguagaccccaacgccaacccgaacgcaaaccccaacgccaaccccaacgccaaccccaacgccaaccccaacgccaacccaaacgcaaaccccaacgcaaacccgaacgccaaucccaacgccaacccuaacgccaacccaaacgccaacccaaacgccaaccccaacgccaaccccaacgccaaccccaacgcuaacccaaacgccaaccccaacgccaacccaaacgccaaccccaacgccaaccccaacgccaaccccaacgccaacccaaacgccaaccccaacgcgaacccaaacgccaaccccaacgccaacccaaacgccaaccccaacgccaaccccaacgccaaccccaacgccaaccccaacgccaacccaaacgcaaacccaaacgccaacccaaacgcgaacccgaacaaaaacaaccaaggcaacggccaaggccacaacaugcccaacgaccccaaucgcaacguagacgaaaacgccaacgccaacaacgccguaaaaaacaacaacaacgaagagcccuccgacaaacacaucgaacaauaccugaaaaaaauacaaaacucacucuccacugaauggucccccugcagcgucaccugcggcaacggcauacaaguccgaaucaaaccaggauccgccaacaaacccaaagacgaacucgacuacgaaaacgacauugaaaaaaaaaucugcaaaauggagaaaugcuccucugucuucaacgucgucaacuccucaauuggacucauaaugguccucucauuccuauuccucaacuaa

SEQ ID NO: 5820 - RNA, 1248 nt, Artificial Sequence
  derived and/or modified CDS sequence (opt11) from Pf(TM323)__ACO49493.1__CSP
augcgaaaacucgccaucuuaagcgucucauccuuccucuucgucgaagcccuuuuccaagaauaccaaugcuacggcuccucauccaacaccagaguacuaaacgaacucaacuacgacaacgccggcaccaaccuguacaacgaacuagaaaugaacuauuacggaaaacaagaaaacugguacucccucaaaaaaaacucacgcucccucggcgaaaacgacgauggcaacaacaacaacggcgacaacggacgagaaggcaaagaugaagauaaaagagacggcaacaacgaagacaacgaaaaacuccgcaaacccaaacacaaaaaacugaaacaacccggagacggcaaccccgaccccaacgcaaacccaaacgucgacccaaaugccaaccccaacguagaccccaacgcaaacccuaacguggaccccaaugccaacccgaacgccaaccccaacgccaacccaaacgcaaacccgaacgcaaaccccaacgccaacccaaacgccaaccccaacgcuaaccccaacgccaaccccaacgccaacccaaacgccaacccaaacgccaacccaaacgccaaccccaacgcgaacccaaacgcaaaccccaaugccaacccaaacgccaaccccaacgccaaucccaacgccaaccccaacgccaaucccaacgcaaacccaaacgccaaccccaacgccaaccccaacgccaacccaaacgcaaaccccaacgccaacccaaacgccaacccuaacgcaaacccaaacgcaaaccccaacgcaaacccgaacgcgaaccccaacgccaaccccaacgccaacccaaacgccaaccccaacgccaacccaaacgccaacccgaacaaaaacaaccaaggcaacggccaaggacacaacaugccaaacgaucccaaccgaaacguagacgaaaacgccaacgccaacaacgccguuaaaaacaacaacaacgaagaaccauccgacaaacacaucgaaaaauaccucaaagaaauccaaaacucccucucgaccgaauggucccccugcuccguaacaugcggcaacggcauccaaguccgcaucaaaccaggcuccgccaacaaacccaaagaccaacuagacuacgaaaacgacauagaaaaaaaaaucugcaagauggagaaaugcuccucagucuucaacgucgucaauuccuccaucggccucaucaugguccucuccuuccuuuuccugaacuaa

SEQ ID NO: 5821 - RNA, 1239 nt, Artificial Sequence
  derived and/or modified CDS sequence (opt11) from Pf(22)__AGR53780.1__CSP
augaugcgcaaacuagccauccucucagucuccagcuuccucuucguagaagcacucuuccaagaauaccaaugcuacggcucccccagcaacacccggguccucaacgaacucaacuacgacaacgccggcacaaaccuauacaacgaacuagaaaugaacuacuauggcaaacaagaaaacugguacucacuaaaaaaaaacucacgaucgcuaggagaaaacgacgacggaaacaacaacaacggagauaauggaagggaaggaaaagacgaagacaaacgcgacggaaacaaugaagacaacgaaaaacuccgcaaaccaaagcacaaaaaacucaaacaacccgccgacggcaaccccgacccaaacgccaaccccaacguagaccccaacgcaaauccaaacgucgacccgaacgcaaacccaaacguggacccaaacgcaaacccaaacgccaaccccaacgccaacccaaacgccaaccccaacgcgaacccuaacgcgaaccccaacgcgaaccccaacgcgaacccaaacgccaaccccaacgccaaccccaacgcaaacccaaacgccaaccccaacgcaaacccgaacgccaaccccaacgccaaccccaacgucgacccaaacgccaaccccaacgccaaccccaacgccaaccccaacgccaacccaaacgcaaacccgaacgcaaaccccaacgccaaccccaacgccaacccgaacgcaaaccccaacgcaaacccgaaugcaaacccaaacgcgaaccccaacgccaaccccaacgccaaccccaacgccaaccccaacgccaaccccaacgccaaccccaacgccaaccccaacgccaaccccaacaaaaacaaccaagggaacggucaaggacacaacaugcccaacgaccccaaccgcaacgucgacgaaaacgccaaugcaaacaacgccgucaaaaacaacaacaacgaagaacccucugacaaacacaucgaacaguaccuaaaaaccaucaaaaacucccucuccaccgaauggucccccugcuccguaaccugcggcaacggaauccaaguacgcaucaaaccaggcucagcaaacaaacccaaagacgaacucaacuacgaaaacgacauugagaaaaaaaucugcaaaauggaaaaaugcagcuccgucuucaacguagucaacagcucaaucggccucaucauggucuuaucauucuuauuccuaaacuaa

SEQ ID NO: 5822 - RNA, 1239 nt, Artificial Sequence
  derived and/or modified CDS sequence (opt11) from Pf(Amazonas)__AAN87605.1__CSP
augaugcgcaaacuagcuauccucuccgucucgagcuuccucuucgucgaagcccuauuccaagaauaccaaugcuacggcuccuccagcaacacccgcguccucaacgaacucaacuacgacaacgccggcaccaaccuauacaacgaacuagaaaugaacuacuacgggaaacaagaaaacugguacucccuaaaaaaaaacucccgaucccucggagaaaacgacgacggcaacaacaacaacggggacaacggccgagaaggaaaagacgaagacaaacgcgacggaaacaacgaagauaacgaaaaacuccggaaaccaaaacacaaaaaacuaaaacaacccgccgacggcaacccagaccccaacgcaaaccccaacguagacccgaacgccaaccccaacguagaccccaacgccaacccaaacguagaccccaacgcaaaucccaacgcaaaccccaaugccaaccccaacgcaaaccccaacgccaaccccaacgccaacccgaacgcaaaccccaacgcaaacccaaacgccaacccuaacgcaaacccaaacgcaaacccaaacgccaacccaaacgcgaacccaaacgcaaaccccaacgcaaaccccaacgucgacccgaacgccaacccaaacgccaacccaaacgcaaaccccaacgccaaccccaacgcaaacccaaacgcuaacccaaacgccaacccaaacgccaaccccaacgccaaucccaacgcaaaccccaacgcaaaccccaacgccaaccccaacgccaacccgaaugcaaacccuaacgccaacccaaacgcaaaccccaacgccaacccaaacgccaacccaaacgccaaccccaacaaaaacaaccaaggaaacggccaaggccacaacaugccgaacgacccaaauagaaacgucgacgaaaacgcaaacgcaaacaacgccgucaagaacaacaacaacgaagaacccucggaccaacacaucgaaaaauacuuaaaacgcauccaaaacucccucuccacagaauggucccccugcagcgucaccugcggaaacggcauccaaguacguaucaaaccuggcuccgccaacaaacccaaagacgaacucgacuacgaaaaugacaucgaaaaaaaaaucugcaaaauggaaaaaugcuccuccgucuucaacguagucaacucaucaaucggccucaucaugguacucucauuccuauuccuuaacuaa

SEQ ID NO: 5823 - RNA, 1239 nt, Artificial Sequence
  derived and/or modified CDS sequence (opt11) from Pf(Amazonas)__AAN87598.1__CSP
augaugcgaaaacucgccauacucucggucagcucauuccucuucguagaagcacucuuccaagaauaccaaugcuacgggucaucaagcaacaccagaguccucaacgaacucaacuacgacaacgcgggcaccaaccuauacaacgaacuagaaaugaacuacuacggaaaacaggaaaacugguacagccuaaagaaaaauucacgcucccuaggagaaaacgacgacggaaacaacaacaacggagacaacggcagagaagggaaagacgaagauaaacgagacggcaacaacgaagacaacgaaaaacuacgcaaaccuaaacacaaaaagcuaaaacagcccgcagacggaaacccagaccccaacgccaauccaaacguagacccaaacgcgaacccaaacgucgaccccaacgcaaacccaaacguagaccccaacgcgaacccgaacgcgaacccaaacgcaaacccaaacgcaaacccaaacgccaacccaaacgcaaacccgaacgcaaacccaaacgccaacccaaacgcgaaccccaacgcaaacccaaacgcaaacccaaacgccaacccaaacgcgaacccaaacgcaaacccgaacgccaacccgaacguggacccgaacgcaaacccaaacgcaaaccccaacgcaaacccaaacgcgaacccgaacgcaaaccccaacgcaaaccccaacgccaacccaaacgcaaacccgaacgcaaacccaaacgcgaacccgaacgcaaaccccaacgcaaacccaaacgccaacccaaacgccaacccaaacgccaacccgaacgcaaaccccaacgcaaacccaaacgcaaacccaaacgcaaacccaaacaaaaacaaccaaggaaacggccaaggccacaacaugccaaacgacccaaaccgcaacgucgacgaaaacgccaacgccaacaacgcagucaaaaacaauaacaacgaagaacccuccgacaagcacauaaaagaauaccucaaaauaauccaaaacucgcucucaacagaauggucccccugcagcguaaccuguggcaacggcauacaaguacgcauuaaacccggauccgcaggaaaaccaaaagacgaacucgacuacgcaaacgacauagaaaagaaaaucugcaaaauggaaaaaugcagcucgguauucaacguaguaaacuccuccaucggccucauaaugguacuaucauuccuauuccuuaacuaa

SEQ ID NO: 5824 - RNA, 1239 nt, Artificial Sequence
  derived and/or modified CDS sequence (opt11) from Pf(Asembo Bay)__AAN87611.1__CSP
augaugcggaaacuagccauacucuccgucucaucauuccucuucguagaagcacuauuccaggaauaccaaugcuacggcagcucauccaacacccgaguccucaacgaacucaacuacgacaacgccggcacaaaccuauacaacgaacuggaaaugaacuacuacgguaaacaagaaaacugguauagccucaaaaaaaacucucgaucccuaggagaaaacgacgacggcaacaacaacaacggagacaacggcagagaaggcaaagacgaagauaaaagagacggcaacaacgaagacaacgaaaaacugagaaaacccaaacacaagaaacucaaacaaccagccgaugggaacccggaccccaacgcaaacccaaacgucgacccaaacgcaaaccccaacguagaccccaacgcaaaccccaacguggaccccaacgcaaacccgaacgccaaccccaacgccaaccccaacgccaaccccaacgccaaccccaacgcaaaccccaacgcaaaucccaacgccaaccccaacgccaaccccaacgcaaaccccaacgccaaccccaacgcaaacccgaacgccaaccccaacgcaaacccaaacgcaaacccaaacgccaacccaaacgcaaacccaaacgucgaccccaacgcaaacccaaacgcaaaccccaacgcaaacccaaacgcaaauccaaacgccaacccaaaugcaaacccaaacgcaaaccccaacgcaaacccgaacgcaaacccaaacgccaacccgaacgccaacccaaacgccaaccccaacgccaaccccaacgcgaaccccaacgccaaccccaacgccaacccaaacgcgaacccaaacaaaaauaaccaagggaacggacaaggccacaacaugccaaacgaccccaaccgcaacgucgacgaaaacgcaaacgccaacaacgcagucaaaaacaacaacaacgaagagcccuccgacaaacauaucgaacaauaccucaaaauaaucaaaaacucacucucaaccgaguggucccccugcagcguaaccuguggaaacggcauacaagugcgcauaaaacccggaucagccaacaaaccaaaagacgaacuagacuacgccaacgacaucgaaaaaaaaauaugcaaaauggaaaaaugcagcuccguauucaacgucgucaacagcucaaucggccuaauaaugguacucuccuuccuauuccugaacuaa

SEQ ID NO: 5825 - RNA, 1239 nt, Artificial Sequence
  derived and/or modified CDS sequence (opt11) from Pf(Asembo Bay)__AAN87589.1__CSP
augaugcggaaacuagcaauacuaucagucuccagcuuucuauucgucgaagcacuuuuccaagaauaccaaugcuacggauccucaagcaacacccgaguccucaacgaacuaaacuacgacaacgcuggaaccaaccucuacaacgaauuagaaaugaacuacuacggcaaacaagaaaacugguacagccucaaaaaaaacucacgcucccucggagaaaacgacgacggcaacaacaacaacggcgacaacggccgcgaaggaaaagacgaagacaaacgggacggcaacaacgaagacaacgagaaacuccgaaaacccaagcacaaaaaacugaaacaaccagccgacggcaaccccgacccgaacgccaaccccaacguggaccccaacgccaaccccaacgucgaccccaacgcgaaccccaacgucgacccaaacgcuaacccaaacgccaaccccaacgccaaccccaacgcgaacccaaacgccaacccaaacgccaacccaaacgcaaaccccaacgccaacccaaacgccaacccaaaugccaaccccaacgccaacccaaacgucgaccccaacgccaaccccaacgccaacccaaacgcaaaccccaacgccaacccaaacgccaacccaaacgccaaccccaacgcuaaccccaacgcuaacccaaacgccaacccaaacgcgaacccaaacgcaaaccccaacgccaaccccaacgcgaaccccaacgccaaccccaacgcaaaccccaacgccaaccccaacgcaaacccaaacgcgaaccccaacgcaaaccccaacgcaaaccccaacgcuaaccccaacgccaacccaaacgccaacccgaacaaaaacaaccaaggaaacgggcaaggccacaacaugcccaacgacccaaaccgcaacgucgacgaaaacgccaacgccaacaacgccgucaaaaacaacaacaacgaagaacccucagaccaacacaucgaaaaauaccucaaaaaaauacaaaacucccucuccaccgaauggucccccugcuccgucaccugcggcaacggaauacaaguucgcaucaaacccggauccgcaaacaaaccaaaagaccaacuggacuacgccaacgacauagaaaaaaaaaucugcaaaauggaaaaaugcucauccguauucaacgucgucaacucaucaaucggccucaucaugguacucuccuuccuauuccucaauuaa

SEQ ID NO: 5826 - RNA, 1239 nt, Artificial Sequence
  derived and/or modified CDS sequence (opt11) from Pf(BrB1)__BAM85131.1__CSP
augaugcgaaaacuggccauccucuccgucuccucauuccucuucgucgaagcacucuuccaagaauaccaaugcuacggauccucauccaacacacgcguccuaaacgaacucaacuacgacaacgccggaacgaaccuauacaacgaacuagagaugaacuacuacggcaaacaggaaaacugguauucccugaaaaaaaacucacgcucccucggcgaaaacgacgacggcaacaacaacaacggcgacaacggccgcgaaggcaaagacgaggacaaacgcgacggcaacaacgaagacaacgaaaaacuucgaaaacccaaacacaaaaaacucaaacagcccgcugauggaaaccccgaccccaacgccaacccaaacgucgaccccaacgccaacccaaacguagaccccaacgcaaauccaaacguagaccccaacgcaaacccgaacgccaacccaaacgccaaccccaacgcaaaccccaacgcaaacccaaacgcaaacccaaacgccaauccgaacgccaacccaaacgccaaccccaacgcaaaccccaacgccaaccccaacgccaaccccaacgccaaccccaacgccaacccaaacgccaacccuaacguagacccaaacgcaaaccccaacgcgaacccaaacgcaaaccccaacgccaaccccaacgcaaaccccaacgccaaccccaacgccaacccaaacgccaaccccaacgcgaaccccaacgccaacccaaacgcaaaccccaacgccaaccccaacgcgaaccccaaugccaacccaaacgccaacccaaacgccaaccccaacgcaaaccccaacgcuaacccgaacgcaaaccccaacaaaaacaaccaagggaacggccaaggccacaacaugccaaacgacccaaaccgcaacgucgacgaaaacgcaaacgccaacaacgccguuaaaaacaacaacaacgaagaaccauccgacaaacacaucgaacaauaccuaaaaaaaaucaaaaacuccaucuccacagaauggucacccugcuccgucaccugcggaaacggcauacaaguccgaaucaaacccggcuccgccaacaaacccaaagaugaacuagacuaugaaaacgacaucgaaaaaaaaaucugcaaaauggaaaaaugcagcucagucuucaacguaguaaacagcucgaucggacucaucaugguccucucauuccuguuccucaacuaa

SEQ ID NO: 5827 - RNA, 1239 nt, Artificial Sequence
  derived and/or modified CDS sequence (opt11) from Pf(BrP9)__BAM85145.1__CSP
augaugcgcaaacucgccauacucucagucuccuccuuccucuucgucgaagcccucuuccaagaauaccaaugcuacggcagcucaagcaacacccgaguccucaacgaacuaaacuacgacaacgccggaacaaaccuauacaacgaacuagaaaugaacuacuacggaaaacaagaaaacugguacucacugaaaaaaaacucacgcucccucggagaaaacgacgaugguaacaacaacaacggcgacaacggccgagaaggcaaagacgaagacaaacgagacggaaacaacgaagacaacgaaaaacuacgcaagcccaaacacaaaaaacucaaacaaccaggcgacggcaacccggacccaaaugccaacccaaacguagaccccaacgcaaaccccaacguggacccaaacgccaacccgaacgucgacccaaacgccaaccccaacgccaacccaaacgccaaccccaaugcaaacccaaacgccaacccaaacgcaaacccaaaugcaaaucccaacgccaacccaaacgccaaccccaacgccaaccccaacgcaaaccccaacgccaacccaaacgccaaccccaacgcgaacccaaacgcaaaucccaacgucgacccaaacgccaaccccaacgcaaaccccaacgccaacccaaacgcaaacccaaacgccaaccccaacgccaacccaaacgccaacccaaacgccaacccaaacgccaauccaaacgcaaacccaaacgcaaaccccaacgcaaacccuaacgccaaccccaacgccaacccaaacgcaaacccgaacgccaaccccaacgccaaccccaacgccaaccccaacgccaaccccaacaaaaacaaccaaggcaacggccaaggccacaacaugcccaacgaucccaaccgaaacgucgacgaaaacgcaaacgccaacaacgcggucaaaaacaacaacaacgaagaaccaagcgacaaacacaucgaacaauaccugaaaaaaaucaaaaacuccauaucaaccgaauggucccccugcagcguaaccugcggaaacggcauccaaguccgcaucaaaccaggcagcgccaacaaaccaaaagacgaacuggacuacgaaaacgacaucgaaaaaaaaaucugcaaaauggagaaaugcagcucagucuucaauguagucaacuccuccauaggccuaauaaugguccucuccuuccucuuccuaaacuaa

SEQ ID NO: 5828 - RNA, 1239 nt, Artificial Sequence
  derived and/or modified CDS sequence (opt11) from Pf(India)__AAN87606.1__CSP
augaugcgcaaacucgccauccucucagucuccucuuuccuauucgucgaagcccuauuccaagaauaccaaugcuacggcuccucaagcaacacccgaguccugaacgaauuaaacuaugacaacgcaggcaccaaccucuacaacgaacuagaaaugaacuauuacgggaaacaagaaaacugguacucccugaagaaaaacucacgcucccucggcgaaaacgaugauggcaacaacaauaacggcgacaacggccgggaaggcaaagaugaagacaaacgagacggcaacaacgaagacaacgaaaaacuacgcaaacccaaacacaagaaacucaaacaacccggcgacggcaacccagaccccaacgccaaccccaacguagacccaaacgcaaaccccaacguagacccaaacgcaaacccaaacguugacccaaacgccaacccaaacgccaacccgaacgcaaaccccaacgcaaacccaaacgcaaaccccaacgccaaccccaacgcaaaucccaacgcaaacccaaacgccaaccccaacgccaaccccaacgccaacccaaacgccaaccccaacgcaaacccaaacgccaacccaaacgccaacccaaacgucgacccaaacgccaacccaaacgccaacccaaacgccaaccccaacgcgaaccccaacgcaaaccccaaugccaacccaaacgccaaccccaacgcaaacccaaacgcaaacccaaacgcaaacccaaacgccaaccccaacgccaacccuaacgcaaauccaaacgccaaccccaacgccaaccccaacgcaaaccccaacgcaaacccgaacgccaaccccaacgccaaccccaacaaaaacaaccaagguaacggccaaggacacaacaugcccaacgaccccaaccgcaacgucgacgaaaacgccaaugccaacaacgccgucaaaaacaacaacaacgaagaacccuccgacaaacacaucgaaaaauaccucaaaaagauccaaaacucacuauccaccgaaugguccccaugcuccguaacaugcggcaacggcauccaaguacgcauaaaaccaggcucagccaacaaaccaaaagacgaacuagacuacgaaaacgacaucgaaaagaaaaucugcaaaauggaaaaaugcuccuccgucuucaacgucguaaacuccuccaucggucucauaaugguccucucuuuccucuuccucaacuaa

SEQ ID NO: 5829 - RNA, 1239 nt, Artificial Sequence
  derived and/or modified CDS sequence (opt11) from Pf(Pal97-007)__BAM84921.1__CSP
augaugagaaaacucgccauccucuccgucucgagcuuccuauucgucgaagcccuguuccaagaauaccaaugcuacggaagcucuuccaacacccgaguccucaacgaacucaacuacgacaacgcaggcacaaaccucuauaacgagcuggaaaugaacuacuacggaaaacaagaaaacugguacuccuuaaaaaaaaacucccgcucacuaggcgaaaaugacgacgguaacaacaacaacggugacaacggccgagaaggcaaagacgaagauaaaagagacggaaacaacgaagacaacgaaaaacuacgaaaacccaaacacaaaaaacucaaacaacccggagacggaaaccccgacccaaacgcgaaccccaacguagacccaaacgcgaaccccaacgucgacccaaacgcaaacccaaauguagaccccaaugccaaccccaacgccaauccuaacgcgaacccgaacgcaaacccaaacgccaaccccaacgcaaacccaaacgcaaacccaaacgcgaacccaaacgcaaaccccaacgccaaccccaacgcgaaccccaacgcaaacccaaacgccaacccaaacgccaacccgaacgcaaaccccaacgucgacccaaacgccaaccccaacgcaaacccaaacgccaaucccaacgcgaacccaaacgcgaacccaaacgccaaccccaacgcaaacccaaacgcaaauccaaacgcaaacccgaacgcaaacccaaacgccaaccccaacgccaacccgaacgcuaaccccaacgccaacccaaacgccaacccaaacgccaaccccaacgccaacccaaacgcaaaccccaacgcaaaccccaacaagaacaaccaaggaaacggacaaggacacaacaugcccaacgaccccaaccgcaacgucgacgaaaacgccaacgcaaacaacgccguaaaaaacaacaacaaugaagaaccaucagacaaacacaucaaagaauaccucacaaaaaucaaaaacuccaucucgaccgaaugguccccaugcucagucaccugcggaaacggaauacaaguccgcaucaaacccggcucggccaacaaacccaaagacgaacuagacuacgaaaacgacaucgaaaaaaaaaucugcaaaauggaaaaaugcagcucagucuucaacguagucaacagcuccaucggacucauaaugguccucucguuccucuuccuaaacuaa

SEQ ID NO: 5830 - RNA, 1239 nt, Artificial Sequence
  derived and/or modified CDS sequence (opt11) from Pf(Pal97-037)__BAM84929.1__CSP
augaugcgcaaacuagcaauccucagcgucuccagcuuccuauucguagaggcccucuuccaagaauaccaaugcuacggauccuccagcaacacccguguccugaacgaacucaacuacgacaacgccggcacaaaccucuacaacgaacucgaaaugaauuacuacgggaaacaagaaaacugguacagccuaaaaaaaaacucccgcucccuaggcgaaaacgacgacggcaacaacaacaacggcgacaacggccgcgaaggcaaagaugaagacaaacgagacggcaacaacgaagacaacgaaaaacucagaaaaccaaaacacaaaaaacucaaacaaccaggcgacggcaacccagacccaaacgcaaaccccaacguagacccaaacgcgaaccccaacgucgaccccaacgccaacccaaacgucgaccccaacgccaaccccaaugccaaccccaacgccaacccaaacgccaacccaaacgccaaccccaacgcuaaccccaacgcaaacccgaacgccaacccaaacgcgaacccaaacgcaaacccaaacgcuaacccaaacgccaaccccaacgccaaccccaacgcaaaccccaacgcaaacccaaacgucgacccaaacgccaacccaaacgccaaccccaacgccaacccaaacgcgaaccccaacgcaaaccccaacgccaaccccaacgccaacccaaacgcaaaccccaacgcaaacccaaacgccaacccaaacgcaaacccaaacgccaaccccaacgcaaaccccaacgcaaacccgaacgcaaaccccaacgcgaacccgaacgccaaccccaacgccaaccccaacgccaaccccaacaaaaacaaccaaggaaacggccaaggucacaacaugccaaacgacccaaacagaaacgucgacgaaaaugccaacgccaacaacgccgucaaaaacaacaacaacgaagaacccuccgaccaacacaucgaaaaauacauuaaaaagauccaaaacucccucuccaccgaauggucgcccugcagcgucaccugcggaaacggcauacaaguacgcauaaaaccaggcucagcagacaaacccaaaaacgaacuugacuaugaaaaugacauagaaaaaaaaaucugcaaaauggaaaaaugcucauccgucuuuaacgucgucaacagcuccaucggccucauaaugguacuaucauucuuauuccuaaauuaa

SEQ ID NO: 5831 - RNA, 1239 nt, Artificial Sequence
  derived and/or modified CDS sequence (opt11) from Pf(Pal97-052)__BAM84935.1__CSP
augaugcgaaaacucgccauacuaucaguuucaagcuuccuauuugucgaagcccucuuccaagaauaccaaugcuacggaucauccuccaacaccagaguccugaacgaacucaacuacgacaacgcuggcacaaaccucuacaacgaacuagaaaugaacuacuacggaaaacaggaaaacugguacuccuuaaaaaaaaacucacgcucccuaggcgaaaacgacgacggcaacaacaacaacggcgacaacggccgcgaaggcaaagacgaagacaaacgcgacggcaacaacgaagacaacgaaaaacuucgaaaacccaaacacaaaaaacuaaaacaacccggagacggcaacccagaccccaacgccaaccccaacgucgacccgaacgccaacccaaacgucgacccaaacgccaacccaaacguagaccccaacgccaaccccaacgccaacccaaacgccaacccaaacgcaaaucccaacgcgaacccaaacgccaacccgaacgcgaaccccaacgcaaaccccaacgccaacccgaacgcaaaccccaacgccaaccccaaugccaacccaaacgccaacccaaacgcaaacccaaacgccaacccaaacgucgacccaaacgccaaccccaacgcaaaccccaacgccaaccccaacgccaacccgaacgcaaacccaaacgccaaccccaaugcaaacccgaacgcaaaccccaacgcaaacccaaacgcaaacccaaacgccaacccaaacgcgaacccaaacgccaaccccaacgcaaaccccaacgccaaccccaacgccaacccaaacgccaaccccaacgccaacccgaacgcaaaccccaacaagaacaaccaaggcaacggacaaggccacaacaugcccaacgacccaaaccgcaacgucgacgaaaacgccaacgcaaacaacgccguaaaaaacaacaacaacgaagaacccuccgaccaacacaucgaaaaauaccucaaaauaauacaaaacucccucucaaccgaauggucacccugcucagucacuugcggcaacggaauccaaguccgcauaaaacccggcucggccgacaaaccaaaagaccaacucgacuacgccaacgacauagaaaaaaaaauaugcaagauggaaaaaugcagcucagucuuuaacgucgucaacuccucgaucggucuaaucaugguacuauccuuccuuuuccuaaacuaa

SEQ ID NO: 5832 - RNA, 1239 nt, Artificial Sequence
  derived and/or modified CDS sequence (opt11) from Pf(Sol95-351)__BAM85103.1__CSP
augaugcgcaaacucgccauacucuccguuuccuccuuccuuuucgucgaggcacucuuccaagaauaccaaugcuacggcuccuccucaaacacccgcguccuaaacgagcucaacuacgacaacgccggaaccaaccucuacaacgaacucgagaugaacuacuacggaaaacaagaaaacugguacucccucaaaaaaaacucccgaucccucggagaaaacgacgacggcaacaacaacaacggugacaacggcagagaaggcaaagacgaagacaaacgcgacggaaacaacgaagacaacgaaaaacuacgcaaacccaaacacaaaaaacucaaacaacccggcgacggcaacccagacccaaacgccaaccccaacguagaccccaacgccaaccccaacguagacccaaacgccaacccuaacguagaccccaacgcaaaccccaacgcaaacccaaacgcaaaccccaacgccaaccccaacgcaaaccccaacgccaacccaaaugcaaaccccaacgcaaacccaaacgccaaccccaacgcaaaccccaacgccaaccccaacgccaaccccaacgccaaccccaaugccaacccaaacgccaacccaaacgucgaccccaacgccaaccccaacgccaaccccaacgcuaacccaaacgccaaccccaacgcaaaccccaacgccaaccccaacgcaaaccccaaugccaaccccaacgccaaccccaacgccaaccccaacgccaaccccaacgcuaaucccaacgcaaacccaaacgccaaucccaaugcgaacccaaaugccaacccaaacgccaaccccaacgccaaccccaacgccaacccaaacaaaaacaaccaaggcaacggacaaggccacaacaugcccaacgaccccaaccgcaacgucgacgaaaacgccaacgcaaacaacgcaguaaaaaacaacaacaacgaagaacccuccgacaaacacauagaacaauaccucaaaaaaauccaaaacucccucucaaccgaauggucccccugcuccgucaccugcggcaacggcauacaaguacgaauaaaaccgggcucugccgacaaacccaaagaccaacucgacuacgaaaacgacaucgaaaaaaaaaucugcaaaauggaaaaaugcuccucagucuucaacgucgucaacuccuccauaggccuuaucaugguccucuccuuccuauuccucaacuaa

SEQ ID NO: 5833 - RNA, 1239 nt, Artificial Sequence
  derived and/or modified CDS sequence (opt11) from Pf(Tz03-038)__BAM84801.1__CSP
augaugcgcaaacuagccauacuuucggucuccagcuuccucuucgucgaagcccuauuccaagaauaccaaugcuacggcuccucaagcaacacccgcguccuaaacgaacuaaacuacgacaacgcaggcaccaaccucuauaacgaacuagaaaugaacuacuacggcaaacaagaaaacugguacagccugaaaaaaaacucccgcucccuaggagaaaaugacgacggcaacaacaacaacggagacaacggacgcgaaggcaaagacgaagacaaaagagacggcaacaacgaagacaacgaaaaacuacgcaaacccaaacacaaaaaacuaaaacagcccggcgacggcaaccccgacccaaacgcaaacccaaacguagaccccaacgccaaccccaacguggaccccaacgccaacccaaacguugaccccaacgccaaccccaacgcgaaccccaacgcuaacccaaacgcuaacccaaaugcaaaccccaacgccaaccccaacgccaaccccaacgccaaccccaacgcaaacccaaacgcaaaucccaaugccaacccgaacguugaccccaacgccaaccccaacgcgaacccgaacgcaaacccaaacgcaaacccaaacgccaacccaaacgccaaccccaacgccaacccaaacgcaaacccaaacgcaaacccaaacgccaacccaaacgcaaaucccaacgccaaccccaacgccaaccccaacgccaacccgaacgcgaacccaaaugcaaaccccaacgcaaacccaaacgcaaaucccaacgcaaaccccaacgccaaccccaacgcaaacccaaacgccaaccccaacgccaaccccaacaaaaacaaccaaggaaacggccaaggccacaacaugcccaacgaccccaaccgcaacgucgacgaaaacgccaacgccaacaaugccgucaaaaauaacaacaaugaagaacccuccgacaaacacauagaacaauaccuaaacaaaaucaaaaacucaaucagcaccgaauggucaccaugcuccgucaccugcggcaacggcauccaaguacgcauaaaaccaggaucagccaauaaacccaaagacgaacuaaacuacgaaaacgacaucgaaaaaaaaaucugcaaaauggaaaaaugcagcucgguauucaacguagucaauuccuccaucggccucaucaugguccuuagcuuccuauuccuaaacuaa

SEQ ID NO: 5834 - RNA, 1239 nt, Artificial Sequence
  derived and/or modified CDS sequence (opt11) from Pf(Tz03-076)__BAM84804.1__CSP
augaugcgcaaacucgccauccucucagucucaagcuuccuauucgucgaagcccuauuccaggaauaccaaugcuacggaagcucaagcaacacccgaguccugaacgaacucaacuaugacaacgccggcaccaaccucuacaacgaacucgaaaugaacuacuacggaaaacaagaaaauugguacucacugaaaaaaaacucgcgaucacucggagaaaacgacgacggcaacaacaacaacggcgauaacggccgcgaaggcaaagacgaagacaaacgagacggaaacaacgaagacaacgaaaaacuccgaaagccaaaacacaaaaaacuaaaacaacccggagacggaaacccagaccccaacgccaaccccaacgucgaccccaacgccaacccaaacgucgacccaaacgcaaaccccaacgucgacccaaacgcaaacccaaacgcaaaccccaacgcaaaccccaacgccaacccaaacgcaaaccccaacgccaaccccaacgccaaccccaacgccaaccccaacgcaaacccaaacgccaacccgaacgccaaccccaacgcaaaccccaacgcaaaccccaacgccaaccccaacgccaaccccaacguagaccccaaugcuaauccaaacgcaaacccuaacgccaaccccaacgccaaccccaacgccaaccccaacgccaacccaaacgccaacccuaacgcaaacccaaacgccaacccuaacgccaaccccaacgccaacccgaaugcaaacccaaacgccaaccccaacgccaaccccaacgccaaccccaacgcaaaucccaacgcaaaccccaacgcgaaccccaacgccaaccccaacaaaaacaaccaaggaaacggacaaggccacaacaugcccaacgaccccaaccgaaacgucgacgaaaacgccaacgcaaacaaugcagucaaaaacaacaacaaugaagaacccucggacaaacacauagaacaguaccucaaaacaaucaaaaauucccucuccaccgagugguccccuugcucagucacaugcggcaacggcauccaaguccgcaucaaaccaggaucugccaacaaacccaaagacgaacucaacuacgaaaacgacauagaaaaaaaaaucugcaaaauggaaaaaugcuccucaguauucaacguagucaacucauccauaggccuaauaaugguccucucauuccuguuccucaauuaa

SEQ ID NO: 5835 - RNA, 1239 nt, Artificial Sequence
  derived and/or modified CDS sequence (opt11) from Pf(Tz03-101)__BAM84806.1__CSP
augaugagaaaacuagccauccucucagucuccaguuuccucuucguagaagcacucuuccaagaauaccaaugcuacggcuccuccuccaacacccgaguccucaacgagcucaacuacgacaacgccggcaccaaccucuacaacgaacucgaaaugaacuacuacggcaaacaggaaaacugguacucccucaaaaaaaacucaagaucacucggagaaaacgacgacggcaacaacaacaacggagacaacggccgcgaaggcaaagacgaagacaaacgagacggcaacaacgaagacaacgaaaaacuccgcaaaccuaaacacaaaaaacuaaaacaaccaggcgacggaaaccccgaccccaacgcuaaccccaacguggacccgaacgcgaacccaaacguagacccaaacgccaaccccaacguagaccccaacgccaacccaaacgcaaacccaaacgccaacccaaacgcaaaccccaacgccaaccccaacgccaaccccaacgccaaccccaacgccaacccaaacgccaaccccaacgcgaaccccaacgccaacccaaacgcaaaccccaacgccaaccccaacgccaaccccaacgccaaccccaacgucgaccccaacgcgaacccaaacgcaaaccccaacgcaaacccgaacgcuaaccccaacgcaaaccccaacgccaaccccaacgcaaacccaaacgcgaaccccaacgcgaaccccaacgccaaccccaacgccaacccaaacgcaaaucccaacgcaaaccccaacgccaaccccaacgcaaacccaaacgccaacccaaacgccaacccaaaugcaaaccccaacgcaaaccccaacaaaaacaaccaaggaaacggucaaggccacaacaugccaaacgaccccaaccgaaacgucgacgaaaacgcuaacgccaacaacgccgucaaaaacaacaacaacgaagagcccucugacaaacacaucaaagaauaccucaacaaaauccagaacuccaucuccaccgaaugguccccaugcagcguaaccugcggcaacggaauccaagugcgaaucaaacccggaagcgccgacaaacccaaagaccaacucgacuacaucaacgacauagaaaaaaaaaucugcaaaauggagaaaugcagcucagucuucaacgucgucaacuccucaaucggccuaauaaugguacucuccuucuuauuccuaaacuag

SEQ ID NO: 5836 - RNA, 1239 nt, Artificial Sequence
  derived and/or modified CDS sequence (opt11) from Pf(Tz93-022)__BAM84753.1__CSP
augaugcgaaaacuagccauacucuccguauccucauuccucuucgucgaagcccucuuccaagaauaccaaugcuauggauccuccagcaacacccgcguccucaaugaacucaacuacgacaacgcaggaaccaaccucuacaacgaacucgaaaugaacuacuacggcaaacaagaaaacugguacagccucaagaaaaacucccgcucccucggcgaaaacgacgacggcaacaacaacaacggcgacaacggacgagaaggcaaagacgaagacaaacgagacggcaacaacgaagacaacgagaaacuccgcaaacccaaacacaagaaacucaaacaacccggcgacggaaacccugaccccaacgcuaacccaaacgucgacccaaacgcaaaccccaacguagacccaaacgccaacccaaacgucgaccccaacgccaaccccaacgccaacccgaacgccaaccccaacgcaaacccgaacgccaaccccaacgccaacccaaacgccaaccccaacgccaacccgaacgcgaacccaaacgcuaacccaaacgccaaccccaaugcaaacccaaacgccaaccccaacgcgaacccaaacgccaaccccaacgcaaacccgaacgcaaaccccaacgcaaaccccaacgcaaaccccaacgcaaaccccaacgccaaccccaacgccaaccccaacgccaaccccaacgcaaaccccaacgccaauccaaacgcaaaccccaacgcgaaccccaacgccaacccaaacgccaacccaaacgccaaccccaacgccaaccccaacgccaaccccaacgccaacccaaacgccaacccgaacgcaaaccccaacaaaaacaaccaagggaacggucaaggacacaacaugccaaacgacccaaaccgcaacgucgacgaaaacgccaacgcaaacaacgccgucaaaaacaacaacaacgaagaacccucagacaaacacauagaaaaauaccucaaagaaauccaaaacucacucuccaccgaguggucgccaugcuccguaacaugcggaaacggcauccaaguccgaauaaaacccggcuccgccaacaaaccaaaagaccaacuagacuaugaaaacgacauagaaaagaaaauaugcaaaauggaaaaaugcuccagcgucuucaacgucguuaacagcucaaucggccucaucaugguccucucauuccucuuccucaacuaa

SEQ ID NO: 5837 - RNA, 1239 nt, Artificial Sequence
  derived and/or modified CDS sequence (opt11) from Pf(Tz93-035)__BAM84757.1__CSP
augaugcgcaaacucgccauccucuccgucuccagcuuccucuucgucgaggcccucuuccaggaauaccaaugcuacggaagcucaagcaacacccgcguccucaaugaacucaacuacgacaacgccggcacgaaccuauacaacgaacuagaaaugaacuacuacggcaaacaagaaaacugguacucccugaaaaaaaacucccgcucgcucggcgaaaacgacgacggaaacaacaacaacggcgauaacggccgagaaggaaaagacgaagacaaaagagacggaaacaacgaagacaacgaaaaacuacguaaacccaaacacaagaaacuaaaacaaccaggcgacggcaacccagaccccaacgccaacccaaacgucgacccgaacgcaaacccaaacgucgaucccaacgccaacccaaaugucgacccgaacgcaaaccccaacgcaaacccaaacgcgaaccccaacgccaacccaaacgcaaacccgaacgccaaccccaacgcgaacccgaacgccaaccccaacgcgaacccaaacgccaacccaaacgccaaccccaacgccaaccccaacgccaaccccaacgccaaucccaacgccaacccaaacgucgaccccaacgccaacccaaacgccaacccaaacgccaacccaaacgcaaaccccaacgccaaccccaacgccaaccccaacgcaaaccccaacgcaaacccaaacgcaaaccccaacgccaaccccaacgccaacccaaacgcaaaccccaacgccaacccaaacgccaacccaaacgcgaacccaaacgcaaacccaaacgccaaccccaacgccaacccaaacgcgaacccaaacaaaaacaaccaaggaaacgggcaaggccacaacaugcccaacgacccaaaccgcaacgucgacgaaaacgccaacgccaacaacgccguaaaaaacaacaacaacgaagaaccaagcgacaaacacaucaccgaguaccuaaaaaaaaucaaaaacucgaucucgacagaauggucucccugcuccguaacuugcggaaacggcauacaaguacgcauaaaaccaggcuccgccaacaaaccaaaagacgaacuagacuacgaaaacgacaucgaaaaaaaaauaugcaaaauggaaaaaugcuccuccguauucaacguagucaacagcuccaucggacuaaucaugguccuauccuuccucuuccucaauuag

SEQ ID NO: 5838 - RNA, 1239 nt, Artificial Sequence
  derived and/or modified CDS sequence (opt11) from Pf(Tz93-041)__BAM84759.1__CSP
augaugagaaaacucgccauacucucagucagcagcuuccuauucgucgaagcccuauuccaagaauaccaaugcuacggcagcuccuccaacacccgaguccucaacgaacucaacuacgacaacgcaggcaccaaccuauauaacgaacucgaaaugaauuauuacggcaaacaagaaaacugguacagccuuaaaaaaaacucgcgcucccugggagaaaacgacgacggcaacaacaacaacggggacaauggccgcgaaggaaaagacgaagacaaacgcgacggaaacaacgaagacaacgaaaaacuacgcaaacccaaacacaaaaaacuaaaacaacccggagacggaaacccagacccaaacgcaaacccuaacgucgacccaaacgccaaccccaacgucgacccaaacgccaaccccaacguagaccccaacgccaacccaaacgcaaaccccaacgccaacccaaacgcaaacccaaacgcgaaccccaacgccaauccaaacgccaacccaaacgccaacccaaacgccaaccccaacgccaaccccaacgcaaacccgaacgcaaacccaaacgcaaaccccaacgccaaccccaacgccaacccaaacguagacccaaacgccaaccccaacgcaaacccuaacgccaaucccaacgccaacccaaaugccaaccccaacgccaaccccaacgcaaaccccaacgccaaccccaacgcaaaccccaacgccaaccccaacgcuaacccaaacgccaaccccaacgccaaccccaacgcaaaccccaacgccaaccccaacgccaacccaaacgccaaccccaacgccaacccaaacgccaaccccaacaaaaacaaccaaggcaacggccaaggccacaacaugcccaacgaccccaaccgcaacgucgacgaaaacgcaaacgccaacaacgccgucaaaaacaacaacaacgaagaaccauccgacaaacauaucgaacaguaccucaaaagaauccaaaacucccucucaaccgaauggucccccugcuccgucacaugcggaaacggaauccaaguacgcaucaaacccggaucagcaggcaaaccaaaagacgaacucgacuacgccaacgacaucgaaaaaaaaauaugcaaaauggaaaaaugcagcucagucuucaacguagucaacuccucaaucggccuaaucaugguccucuccuuccucuuccuaaacuaa

SEQ ID NO: 5839 - RNA, 1239 nt, Artificial Sequence
  derived and/or modified CDS sequence (opt11) from Pf(Tz93-051)__BAM84763.1__CSP
augaugcgaaaacucgccauccuauccgucagcuccuuucucuuugucgaagcccuguuccaagaauaccaaugcuacggaucauccuccaacacccgaguccucaacgagcuuaacuacgacaacgccggaacgaaccuauacaacgaacucgaaaugaacuacuacggcaaacaagagaacugguauucacucaaaaaaaacucacgcucacucggugaaaacgacgacggcaacaacaacaacggcgacaacggacgcgaagggaaagaugaagacaaacgagacggcaacaacgaagacaacgagaaacuucgcaaacccaaacacaaaaaacuaaaacaacccggcgacggaaacccagaccccaacgccaacccaaacguagaccccaacgcaaaccccaacguggaccccaacgcaaaccccaacgucgaccccaacgccaaucccaacgcaaacccgaacgcaaacccaaacgcaaaccccaacgccaacccaaacgccaauccaaaugcgaaccccaacgccaaccccaacgccaacccaaacgccaacccgaacgcaaaccccaacgccaacccgaacgccaacccaaacgcaaaccccaacgcaaaccccaacguagacccaaacgcaaacccaaacgccaaccccaacgcaaaccccaaugcaaaccccaacgccaaccccaacgcuaacccaaacgccaacccaaacgccaaccccaacgcgaacccaaacgccaaccccaacgcaaacccaaacgccaaccccaacgccaaccccaacgcaaaccccaacgccaacccaaacgccaaccccaacgcaaaccccaacgccaaccccaacgcuaaccccaacaaaaacaaccaaggcaacggccaaggacacaacaugcccaacgacccaaaccgaaacgucgacgaaaacgccaacgccaacaacgccgucaaaaacaacaacaacgaagaacccucagacaaacacauagaacaauaccucaacaaaaucaaaaacucgaucucaaccgaguggucacccugcucagucaccugcggcaacggcauccaaguccgaaucaaacccggcucagcgaacaaaccaaaagacgaacucaacuacgaaaacgacauagaaaaaaaaauaugcaagauggaaaaaugcucaucagucuucaacgucgucaacucauccaucggacucaucauggugcuuagcuuccucuuccuaaacuaa

SEQ ID NO: 5840 - RNA, 1239 nt, Artificial Sequence
  derived and/or modified CDS sequence (opt11) from Pf(Tz93-052)__BAM84764.1__CSP
augaugcgcaaacuagccauacucucagucuccucauuccucuucguagaagccuuauuccaagaauaccaaugcuacgguucauccuccaacacccgaguccucaacgaacucaacuacgacaacgccggcacaaaccuauacaacgaacucgaaaugaacuacuaugguaaacaagaaaacugguacucccucaaaaagaacucgcgcucccuaggcgaaaacgacgacggcaacaacaacaacggagacaacggccgagaaggcaaagacgaagacaaaagagacggcaacaacgaagacaacgaaaaacugcgaaaaccuaaacacaagaaacuaaaacaacccggcgacggcaacccagacccaaacgcaaacccaaacgucgaccccaacgcgaacccaaacgucgacccgaacgcaaacccaaacgucgaccccaacgccaacccaaacgcgaaccccaacgcaaacccgaacgccaaucccaacgccaacccaaacgccaaccccaacgcaaacccaaacgccaaccccaacgcgaaccccaacgcuaaccccaacgcaaaccccaacgucgacccaaacgcaaacccaaacgccaaccccaacgccaaccccaacgcaaacccaaacgccaacccaaacgccaaccccaacgccaacccaaacgccaacccgaacgccaaucccaacgccaacccaaacgcgaacccaaacgcaaaucccaacgcaaacccaaacgccaaccccaacgccaaccccaacgccaauccaaacgccaaccccaacgccaaccccaacgcaaaccccaaugccaaccccaaugcaaaccccaacgccaacccaaacgccaaccccaacaaaaacaaccaaggaaacggacaagggcacaacaugcccaacgacccaaaccgaaaugucgacgaaaacgccaacgccaacaacgcaguuaaaaacaacaacaacgaagaacccucggaccaacacaucgaaaaauaccuaaaaauuauccaaaacucccuuuccaccgaauggucccccugcuccguaacaugcggaaacggcauacaaguacgcaucaaacccggcucagccaacaaaccuaaagaucaacuagacuacgccaacgacaucgaaaagaaaaucugcaaaauggagaaaugcagcuccgucuucaacguagucaacagcuccauaggccuuauaaugguccuauccuuccucuuccucaacuaa

SEQ ID NO: 5841 - RNA, 1239 nt, Artificial Sequence
  derived and/or modified CDS sequence (opt11) from Pf(Tz93-061)__BAM84768.1__CSP
augaugcgaaaacuugccauacucagcgucucaagcuuccuauucgucgaagcccucuuccaagaauaccaaugcuacggcuccuccucaaacaccagaguacuuaacgaacuaaacuacgacaacgcaggaacaaaccucuacaacgaacuggaaaugaacuacuacggcaaacaggaaaacugguacucccucaaaaaaaacucccgaucacucggggaaaaugacgacggcaacaacaacaacggcgacaacggccgcgaaggaaaagacgaagacaaacgcgacggaaacaacgaagacaacgaaaaacuacgcaaacccaaacacaaaaaacucaaacaacccgccgacggaaacccagaccccaacgccaaccccaacgucgaccccaacgccaaccccaacgucgacccaaaugcaaacccaaacgucgaccccaacgcaaaccccaacgcgaaccccaacgcaaauccaaacgccaaccccaacgccaacccaaacgcaaacccaaacgccaacccaaacgcaaacccaaacgcaaaccccaacgccaacccaaacgcaaacccaaacgccaaccccaacgcaaacccuaacgcaaaccccaacgcgaaccccaaugucgaccccaacgccaacccaaacgcaaaccccaacgccaacccaaacgcaaacccaaacgcaaacccaaacgcaaaccccaacgcaaacccaaacgccaacccaaacgccaacccaaacgcaaacccgaacgcaaacccaaacgccaacccaaacgcaaacccaaacgcaaaccccaacgcaaacccaaacgcaaacccaaaugccaacccuaacgccaacccaaacgccaaccccaacaaaaacaaccaaggcaacggacaaggacacaacaugcccaacgacccuaaccgcaaugucgacgaaaaugccaacgcuaacaacgcagucaaaaacaacaacaacgaagaaccuucagaccaacacaucgaaaaauaccucaaacgcauccaaaacucacucuccaccgaauggucacccugcagcguaaccugcggcaacggcauccaaguccgcaucaaacccggcuccgccaacaaaccuaaagaccaacucgacuacgcgaacgacaucgaaaaaaaaaucugcaaaauggaaaaaugcuccuccgucuucaacgucgucaacagcuccauaggccucaucaugguccucucauuccuauuccucaacuaa

SEQ ID NO: 5842 - RNA, 1239 nt, Artificial Sequence
  derived and/or modified CDS sequence (opt11) from Pf(Tz93-075)__BAM84770.1__CSP
augaugcgcaaacuagccauccucuccgucucaagcuuccuauucgucgaagcccuauuccaagaauaccaaugcuacgggagcuccuccaauacccgaguccucaacgaacucaacuacgacaacgcaggcacgaaccucuacaacgaacuagaaaugaacuacuacggcaaacaagaaaacugguacagcuuaaaaaaaaacucccgaucccuaggagaaaacgacgacggcaacaacaacaacggggacaacggcagagaagggaaagacgaagacaaacgagacggcaacaacgaagacaacgaaaaacuacgaaaacccaagcacaaaaaacucaaacaacccggcgacggcaacccagaccccaacgccaaccccaacguagacccaaacgcaaacccgaacgucgacccgaacgcaaacccaaacgucgaccccaacgcgaaccccaaugccaacccuaacgcaaaccccaacgccaaccccaacgccaaccccaacgccaacccaaacgccaaccccaacgcaaaccccaacgccaaccccaacgccaacccaaacgccaaccccaacgccaaccccaacgccaaccccaacgccaaccccaacgcaaacccaaacgucgacccaaacgccaacccaaacgccaacccaaacgcaaacccgaacgcaaacccaaacgccaacccaaaugcaaaccccaacgccaaccccaacgcaaacccgaacgccaaccccaacgcaaaccccaacgccaacccaaacgccaaccccaacgccaacccgaaugccaacccaaacgcaaacccaaacgccaacccaaacgcgaaccccaacgccaaccccaacgccaacccaaacaaaaacaaccaagggaacggacaaggacacaacaugccaaacgaccccaaccgaaacgucgacgaaaacgcuaacgccaacaacgccgucaaaaacaacaacaacgaagaaccauccgacaaacacauagaacaauaccugaaaaccaucaaaaacucccucucaaccgaauggucccccugcagcgucaccugcggcaacggaauccaaguccgaaucaaaccgggaucagccaacaaacccaaagaccaacucgacuacgaaaacgacauagaaaaaaaaaucugcaaaauggaaaaaugcuccuccgucuucaacgucgucaacuccucaaucggccuaaucaugguccucuccuuccucuuccucaacuaa

SEQ ID NO: 5843 - RNA, 1239 nt, Artificial Sequence
  derived and/or modified CDS sequence (opt11) from Pf(Tz93-113)__BAM84775.1__CSP
augaugagaaaacucgccauacuaagcguauccagcuuccucuucguagaagcccuauuccaagaauaccaaugcuacggcagcuccagcaacaccagaguccuaaacgaacucaacuacgacaacgccggaacaaaccucuacaacgaacucgaaaugaacuacuacggcaaacaggaaaacugguacagccucaaaaaaaacucacgcucauuaggggaaaacgacgacggcaacaacaacaacggagacaacggcagagaaggaaaagacgaagacaaaagagacggaaacaacgaagacaacgaaaaacuccgaaagcccaaacacaaaaaauuaaaacaacccggcgacggcaacccagacccaaacgcaaacccgaacguagaccccaacgcaaaccccaacguagacccaaacgcaaacccaaacguagacccaaacgcaaacccgaacgcaaacccaaacgccaaccccaacgcgaacccaaacgccaaccccaacgcgaacccgaacgcaaacccaaacgccaaccccaacgcaaacccaaacgccaacccaaacgccaaccccaacgccaacccaaacgcaaaccccaacgcaaacccaaacgcaaacccaaacgcaaaccccaacguagaccccaacgccaaccccaacgccaauccgaacgcaaacccaaacgcaaacccaaacgcaaauccgaacgcgaacccaaacgccaacccaaacgcaaacccaaacgcaaacccgaacgcaaaccccaacgcaaaccccaacgccaacccgaacgcuaacccaaacgccaacccaaacgccaacccaaacgcaaaccccaacgcaaacccaaacgccaaccccaacaaaaauaaccaaggcaacggacaaggccacaauaugcccaacgaccccaacagaaacgucgacgaaaacgccaacgccaacaacgcggucaaaaacaacaacaacgaagaacccuccgacaaacacauagaacaguaccucaacaaaauaaagaacucgaucuccacagaauggucgccaugcuccgucacaugcggcaacggcauccaaguccgcauaaaaccgggaucggccaacaaaccaaaagacgaacugaacuacgaaaacgacauugaaaaaaaaauaugcaaaauggaaaaaugcagcucaguauucaacguagucaacagcuccaucggccuuauaaugguccuuuccuuccuauuccucaacuaa

SEQ ID NO: 5844 - RNA, 1239 nt, Artificial Sequence
  derived and/or modified CDS sequence (opt11) from Pf(Tz93-123)__BAM84778.1__CSP
augaugcgcaaacucgccauccucagcguaucguccuucuuauuugucgaagcccuauuccaagaauaccaaugcuauggauccucaucaaacacccguguccuaaacgagcuuaacuacgacaacgccggaacaaaccuauacaacgaacucgaaaugaacuacuacggcaaacaagaaaacugguacucacuaaaaaaaaacucccgaucccucggcgaaaacgacgacggcaacaacaacaacggcgacaacggccgcgaaggcaaagaugaagacaaacgcgauggcaacaacgaagacaacgaaaaacuccgcaaaccaaaacacaaaaaacucaaacaacccgccgacggaaacccagaccccaacgccaaccccaacguagacccaaacgccaacccaaacgucgacccuaacgccaacccuaacguagacccaaacgccaaccccaacgccaaccccaacgcaaauccaaaugcaaaccccaacgcaaaccccaacgcaaacccaaacgccaaccccaacgcaaaccccaacgccaacccaaacgccaaccccaacgccaacccgaacgcuaaucccaacgcaaaccccaacgccaacccaaacgccaacccaaacguagaccccaacgccaacccaaacgccaaccccaacgccaacccuaacgccaaccccaacgccaaccccaacgccaaccccaacgccaaccccaacgcaaaccccaacgcgaaccccaacgcaaaccccaacgccaacccgaacgcgaaccccaacgccaaccccaacgcaaacccaaacgccaacccaaacgcuaacccgaacgccaaccccaacgccaacccuaacgccaaccccaacaaaaacaaccaaggcaacggucaaggccacaacaugcccaacgaucccaaucgcaacgucgacgaaaacgccaacgccaacaacgccgcuaaaaacaacaauaacgaagaaccauccgaccaacacauagaaaaguaccucaaaaccauccaaaacucccucuccacagaauggucccccugcucaguaaccugcggcaacggaauccaaguccggauaaaacccggcuccgccaacaaaccaaaagaccaacuagacuacgcaaacgacauugaaaaaaaaaucugcaaaauggagaaaugcagcuccgucuucaacgucguuaacagcuccauaggacucaucaugguacucucauuccucuuccucaacuaa

SEQ ID NO: 5845 - RNA, 1239 nt, Artificial Sequence
  derived and/or modified CDS sequence (opt11) from Pf(Tz93-124)__BAM84779.1__CSP
augaugagaaaacuagccauccucucggucuccuccuuccuauuugucgaagcccuauuccaagaauaccaaugcuacggaagcuccuccaacacccgcguccucaacgagcuaaacuacgacaacgcaggaaccaaccucuacaacgaacuagaaaugaauuacuacggcaaacaagaaaacugguacagccuuaaaaaaaacucacgcucgcucggcgaaaacgacgacggcaacaacaacaauggcgacaacggccgcgaaggcaaagacgaagacaaacgagacggaaacaacgaagacaacgaaaaacuacgcaaacccaaacacaaaaaacucaaacaacccgccgacggaaacccagacccaaacgccaacccgaaugucgacccgaacgccaacccaaacguagaccccaacgcaaaccccaacgucgacccaaacgccaaccccaacgcaaaccccaacgccaaccccaacgccaacccaaacgccaacccaaacgccaacccaaacgccaacccgaacgccaacccaaacgcaaacccgaacgcaaaccccaacgcgaacccaaacgccaaccccaacgccaaccccaacgcaaaccccaacgcgaaccccaacgucgacccaaacgccaaccccaacgcgaaucccaacgcgaaccccaacgcaaaccccaacgccaaucccaacgcaaaccccaacgcaaacccgaacgcgaaccccaacgccaaccccaacgcaaaccccaacgccaaccccaacgccaacccaaacgccaaccccaacgccaacccaaacgccaacccaaacgcgaacccaaacgcgaacccaaacgcaaacccaaacgccaacccaaacaaaaacaaccaagggaacggacaaggccacaacaugccgaacgaccccaaccgaaacgucgacgaaaacgccaacgccaacaacgccguaaaaaacaacaacaacgaagaacccucagacaaacacaucgaacaauaccuaaaaaccauaaaaaacucacuaucgaccgaauggucacccugcuccgucacaugcggcaacggcauacaaguacgaauaaaacccggcucagcagacaaacccaaagaccaacuagacuacauaaacgacaucgaaaaaaaaaucugcaaaauggaaaaaugcuccucaguauucaacguagucaacagcuccaucggacuaaucaugguccucagcuuccucuuccucaacuaa

SEQ ID NO: 5846 - RNA, 1239 nt, Artificial Sequence
  derived and/or modified CDS sequence (opt11) from Pf(Tz98-009)__BAM84781.1__CSP
augaugcgaaaacucgccauacucuccgucuccuccuuccucuucgucgaagccuuauuccaagaauaccaaugcuacggcagcucauccaauacccgaguccuaaaugaacucaacuacgacaacgcaggcacgaaccuauacaacgaacucgaaaugaacuacuacggaaaacaagaaaacugguauagccucaaaaagaacucgcgaucacuaggagaaaacgacgacggaaacaacaacaacggcgacaauggccgggaaggaaaagaugaagacaaacgcgacggaaacaacgaagacaacgagaaacuacguaaacccaaacacaagaaacuaaaacaacccgcagacggcaaccccgacccaaacgcgaacccaaacguggaccccaacgccaacccaaacgucgaccccaacgcaaacccaaacguggaccccaacgccaaccccaacgcaaaccccaacgcaaaccccaacgcaaacccaaacgccaaccccaacgcaaaccccaacgcaaacccaaacgccaacccaaacgccaaccccaacgcaaaccccaacgcaaaccccaacgccaaccccaacgccaaccccaacgccaaccccaacgccaaccccaacgucgacccaaacgcaaaccccaacgcgaacccaaacgcaaacccaaacgccaacccaaacgcaaacccaaacgcaaaccccaacgcaaaccccaacgcgaaccccaacgccaacccaaacgcaaauccgaacgccaaccccaacgcaaaccccaacgcaaacccaaacgccaaccccaacgccaaccccaacgccaacccaaacgccaacccaaacgcaaacccaaacgccaaccccaacaaaaacaaccaaggaaauggccaaggacacaacaugccaaacgaccccaaccgcaacguagacgaaaacgccaacgccaacaacgcggucaaaaacaacaacaacgaagaacccuccgacaaacacauaaaagaauaccugaacaaaauccagaacuccaucucaaccgaaugguccccaugcagcguaacaugcggcaauggcauccaaguccgcaucaaacccggcucggccgacaaacccaaagaccaacuagacuacaucaacgacauagaaaagaaaaucugcaaaauggaaaaaugcagcucugucuucaauguggucaacuccucaaucggccucauaaugguccuauccuuccuauuccuaaacuaa

SEQ ID NO: 5847 - RNA, 1239 nt, Artificial Sequence
  derived and/or modified CDS sequence (opt11) from Pf(Tz98-049)__BAM84789.1__CSP
augaugagaaaacuagcuauccucucagucagcucauuccucuucguugaagcccuauuccaagaauaccaaugcuacggguccuccuccaacacgcgaguacuaaacgaacucaacuacgacaacgccggcacaaaccucuacaacgaacucgaaaugaacuacuacggcaaacaagaaaacugguauagccucaaaaagaacagccgaucacucggcgaaaacgacgacggcaacaacaacaacggcgacaacggccgcgaaggcaaagacgaagacaaacgagacggcaacaacgaagacaacgaaaaacuacgaaaacccaaacacaagaaacuaaaacaacccgcagacggaaacccggaccccaacgccaacccaaauguagaccccaacgcaaaccccaacguagaccccaacgccaaccccaacgucgaccccaacgccaaccccaacgccaaccccaacgccaaccccaacgccaacccaaacgccaaccccaacgcaaaccccaacgccaaccccaacgccaaccccaacgccaacccaaacgcaaacccaaacgccaaccccaacgcaaacccaaacgcaaaccccaacgcaaaccccaacgccaaccccaacguagaccccaacgcaaacccuaacgccaaccccaacgccaaccccaacgccaacccaaacgcgaaccccaacgccaaccccaacgcaaacccuaacgcaaacccaaacgccaacccaaacgccaaccccaacgccaacccaaacgcgaacccaaacgccaaccccaacgccaaccccaacgccaaccccaacgccaaccccaacgccaacccaaacgccaaccccaacgccaacccgaacaaaaacaaccaaggcaacggccaaggacacaacaugcccaacgaccccaaccgaaacgucgacgagaacgccaacgcaaacaacgccgucaaaaacaacaacaacgaagaaccaucagacaaacauauagaacaauaccucaaaaccaucaaaaacucccuaucaacagaauggucgcccugcagcgucaccuguggcaacggcauacaaguacgcaucaaaccaggcuccgcuaacaaaccaaaagaccaacuggacuacgaaaacgacauagaaaagaaaauuugcaaaauggaaaaaugcagcucagucuucaacgucgucaacuccuccaucggacuaaucaugguccucuccuuccuauuccuaaacuaa

SEQ ID NO: 5848 - RNA, 1239 nt, Artificial Sequence
  derived and/or modified CDS sequence (opt11) from Pf(Tz98-084)__BAM84792.1__CSP
augaugcgcaaacucgccauccucuccgucucauccuuccuuuucgucgaagcccuauuccaggaguaccaaugcuacggcuccuccuccaacacccgcguccuaaacgaacucaacuacgacaacgccggaacaaaccuauacaacgaacuagaaaugaacuacuacggcaaacaagaaaauugguacucacucaaaaaaaacucccgaucccuaggcgaaaacgacgacggcaacaacaacaacggagacaacggacgagaaggcaaagacgaagacaaacgcgacggcaacaacgaagacaacgaaaaacuccgcaaaccaaagcacaaaaaacucaaacaacccgccgacggaaacccagaccccaacgccaacccaaacgucgaccccaaugcuaaccccaacgucgacccaaacgccaaccccaacgucgacccaaacgccaaccccaacgccaaccccaacgcaaaccccaacgcaaaccccaacgcaaacccaaacgccaacccaaacgcgaaccccaacgcuaaccccaacgcaaacccaaacgcgaacccaaacgcgaaccccaacgccaaccccaacgccaaccccaacgcaaacccaaacgcaaaccccaacguugacccaaacgccaaccccaacgcaaaccccaacgccaacccaaacgccaaccccaacgccaaccccaacgccaaucccaacgcuaaccccaaugccaaccccaacgccaaccccaacgccaaccccaacgccaaccccaacgccaaccccaacgcaaaccccaacgccaauccaaacgccaaccccaacgccaacccaaacgcaaaccccaacgccaacccaaacgcaaacccaaacaaaaacaaccaaggcaacggucaaggacacaacaugcccaacgaccccaaccgaaacgucgacgaaaacgccaacgccaacaacgcagucaaaaacaacaacaacgaagaaccaucagaccaacacaucgaaaaauaccucaauaaaauccaaaacucccucucaaccgaauggucacccugcagcguaacaugcggcaacggcauacaaguccgcauaaaacccggcucagcaaacaaacccaaagaccaacucgacuacgcaaacgacaucgaaaaaaaaauaugcaaaauggaaaaauguucaucaguauucaacgucguuaacuccuccaucggccucaucaugguacucagcuuccuauuccucaacuaa

SEQ ID NO: 5849 - RNA, 1239 nt, Artificial Sequence
  derived and/or modified CDS sequence (opt11) from Pf(Tz98-119)__BAM84797.1__CSP
augaugcggaaacucgccauccucuccguaagcuccuuucucuuugucgaagccuuauuccaagaauaccaaugcuacggcagcucaagcaacacacggguccugaacgaacucaacuacgacaacgcaggcaccaaccucuacaacgaacucgaaaugaacuacuacggcaaacaagaaaacugguacagccuaaaaaagaauucccgcucacucggcgaaaacgacgacggcaacaacaacaauggcgacaacggccgagaaggcaaagacgaagacaaacgcgauggcaacaacgaagacaacgaaaaacuacgcaaaccaaaacacaaaaaacuaaaacaacccgccgacgggaaccccgacccaaacgcgaacccaaacguagaccccaacgccaaccccaacguagaccccaacgcaaaccccaacgucgaccccaacgcaaacccaaacgcaaacccaaacgcaaacccaaacgccaacccgaacgccaacccaaacgcaaaccccaacgcaaaccccaacgccaacccgaacgccaacccuaacgcaaaccccaacgccaaccccaacgccaacccgaacgccaacccuaacgccaacccuaacgccaacccaaacgucgaccccaacgccaaccccaacgcgaaucccaacgcaaaccccaacgcaaaccccaacgcaaaccccaacgcuaaccccaacgcuaaccccaacgcaaauccgaacgccaaccccaacgccaacccaaacgcaaaccccaacgcgaacccaaacgcaaacccgaacgccaacccaaacgcaaaccccaacgccaacccgaacgccaaccccaacgcaaacccuaaugcaaacccaaacaagaacaaccaaggaaacggacaaggccacaacaugcccaacgaccccaaccgaaaugucgacgaaaacgccaacgccaacaacgccgucaaaaacaacaacaacgaagaacccuccgaccagcacauagaaaaauaccucaaaaccauccaaaacucccucucgacugaauggucacccugcuccgucaccugcggcaacggcauccaaguacgcauaaaacccggauccgcaaacaaacccaaagaccaacucgacuacgcaaacgacauagaaaaaaaaaucugcaaaauggaaaaauguagcuccguauuuaacgucgucaacucuuccaucggccucaucaugguacucuccuuccuauuccuaaacuaa

SEQ ID NO: 5850 - RNA, 1239 nt, Artificial Sequence
  derived and/or modified CDS sequence (opt11) from Pf(Yaounde)__AAN87602.1__CSP
augaugcguaaacuagccauccucuccguaucaagcuuccuauucguagaagcacuuuuccaggaauaccaaugcuacggauccuccagcaacacacgcguccucaacgaacucaacuacgacaacgcaggcaccaaccuauacaacgaacucgaaaugaacuacuacggcaaacaagaaaacugguacucacucaaaaaaaacucccgcucccuaggcgaaaacgacgacggcaacaacaacaacggagacaacggccgcgaaggcaaagacgaagacaaacgagacggcaacaacgaagacaacgaaaaacuacgaaaacccaaacacaaaaaacucaaacagcccgcagacggcaacccagacccaaacgcgaacccaaacgucgaccccaacgccaacccaaacguagaccccaacgcaaaccccaacgucgaccccaacgcaaacccaaacgcaaaccccaacgcuaaccccaacgccaaucccaacgcaaaccccaacgccaaccccaacgcaaacccaaacgccaaccccaacgccaacccaaacgccaaccccaacgccaaccccaacgcaaaccccaacgccaaccccaacgccaaccccaaugccaaccccaacguagaccccaacgcgaacccaaacgccaaccccaaugcaaacccaaacgcaaaccccaacgcgaaccccaacgccaaccccaacgccaaccccaacgcaaaccccaacgccaacccaaacgccaacccgaacgcaaauccaaacgcaaaccccaacgcaaacccaaacgccaaccccaacgccaacccgaacgccaacccuaacgcgaacccuaacgccaacccuaacgcaaaccccaacaagaacaaccaaggcaacggccaaggccacaacaugcccaacgauccaaaccgcaacgucgacgaaaacgccaacgcuaacaacgccguaaaaaacaacaacaacgaagaacccucugaccaacacauagaaaaauaccuaaacaaaaucaaaaacucccuauccaccgaauggucacccugcucagucaccugcggcaacggcauacaaguccgcaucaaaccaggcucggccaacaaaccuaaagaccaacuagacuacgccaacgacaucgaaaaaaaaaucugcaaaauggaaaaaugcucuuccguauucaacguugucaacagcuccauaggccucaucaugguccuauccuuccucuucuuaaacuaa

SEQ ID NO: 5851 - RNA, 1239 nt, Artificial Sequence
  derived and/or modified CDS sequence (opt11) from Pf(Yaounde)__AAN87587.1__CSP
augaugcgaaaacuagccauacuauccgucucaagcuuccuauucguagaagcccuauuccaagaauaccaaugcuacggcuccucaagcaacacccgcguacuaaacgaacuuaacuacgacaacgcaggcaccaaccucuacaacgaacucgaaaugaacuacuauggaaaacaagaaaacugguacagccuaaaaaaaaacucccgaucacuuggagaaaacgacgacggcaauaacaacaacggcgacaacggccgagaaggcaaagacgaagacaaacgagacggcaacaacgaagacaaugaaaaacuccgcaagccaaaacauaaaaaacucaaacaacccgcugacggcaacccagacccaaacgccaaccccaacgucgaccccaacgcaaaccccaacguggaccccaacgcaaaccccaacgucgaccccaacgccaaccccaacgcaaacccuaacgcaaaccccaacgccaacccaaacgcaaaccccaacgcaaacccaaacgccaacccaaacgccaaccccaacgcaaaccccaacgccaacccaaacgccaaccccaacgccaacccgaacgcaaaccccaacgcaaaccccaacgcgaaccccaacgucgaccccaacgccaacccaaacgcuaaccccaacgccaaccccaacgcaaacccaaacgccaaccccaacgccaacccaaacgccaaccccaacgcaaacccgaacgcaaaccccaacgccaacccaaacgccaaccccaacgcaaacccaaacgccaaccccaacgccaaccccaacgccaaccccaacgccaaccccaacgccaaucccaacgccaaccccaacgcgaacccaaacaaaaacaaccaaggcaacggacaaggacacaacaugccaaacgaccccaaucgcaacgucgacgaaaacgccaacgcaaacaacgccgucaaaaacaacaacaacgaagaaccaucugaccagcacaucgaaaaauaccuaaaaaccauaaaaaacucccucuccaccgaauggucgccaugcuccguaaccugcggcaacggaauccaaguccgcauaaaaccaggcucagccaacaaaccaaaagaucaacuagacuacgccaacgacaucgaaaaaaaaauaugcaaaauggaaaaaugcucaucgguauucaacguagucaacuccucaaucggccucaucaugguccuaucauuuuuauuccuaaauuaa

SEQ ID NO: 5852 - RNA, 1236 nt, Artificial Sequence
  derived and/or modified CDS sequence (opt11) from Pf(A107)__ACO49330.1__CSP
augcgcaaacuagcaauccucucagucuccuccuuccuauucguugaagcccucuuccaggaauaucaaugcuacggauccuccuccaacaccagaguacucaacgaacuaaacuacgacaacgcaggcaccaaccuauacaacgaacuagaaaugaacuacuacggcaaacaagaaaacugguacucacucaaaaaaaacucccgaucacucggcgaaaacgacgacggcaacaacaacaacggcgacaacggccgcgaaggcaaagacgaagacaaacgcgacggcaacaacgaagacaacgaaaaacuaagaaaacccaaacacaagaaacugaaacagcccggcgacgggaacccagauccaaacgcaaacccaaacguugaccccaacgccaaccccaacguagaccccaacgcaaacccaaacgucgacccaaacgccaacccaaacgccaaccccaacgccaacccaaacgcaaaccccaacgcaaacccaaacgcaaaccccaacgcaaacccaaacgccaaccccaacgcaaacccaaacgccaaccccaacgccaacccaaacgccaaccccaacgcaaacccaaacgccaaccccaacgccaacccgaacgccaaccccaacgcaaaccccaacgccaacccaaacgccaaccccaacgccaaccccaacgccaaccccaacgccaaccccaacgcaaacccaaacgccaacccuaacgcgaacccaaacgcaaaccccaacgccaaccccaacgcgaaccccaacgccaaccccaacgcaaaccccaacgcgaaccccaaugcgaaccccaacgcaaaccccaacgcaaacccgaacgccaaccccaacaaaaacaaccaaggaaacggccaaggccauaacaugccgaacgaccccaaccguaacgucgacgaaaacgcaaacgccaacaacgccguaaaaaacaacaacaacgaagaaccauccgacaaacacauagaacaguaccucaaaaaaauccaaaacucccucucaaccgaauggucccccugcuccgucacuugcggaaacggcauacaaguacgcaucaaacccgguucagcaaacaaaccgaaagacgaacuagacuacgaaaacgacaucgaaaaaaaaaucugcaaaauggaaaaaugcagcucagucuucaacgucgucaacagcuccaucggacuaaucaugguccucuccuuccuauuccuaaacuaa

SEQ ID NO: 5853 - RNA, 1233 nt, Artificial Sequence
  derived and/or modified CDS sequence (opt11) from Pf(IT)____CSP
augaugcgcaaacucgcaauccucuccgucuccagcuuccuauucgucgaagcacucuuccaagaauaccaaugcuacggaagcuccagcaacacccgcguacuuaacgaacucaacuacgacaacgcgggcaccaaccuauacaacgaacucgaaaugaacuauuacggcaaacaggaaaacugguacagccuaaaaaaaaacucacgcagccuaggcgaaaacgacgacggcgacaacgacaacggaaacaacaacaacggcaacaacaacaacggcgacaacggccgcgaaggaaaagacgaagacaaaagagacgggaacaacgaagacaacgaaaaacuccgcaaacccaaacacaaaaaacuuaaacaacccggagacgacaacccggacccaaacgccaaccccaacguagaccccaacgccaacccaaacgucgacccgaacgccaacccgaacgcaaacccaaacgcaaauccaaacgcaaacccaaaugccaaccccaacgccaacccgaacgccaaccccaacguagaccccaacgcgaacccaaacgcaaacccaaacgcaaacccaaacgccaacccaaacgccaacccaaacgcgaacccaaacgccaaccccaacgccaaccccaacgccaacccaaacgcuaaccccaacgccaacccaaacgccaaccccaacgcaaacccaaacgcaaaccccaacgccaaccccaacgccaaccccaacgcaaaccccaacgcaaaccccaacgccaacccaaacgccaaccccaacgccaacccaaaugcaaaccccaacgccaaccccaacgccaacccaaacgccaaccccaacgccaaccccaacaaaaacaaucaaggaaacggccaaggccacaacaugcccaacgaccccaacagaaacgucgacgaaaacgccaacgcaaacaacgccgucaaaaacaacaacaacgaagaacccucagacaaacacaucgaacaauaccuaaaaaaaauccaaaacucauuaucaaccgaauggucgcccugcuccgucacaugcggcaacggcauacaaguccgcaucaaaccaggcuccgccgacaaacccaaagaccaacuggacuacgaaaacgacaucgaaaaaaaaaucugcaaaauggaaaaaugcuccuccgucuucaacgucguuaacuccucaaucggccucaucaugguccucucauuccucuuccuaaacuag

SEQ ID NO: 5854 - RNA, 1227 nt, Artificial Sequence
  derived and/or modified CDS sequence (opt11) from Pf(14)__AGR53782.1__CSP
augaugagaaaacucgccauccuuucagucuccucauuccucuuuguagaagcccuauuccaagaauaccaaugcuacggcuccuccagcaacacacgaguccucaacgaacucaacuacgacaacgccggcacaaaccucuacaacgaacuagaaaugaacuacuacgggaaacaggaaaacugguacucccuaaaaaaaaacucaagaucccuaggggaaaacgacgacggcaacaacaacaacggggacaacggccgagaaggcaaagacgaagacaaacgagacggaaacaacgaagacaacgaaaaacuacgcaaacccaaacacaagaaacuaaaacaacccggcgacggcaacccggacccgaacgcaaaccccaacguagacccaaacgccaaccccaacguagacccaaacgcuaaccccaacgucgaccccaacgccaacccgaacgccaacccaaacgccaaccccaacgcaaacccaaacgcaaaccccaacgccaacccaaaugccaaccccaacgccaacccaaacgcaaaccccaacgccaacccaaaugcaaaccccaacguagauccaaacgccaacccgaacgcgaaccccaacgcaaacccaaacgccaacccaaacgcaaacccaaacgccaacccaaacgccaaccccaacgccaaucccaaugccaaccccaacgccaaccccaacgcaaacccaaacgccaacccaaacgcaaacccaaacgcaaaccccaacgcaaaccccaacgccaaccccaacgccaaccccaacgcaaacccaaacgcaaacccaaacgccaaccccaacgcaaaucccaacgccaaccccaacaaaaacaaccaaggcaacggacagggccacaacaugccaaacgaccccaaccgcaacguagacgaaaacgccaacgccaacaacgcaguaaaaaacaacaacaacgaagaacccucagaccaacacaucgaaaaauaccuacaaaaaauacaaaacuccuuguccaccgaauggucacccugcuccguaaccuguggcaacggcauccaagugcgaaucaaacccggauccgcaaacaaaccaaaagaccaacuaaacuacgaaaacgacaucggaaaaaaaauaugcaaaauggaaaaaugcuccuccguuuucaacgucguaaacagcucgaucggacucaucaugguccuauccuuccucuuccucaacuaa

SEQ ID NO: 5855 - RNA, 1227 nt, Artificial Sequence
  derived and/or modified CDS sequence (opt11) from Pf(Asembo Bay)__AAN87609.1__CSP
augaugcgaaaacucgcaauacucagcgucucaagcuuccuauucgucgaagcccucuuccaagaauaccaaugcuacggcagcagcuccaacacacgaguccuaaacgaacucaacuacgacaacgccggcacaaaccuauacaacgaacuagaaaugaacuacuacggaaaacaagaaaauugguacucccucaaaaaaaacucgcgcucgcucggcgaaaacgacgacggcaacaacaacaacggggacaauggccgagaaggcaaagacgaagacaaacgggacggaaacaacgaagacaacgaaaaacuacgcaaacccaaacacaaaaaauuaaaacaaccagccgacggcaacccagacccaaacgccaacccaaacgucgaccccaacgccaaccccaacguggacccaaacgcaaaccccaacguagaccccaacgccaaccccaacgcaaaccccaacgccaaccccaacgcaaaccccaacgcgaaccccaacgccaaccccaacgcaaaccccaacgcaaacccaaacgccaaccccaacgcaaacccaaacgcgaacccaaacgcaaaccccaaugccaaccccaacgccaacccgaacguagacccaaacgcaaaccccaacgccaaccccaacgccaaccccaacgccaaccccaacgccaacccaaacgccaaccccaacgcaaaccccaacgccaacccaaacgccaaccccaacgccaacccaaacgccaacccaaacgccaaccccaacgccaacccaaacgcaaaccccaacgcaaaccccaaugcgaaccccaacgccaacccaaacgccaacccaaacgcgaacccaaacaaaaacaaccaaggcaacggacaaggacacaacaugccaaacaaccccaaccgcaacgucgacgaaaacgccaacgcaaacaacgcagucaaaaacaacaacaaugaagaaccaagcgacaaacacauagaacaauaccuaaaaaccauacaaaacucgcucuccacagaauggucccccugcuccguaacaugcggaaacggcauccaaguccgcaucaaaccaggcucugccaacaagccaaaagaccaacucgacuacgccaacgacauagaaaaaaaaaucugcaaaauggagaaaugcuccucagucuucaacguagucaacucuucgauaggacuaauaaugguacucuccuuccuauuccuaaacuaa

SEQ ID NO: 5856 - RNA, 1227 nt, Artificial Sequence
  derived and/or modified CDS sequence (opt11) from Pf(Bolivar)__AAN87613.1__CSP
augaugcgcaaacucgccauucucuccguaucuuccuuccucuucgucgaagcacucuuccaagaauaccaaugcuacggcuccucauccaacaccagaguccuaaacgaacuuaacuacgacaacgccggcaccaaccuauacaacgaauuagaaaugaacuauuacggaaaacaagaaaacugguacagccucaaaaaaaacucacgcucgcuaggcgaaaacgacgacggcaacaacaacaacggcgacaacggccgcgaagggaaagacgaagacaaacgcgacggcaacaacgaagacaacgaaaaacuaagaaaaccaaaacacaaaaaacucaaacaacccggagacggcaaccccgacccaaacgccaaccccaacgucgaucccaacgccaaccccaacgucgacccaaacgccaacccaaacgucgaccccaacgccaaccccaacgccaaccccaacgccaaccccaacgcgaacccuaacgcaaacccuaacgccaacccaaacgcaaaccccaacgccaaccccaacgccaacccaaacgccaaccccaacgcaaaccccaacguagaccccaaugccaaccccaacgcaaacccaaacgccaacccaaacgcaaaccccaacgcaaaucccaacgcaaacccaaacgcaaaccccaacgccaacccaaacgccaaccccaacgccaaccccaacgccaacccaaacgccaaccccaacgccaaccccaacgcgaaccccaacgccaaccccaaugcgaacccaaacgcaaacccaaacgcaaaccccaacgccaauccuaacgccaaccccaacgccaaccccaacgcaaaccccaacaaaaacaaccaaggcaacggccaaggccacaacaugcccaacgaccccaaccgcaacgucgacgaaaacgccaacgccaacaacgccgucaaaaacaacaacaacgaagaacccuccgacaaacacauagaacaauaccucaaaaaaauccaaaacgcccucucaacagaauggucccccugcuccguuaccugcgguaacggcauacaaguccgcauaaaaccaggcuccgcaaauaaacccaaagaccaacucgacuacgaaaacgacauagaaaagaaaaucugcaaaauggaaaaaugcucauccgucuucaaugucguaaacucaucaaucggacuaauaaugguacucuccuuccuauucuuaaacuaa

SEQ ID NO: 5857 - RNA, 1227 nt, Artificial Sequence
  derived and/or modified CDS sequence (opt11) from Pf(Br419M3)__BAM85120.1__CSP
augaugcgaaaacucgccauacucucaguuucaucauuucucuucgucgaagcacucuuccaggaauaccaaugcuacggaucuagcagcaacacaagaguccucaacgaacucaacuacgacaacgccggaacaaaccuauacaacgaacucgaaaugaacuacuacggaaaacaagaaaacugguacucccuaaaaaaaaacucccgaucacucggagaaaacgacgauggcaacaacaacaacggcgacaacggccgagaaggcaaagacgaagacaaacgcgacggaaacaacgaagacaacgaaaaacugcgaaaacccaaacacaaaaaacuaaaacaacccgcagauggcaaccccgaccccaacgccaaucccaacguagaccccaacgcaaaccccaacguagaccccaacgccaaccccaaugucgacccaaacgcaaacccgaacgccaacccaaacgccaaccccaacgccaacccaaacgccaaccccaacgccaaccccaacgcaaaccccaacgccaacccaaacgcgaaccccaacgccaaucccaacgccaacccgaacgcuaaccccaacgccaacccaaacgccaacccaaacgcgaacccaaacguagaccccaacgccaacccaaacgcgaacccgaacgccaacccaaacgcaaaccccaacgcuaacccaaacgcaaacccaaacgccaacccaaacgccaacccaaacgccaaccccaacgcaaaccccaacgcaaaccccaacgcgaacccaaaugcaaacccaaacgcaaaccccaacgccaaccccaacgccaacccaaacgccaaccccaacgcaaacccgaacaaaaacaaccaagguaacggccaaggccacaacaugcccaacaacccuaaccgcaacgucgacgaaaacgccaacgccaacaacgcugucaaaaacaacaacaacgaagaacccuccgacaaacacaucgaacaauaccucaaaaaaauccaaaacucacuuucaacagaauggucacccugcucaguaaccuguggaaacggcauacaaguccgaaucaaacccggcuccgcuggcaaauccaaagacgaacucgacuacgaaaacgacaucgaaaaaaaaauaugcaagauggaaaaaugcagcuccgucuucaacgucgucaacuccucaauaggacucauaaugguacucuccuuccuauuccuaaacuaa

SEQ ID NO: 5858 - RNA, 1227 nt, Artificial Sequence
  derived and/or modified CDS sequence (opt11) from Pf(Gha1110-003)__BAM84840.1__CSP
augaugagaaaacuagccauacuaucagucucauccuuccucuucgucgaagcacucuuccaagaauaccaaugcuacggcuccuccagcaacacccggguacuaaacgaacucaacuacgacaacgccggaaccaaccucuacaaugaacucgaaaugaacuacuacggcaaacaagaaaacugguacucccugaaaaaaaacucccgcucccuaggagaaaacgacgacggcaauaacaacaacggcgacaacggcagagaaggcaaagacgaagacaaacgagacggcaacaacgaagacaacgaaaaacuacgaaaacccaaacacaaaaaacugaaacaacccgccgacggcaacccggacccaaacgcaaauccgaacguagaccccaacgccaaccccaacgucgacccgaacgcaaaccccaacguagaucccaacgccaaccccaacgccaacccaaacgccaaccccaacgccaaccccaacgccaaccccaacgccaauccaaacgccaacccgaacgccaaccccaacgccaaccccaacgcaaaccccaacgcgaaccccaacgccaacccaaacgcaaacccaaacgccaaccccaacguagaccccaacgccaaccccaacgccaaccccaacgcaaaccccaacgccaaccccaacgcaaacccaaacgccaacccuaacgcaaaccccaacgcaaaccccaacgccaacccaaacgcaaaccccaacgcaaaccccaacgcaaacccaaacgccaacccgaacgcgaaccccaacgccaaccccaacgcaaacccaaacgcaaaccccaacgccaacccaaacgccaacccaaacaaaaacaaccaaggcaacggacaaggacacaacaugccaaacgaccccaaccgcaacguagacgaaaacgccaacgccaacaacgcagucaagaacaacaacaacgaagaacccuccgaccaacacaucgaaaaauaccuaaaaacaaucaaaaacucgcucuccaccgaauggucacccugcuccgucaccugcggaaacggcauacaaguccgcaucaaacccggcuccgcaaacaaaccaaaagaccaacuagacuacgcaaacgacauagaaaaaaaaauaugcaaaauggaaaaauguucauccguauucaacguagucaacagcuccauaggccuaauaaugguacucuccuuccuauuccuaaacuaa

SEQ ID NO: 5859 - RNA, 1227 nt, Artificial Sequence
  derived and/or modified CDS sequence (opt11) from Pf(Tz03-032)__BAM84799.1__CSP
augaugcgcaaacuagccauccucucaguauccuccuuccuauucgucgaagcacuauuccaagaauaccaaugcuacggcuccucgagcaacacccgaguccucaacgagcucaacuacgacaacgccggcaccaaccuuuacaacgaacucgaaaugaacuacuacggaaaacaagaaaauugguacucccucaaaaaaaacucgagaucccucggcgaaaacgacgacggcaacaacaacaacggagacaacggaagggaaggaaaagacgaagacaaacgagacggcaacaaugaagacaacgaaaaacuccgcaaaccaaaacacaaaaaacucaaacaacccgcagacggcaaccccgaccccaacgccaaccccaacgucgacccaaacgccaacccaaacguagacccgaacgccaauccaaacguagaccccaacgcaaaccccaacgcaaaccccaacgcaaaccccaaugccaaccccaacgccaaccccaacgccaacccaaacgcaaaccccaacgcaaaccccaacgcaaaccccaacgcaaacccaaacgucgacccaaacgccaaccccaacgccaacccaaacgcgaaccccaacgcaaacccaaacgccaauccaaacgcaaaccccaacgcaaacccaaacgccaacccaaacgccaaccccaacgccaacccaaacgccaaccccaacgcaaauccaaacgcaaaccccaacgcaaacccaaacgccaaccccaacgcgaaccccaacgcaaacccaaacgcaaacccaaacgccaaccccaacgcaaaccccaacgccaacccgaacgcaaacccuaacgccaaccccaacaaaaacaaccaaggcaacggacaaggccacaacaugccgaacgacccaaaccgcaacguggacgaaaacgcaaacgcaaacaacgccgucaaaaacaacaacaacgaagaacccucagaccaacacaucgaaaaauaccucaaaaaaauccagaacucgcucuccaccgaguggucccccuguagcguaaccugcggcaacggcauccaaguccgaaucaaacccggcucagcaaacaaacccaaagaccaacuagacuacgccaacgauauagaaaaaaaaauaugcaaaauggaaaaaugcuccucagucuucaacgucgucaacucaagcaucggccucaucaugguccucucauucuuauuccuaaacuaa

SEQ ID NO: 5860 - RNA, 1227 nt, Artificial Sequence
  derived and/or modified CDS sequence (opt11) from Pf(Tz03-033)__BAM84800.1__CSP
augaugcgcaaacuagccauacucucggucucauccuuucucuucguugaagcacucuuucaagaauaccaaugcuacggcagcucgucaaacacccgcguccucaacgaacucaacuacgacaacgccggcacgaaccucuacaacgaacucgaaaugaacuacuacggcaagcaagaaaacugguacucccucaaaaaaaacucccgcucccuaggcgaaaacgacgacggcaacaacaacaacggagacaacggacgggaaggcaaagacgaagacaaacgagacggcaacaacgaagacaacgaaaaacuacgaaaaccaaaacacaaaaaacuaaaacaaccagcagacggaaauccggacccaaacgcaaacccaaacgucgacccaaacgccaacccaaacguagacccgaacgcuaacccaaacgucgacccuaacgcaaaucccaacgccaacccaaacgccaaccccaacgccaacccaaacgccaaccccaacgccaacccaaacgccaacccuaacgccaaccccaacgccaacccaaacgccaacccaaacgccaacccaaacgcaaaccccaacgcaaacccgaaugcaaacccaaacguugaccccaacgccaaccccaacgccaacccaaacgcaaaccccaacgccaaccccaacgccaaccccaacgcaaaucccaacgccaacccaaacgccaacccaaacgcaaaccccaacgccaaccccaacgccaaccccaacgccaacccaaacgcaaacccaaacgccaacccaaacgcgaaccccaacgccaaucccaacgccaaccccaacgccaacccaaacgcaaaccccaacaagaacaaccaaggcaacggccaaggacacaacaugcccaacgaccccaaccgcaacguagacgaaaacgccaacgccaacaacgccgucaaaaacaacaauaacgaagaaccaucagaccaacacaucgaaaaauaccuaaaaaccaucaaaaacucacucucaaccgaauggucccccugcuccguaaccugcggaaacggcauccaaguccgcaucaaacccggcuccgccaacaaaccaaaagacgaacuugacuacgccaaugacauagaaaaaaaaauaugcaaaauggaaaaaugcagcucagucuucaacgucgucaacuccuccauaggacucaucaugguacuaucuuuccuauuccucaacuaa

SEQ ID NO: 5861 - RNA, 1227 nt, Artificial Sequence
  derived and/or modified CDS sequence (opt11) from Pf(Tz93-056)__BAM84765.1__CSP
augaugcgaaaacucgccauccucuccgucuccagcuuccuauucguagaggcccucuuccaagaauaccaaugcuacggaucauccuccaacacccgcguccugaaugagcuaaacuacgacaacgcgggcaccaaccuauacaacgaacucgaaaugaacuacuacggaaaacaagaaaacugguacucccucaaaaaaaacucccgaucgcuaggcgaaaacgacgacggaaacaacaacaacggggacaauggccgcgaaggaaaagacgaagacaaacgagacggcaacaacgaagacaacgaaaaacuccgcaaacccaaacacaaaaaacucaaacaaccagccgacggcaauccagaccccaacgcaaaccccaacguagaccccaacgccaaccccaacgucgacccaaacgccaaccccaacguagaccccaacgccaaccccaacgcaaaccccaacgccaacccaaacgccaaccccaaugcaaacccaaacgccaacccaaacgcaaacccgaacgcaaaccccaacgccaacccaaacgcaaaccccaacgccaacccgaacgcaaaccccaacgcaaaccccaacgcaaacccaaacguagaccccaacgcaaaccccaacgcaaaccccaaugcaaaccccaacgccaaccccaacgcgaaccccaacgcaaacccgaacgcaaacccaaacgcaaaccccaacgccaacccaaacgcaaaccccaacgccaacccaaacgcaaaccccaacgcaaaccccaacgccaacccaaacgccaaccccaacgcaaacccaaacgccaacccaaacgcaaaccccaacgccaacccgaacaaaaacaaucaaggcaacggacaaggccacaacaugccuaacgaccccaaccgaaacgucgacgaaaacgccaacgccaacaacgcagucaaaaacaacaacaacgaagagccauccgauaaacacauaaaagaauaccuaaccaaaaucaaaaacucaauaucaaccgaauggucaccaugcuccgucaccugcggcaacggcauccaaguacgcaucaaacccggcucggccaacaaacccaaagacgaacucgacuacgagaacgacaucgaaaagaaaaucugcaaaauggaaaaaugcagcucaguauucaacgucgucaacuccuccaucggccucaucaugguacuaucguuccuauuccuaaauuaa

SEQ ID NO: 5862 - RNA, 1227 nt, Artificial Sequence
  derived and/or modified CDS sequence (opt11) from Pf(Tz93-085)__BAM84771.1__CSP
augaugagaaaacucgccauacuguccgucuccuccuuccucuucgucgaagcccucuuccaagaauaccaaugcuacggcuccuccagcaacacccgaguccucaacgaacucaauuacgauaacgcaggcacuaaccucuacaacgaacucgaaaugaacuacuacggcaaacaagaaaacugguacagcuuaaaaaaaaacucgcgcucacucggggaaaacgacgacggaaacaacaacaacggcgacaacggccgcgaaggaaaagacgaagacaaaagagacggaaacaacgaagacaacgagaaacuaagaaaacccaaacacaaaaaacuaaaacaacccgccgacggcaaccccgaccccaacgccaaccccaacguagaccccaacgccaaccccaacgucgaccccaacgcaaacccaaacguagacccgaacgccaaccccaacgccaacccaaacgccaacccaaacgccaacccaaacgccaaccccaacgcaaaccccaacgccaaccccaacgcaaaccccaacgccaacccaaacgcaaacccaaacgcaaaccccaacgccaaccccaacgccaaccccaacgcaaaccccaacguagacccuaacgccaacccgaacgcaaacccaaacgcaaaccccaacgccaaccccaacgcgaaccccaacgccaaccccaacgccaacccaaacgcgaaccccaacgcaaaccccaacgccaacccaaacgccaacccaaacgcgaaccccaacgccaacccuaacgccaacccgaacgcaaaccccaacgcaaacccaaacgccaaccccaacgccaaccccaacgcaaacccaaacaaaaacaaccaaggaaacggccagggccacaacaugcccaacgacccaaaccgcaacgucgacgaaaacgccaaagccaacaacgcagucaaaaacaauaacaacgaagaaccaucagacaaacacaucaaagaguaccucaacaaaauccaaaacucaaucucaaccgaaugguccccaugcagcguaacuugcggcaacggcauccaaguacgaauuaaaccaggcucagccgacaaaccaaaagaccaacucgacuacaucaacgacauagaaaaaaaaaucugcaaaauggaaaaaugcagcucggucuucaacgucguaaacagcagcaucggccuaaucaugguacucuccuuccucuuccucaauuag

SEQ ID NO: 5863 - RNA, 1227 nt, Artificial Sequence
  derived and/or modified CDS sequence (opt11) from Pf(Tz93-102)__BAM84773.1__CSP
augaugcgcaaacucgccauacucuccgucuccagcuuccuuuucgucgaagcccuauuccaagaauaccaaugcuacggcagcuccuccaacacaaggguccucaacgaacuuaacuacgacaacgcaggcaccaaccuauacaacgaacucgaaaugaacuacuauggcaaacaagaaaacugguacucccucaaaaaaaacagccgcucccucggcgaaaacgacgacggcaacaacaacaacggcgacaacggccgagaaggcaaagacgaagacaaacgagacggaaacaacgaagacaaugaaaaacuccgcaagccaaaacacaaaaaacucaaacaacccggagacggcaacccagaccccaacgccaaccccaacgucgaccccaacgccaacccaaacgucgacccaaacgccaaccccaacguagacccgaacgcaaacccaaacgcaaaccccaacgccaaccccaacgccaacccaaaugcaaaccccaacgcuaaccccaacgcgaaccccaacgcaaaccccaacgcgaaccccaacgccaacccgaacgccaaucccaacgccaaccccaaugcaaaccccaacgcaaaccccaacgucgacccaaacgccaacccaaacgccaacccaaacgccaaucccaacgcaaacccaaacgccaaccccaacgcaaaccccaacgccaacccaaacgccaacccgaacgcaaaccccaacgcaaaccccaacgcaaaccccaacgccaacccaaacgccaaucccaacgccaaccccaacgcaaacccaaacgcaaaccccaacgcgaaccccaacgcaaaccccaacgcaaaccccaacaaaaacaaccaagggaacggacaaggccacaacaugccaaacgaccccaaucgcaacgucgacgaaaacgccaacgccaacaacgcagucaaaaacaauaacaacgaagagcccuccgacaaacacauagaacaauaccucaaaaccauaaaaaacucccuaucgaccgaauggucgcccugcagcguaacaugcggcaacggcauccaaguccgcaucaaacccggaucagcaaacaaacccaaagacgaacucaacuacgaaaacgacaucgaaaaaaaaaucugcaaaauggaaaaauguagcuccgucuucaacguagucaacucauccaucggccuaaucaugguacucucuuuucuauuccucaacuaa

SEQ ID NO: 5864 - RNA, 1227 nt, Artificial Sequence
  derived and/or modified CDS sequence (opt11) from Pf(Tz98-021)__BAM84783.1__CSP
augaugagaaaacuggcaauacucucagucucaagcuuccucuucgucgaagcccuauuccaagaauaccaaugcuacggcuccucauccaauacccgcguacucaacgaacucaacuacgacaacgccggcacaaaccucuacaacgaacuagaaaugaacuacuacggaaaacaagaaaacugguacagccuaaaaaaaaacucccgcucacucggcgaaaacgacgacggcaacaacaacaacggcgacaauggccgcgaaggcaaagacgaagacaaacgcgacggcaacaacgaagacaacgaaaaacuacgaaaacccaaacacaaaaaacucaaacaacccgccgacggaaacccagacccaaacgcaaaccccaacgucgaccccaacgccaacccaaacgucgaccccaacgccaacccaaacgucgaccccaacgcgaacccaaacgccaaccccaaugcaaacccaaacgcaaacccaaacgcaaaccccaacgccaaccccaacgccaacccaaacgcaaacccgaacgcuaaccccaacgcuaaccccaacgcgaacccaaacgucgaccccaacgccaacccaaacgccaaucccaacgccaaccccaacgcaaacccaaacgccaaccccaacgcgaaccccaacgcaaaccccaacgcaaaccccaacgccaaccccaaugcaaaccccaacgccaaccccaacgcaaacccaaacgcaaaccccaacgccaaccccaacgcaaacccgaacgccaacccgaacgcgaaucccaacgccaaccccaacgcgaacccaaacgccaaccccaacgccaacccaaacgccaaccccaacaaaaacaaccaaggaaacggccaagggcacaacaugccaaacgaccccaacagaaacgucgacgaaaacgccaacgccaacaacgcaguuaagaacaacaacaacgaagaaccauccgaccaacacauugaaaaauaccucaaaacaauccaaaacagccucuccaccgaaugguccccaugcucaguaaccugcggcaacggaauccaaguacgcaucaaaccaggcucagccaauaaaccaaaagaccaacuagacuacgccaaugacaucgaaaaaaaaaucugcaaaauggaaaaaugcucuuccgucuuuaacgucgucaacuccuccaucgggcucaucauggucuuauccuuccuauuccucaacuaa

SEQ ID NO: 5865 - RNA, 1227 nt, Artificial Sequence
  derived and/or modified CDS sequence (opt11) from Pf(Tz98-030)__BAM84785.1__CSP
augaugcgcaaacucgccauccuaucagucuccagcuuccuauucgucgaagcccuauuccaagaauaccaaugcuacggcuccuccuccaacacccgcguccucaacgaacuaaacuacgacaaugcaggcacaaaccuauacaacgaacucgaaaugaacuacuacggaaaacaagaaaacugguacagccugaaaaaaaacucgcgcucacucggagaaaacgacgacggcaacaacaacaacggagacaauggucgcgaaggaaaagacgaagacaaaagagacggaaacaacgaagacaacgaaaaacuacgaaaaccaaaacacaaaaaacucaaacaacccggagacggcaaccccgaccccaacgccaaccccaauguagaucccaacgccaacccaaacgucgacccaaacgccaauccgaacguagacccaaacgcaaaccccaaugccaaccccaacgcuaaccccaacgccaacccaaacgccaaccccaacgcaaacccaaacgcaaaccccaacgccaaccccaacgccaaccccaacgccaacccgaacgcgaaccccaacgucgaccccaacgccaaccccaacgcuaacccaaacgcaaacccaaacgccaacccaaacgcaaacccaaacgccaacccaaaugcaaaccccaacgccaacccuaacgccaacccaaacgccaacccaaacgcaaaccccaacgcaaaccccaacgccaacccaaacgccaacccgaacgcaaaccccaacgccaaccccaacgccaaccccaacgccaacccaaaugccaaccccaacgccaaccccaacgcaaacccaaacgcgaacccgaacaaaaacaaccaaggcaacggccaaggucacaacaugccaaacgaccccaaucgaaacgucgacgaaaacgccaacgccaacaacgcgguaaaaaacaacaacaacgaagaacccuccgaccaacacauagaaaaauaccuacaaaaaauucaaaacucgcucucaaccgagugguccccaugcagcguaaccugcggcaacggcauccaaguccgcaucaaacccggcuccgccaacaaacccaaagaccaacuuaacuacgaaaacgacauagaaaaaaaaaucugcaaaauggaaaaaugcagcucagucuucaacgucguaaauagcucaaucggacucauuaugguccucucauuccucuuccuaaacuaa

SEQ ID NO: 5866 - RNA, 1227 nt, Artificial Sequence
  derived and/or modified CDS sequence (opt11) from Pf(Tz98-070)__BAM84790.1__CSP
augaugcgcaaacucgccauccuauccgucucuuccuuccucuucgucgaagcacucuuccaagaauaccaaugcuacggaagcuccuccaacacccgcguccuaaacgaacucaacuacgacaacgcuggcacuaaucuauacaacgaacucgaaaugaacuacuacggcaaacaagaaaacugguacucccucaaaaaaaacucacgcucacucggggagaacgacgacggcaacaacaacaacggcgacaauggccgcgaaggaaaggacgaagacaaacgcgacggcaacaaugaagacaacgaaaaacuacgcaaacccaaacacaaaaaacucaaacagccaggcgacggcaaucccgacccuaacgcaaaccccaacguagaccccaacgccaacccaaacguagaccccaacgcaaaccccaacguugacccaaacgccaaccccaacgcaaaccccaacgcuaacccaaacgccaaccccaacgccaaccccaacgccaacccaaacgccaacccaaacgcaaaccccaacgccaacccaaacgcaaacccaaacgccaaccccaacgccaacccaaacgccaacccaaacgcaaaccccaacguagacccgaacgccaacccaaacgcaaaccccaacgccaaccccaacgcgaaccccaacgcaaacccaaacgccaaccccaacgccaaccccaacgccaacccaaacgcaaacccaaacgcaaacccaaacgccaacccaaacgcaaaccccaacgcaaaccccaacgcaaacccgaacgcaaacccgaacgccaaccccaacgcaaaccccaacgccaaccccaacgccaaccccaacaaaaauaaccaaggaaacggccaaggccacaacaugcccaacgaccccaaccgcaacgucgacgaaaacgcaaacgccaacgacgcaguaaaaaacaacaacaacgaagaacccuccgaccaacacauagaaaaauaccuaaaaauaaucaaaaacucccuauccaccgaaugguccccuugcagcgucaccugcggaaacggcauccaaguccgcaucaaacccggcucugccaacaaacccaaagaccaacucgacuacgccaacgacaucgaaaaaaaaauaugcaaaauggaaaaaugcagcuccgucuucaacgucgucaacuccucaaucggccucaucaugguacucucauuccuauuccucaacuaa

SEQ ID NO: 5867 - RNA, 1224 nt, Artificial Sequence
  derived and/or modified CDS sequence (opt11) from Pf(A150)__ACO49332.1__CSP
augcgcaaacucgccauccuauccguauccagcuuccucuuugucgaagcccucuuccaagaauaccaaugcuacggaagcucaagcaacacacgaguccuaaacgaacuaaacuacgacaacgcaggcacaaaccuguacaacgaacuagaaaugaacuacuacgggaaacaagaaaacugguacagccucaaaaagaacucacgcucccuaggcgaaaacgacgacggcaacaacaacaacggagacaacggccgagaaggcaaagacgaagacaaacgcgacggaaacaacgaagacaacgaaaaacuacgcaaaccaaaacacaaaaaacuaaaacagcccggcgacggcaacccagacccgaacgcaaacccaaacguagaccccaacgcaaacccaaacgucgacccaaacgcaaaucccaacguagacccaaacgcaaacccaaacgccaacccaaacgccaacccaaacgcaaacccaaacgcaaacccaaacgcuaaccccaacgcgaaccccaacgcaaaccccaacgcaaaccccaacgcaaacccaaaugccaaccccaacgcaaacccaaacgcaaacccaaacgcaaacccaaacgccaacccaaacgcaaacccaaacgcaaacccaaacgcaaaccccaacgcaaacccaaacgcaaaccccaacgccaaccccaacgcaaaccccaacgccaacccaaacgcgaacccaaacgccaaccccaacgccaacccaaacgccaaccccaacgccaaccccaacgccaacccaaaugccaaccccaacgccaacccaaacgcgaacccaaacgcgaacccaaacgccaacccaaacaaaaacaaccaaggcaacggccaaggccacaacaugccgaacgaccccaaccgaaacgucgacgaaaacgcaaacgcaaacaacgcaguaaaaaacaacaacaaugaagaacccucagacaaacacaucgaacaguaccuaaaaaagauccaaaacucgcucucaacagaauggucgcccugcagcgucaccugcggcaacggaauccaagucagaauaaaaccaggaucagcaaacaaaccgaaagacgaacuagacuaugaaaacgacauagaaaaaaaaauaugcaaaauggagaaaugcaguucugucuucaaugucgucaacucauccaucggacucauaaugguacuauccuuccuguuccuaaacuga

SEQ ID NO: 5868 - RNA, 1215 nt, Artificial Sequence
  derived and/or modified CDS sequence (opt11) from Pf(Gha1109-183)__BAM84829.1__CSP
augaugcgcaaacucgccauccuaucagucuccuccuuccucuucgucgaagcacuauuccaagaauaccaaugcuacggcuccuccuccaacacccgcguccuaaacgaacucaacuacgacaacgccggcaccaaccucuacaacgaacuagaaaugaacuacuacggcaaacaagaaaacugguacucccucaaaaaaaacucccgcucccucggcgaaaacgacgacggcaacaauaacaacggcgacaacggccgagaagguaaagacgaagacaaaagagacggcaacaacgaagacaaugaaaaacuucgcaaaccaaaacacaaaaaacucaaacaacccgccgacggaaaccccgacccaaacgcaaacccaaacguugaccccaacgcaaacccgaacgucgaucccaacgcaaaccccaacguugaccccaacgccaaccccaacgcaaacccgaacgccaaccccaacgccaacccaaacgcaaaccccaaugccaaccccaacgcaaaccccaacgcgaauccaaacgccaacccgaacgcgaacccaaacgccaaccccaacgccaacccaaacgcaaacccaaacgucgaccccaacgcaaacccaaacgccaacccaaacgccaacccaaacgcaaaccccaacgccaaucccaacgccaaccccaacgcaaacccgaacgcaaaccccaacgcuaauccaaacgccaacccaaacgccaacccgaacgcaaaccccaacgcaaaccccaacgccaacccaaacgccaauccaaacgccaacccaaacgcaaacccaaacgcaaaccccaacgccaaccccaacaaaaacaaccaaggaaacggccaaggacacaacaugcccaacgacccaaaccgcaacgucgacgaaaaugccaaugccaacaacgccguaaaaaacaacaacaacgaagaacccuccgaccaacacaucgaaaaguaccuaaaaaccauaaaaaacucacuauccaccgaauggucacccugcuccguaaccugcggaaacggaauccaagucagaauaaaaccaggcuccgcaaacaaaccaaaagaccaacuagacuaugccaacgauauagaaaaaaaaauaugcaaaauggaaaaaugcuccuccgucuuuaacguaguuaacuccucaaucggacucaucaugguacuuuccuuccucuuccucaacuaa

SEQ ID NO: 5869 - RNA, 1215 nt, Artificial Sequence
  derived and/or modified CDS sequence (opt11) from Pf(Pal97-107)__BAM84956.1__CSP
augaugaggaaacucgcaauacuuuccgucucauccuuccucuucgucgaagcccuauuccaagaauaccaaugcuacggcagcuccucaaacacacgaguccuaaacgaacuuaacuacgacaacgcgggcaccaaccucuacaacgaacucgaaaugaacuacuacggcaaacaagaaaacugguacagccuuaaaaaaaacucccgcucacucggcgaaaacgacgacggcaauaacaacaacggagacaacggccgcgaaggcaaagacgaagacaaacgcgacggcaacaacgaagacaacgaaaaacuccgaaaacccaaacacaaaaaacucaaacaacccggcgacggcaaccccgaccccaacgccaacccaaacguggaccccaacgcaaacccaaacgucgauccaaacgccaaccccaacgucgacccaaacgccaaccccaacgccaacccaaacgcaaacccaaacgcaaaccccaacgccaaccccaacgccaacccaaacgccaacccaaacgcgaacccaaacgccaacccaaacgcgaaccccaacgccaaccccaacgccaacccaaacgcaaacccgaauguagacccaaacgccaaccccaacgcaaaccccaacgcgaaucccaacgccaaccccaacgcaaacccaaacgcaaaccccaacgccaaccccaacgccaacccaaacgccaacccgaacgcaaaccccaacgcaaaccccaacgcaaacccaaacgccaacccuaacgcuaacccgaacgcgaacccaaacgccaaccccaacgccaaccccaaugccaaccccaacgcaaacccaaacaaaaacaaccaaggaaacgggcaaggccacaacaugcccaacgaccccaaccgaaacgucgacgaaaacgcaaacgccaacaacgcagucaagaacaacaacaacgaagaacccucggacaaacacauaaaagaauaccuaaccaaaaucaaaaacuccauaucaaccgaaugguccccaugcuccguaaccuguggcaauggcauccaagugcgcauaaaaccgggcuccgccaacaaaccaaaagacgaacuagacuacgaaaacgacauagaaaaaaaaaucugcaagauggaaaaaugcagcuccgucuucaacguaguaaacuccuccauaggccucaucaugguacucucauuccucuuccucaacuaa

SEQ ID NO: 5870 - RNA, 1215 nt, Artificial Sequence
  derived and/or modified CDS sequence (opt11) from Pf(Tz98-103)__BAM84795.1__CSP
augaugcgaaaacucgcaauacucucagucuccagcuuccucuucgucgaagcacuauuccaagaauaccaaugcuacgguagcuccucaaacacccgcgucuugaacgaacucaacuacgacaacgcaggaaccaaccucuauaacgaacuugaaaugaacuacuacggcaaacaagaaaacugguacucccucaaaaaaaacucccgcucacuaggagaaaacgacgacggcaacaacaacaacggagacaacggccgagaaggcaaagacgaagacaaacgcgacggcaauaacgaagacaacgaaaaacuaagaaaaccaaaacacaaaaaacuaaaacaaccagccgacggcaaccccgaccccaacgccaaccccaacguggacccaaacgccaaccccaacguagaccccaacgccaaccccaacgucgacccuaacgcaaaccccaacgcuaacccaaacgccaacccgaacgccaacccaaacgcaaacccaaacgcaaaccccaacgcaaaccccaacgccaauccgaacgcaaacccaaacgccaacccaaacgcaaacccaaacgcaaaccccaacgccaaccccaaugcaaaccccaacgucgaccccaacgccaaccccaacgcuaacccaaacgccaaccccaacgcaaaccccaacgcaaacccaaacgccaaccccaacgcaaacccaaacgccaaccccaacgccaacccaaacgccaaccccaacgccaaccccaacgccaacccaaacgccaacccaaacgccaaccccaacgcaaaccccaacgccaacccuaacgccaacccaaacgcaaaccccaacaaaaacaaccaaggcaacggccaaggccacaauaugccuaacgaccccaaccgcaacgucgacgaaaacgccaacgcuaacaacgcagucaaaaacaacaacaacgaagaacccucagacaaacacauaacagaguaccucaaacgcauccaaaauucccuauccaccgaauggucaccaugcuccguuacaugcggcaacggaauccaaguccgaaucaaacccggauccgcaggcaaauccaaaaacgaacucgauuacgaaaaugacaucgaaaaaaaaaucugcaaaauggaaaaaugcuccuccguauucaacguagucaacuccuccaucggccucaucaugguccucucauuccucuuccucaacuaa

SEQ ID NO: 5871 - RNA, 1215 nt, Artificial Sequence
  derived and/or modified CDS sequence (opt11) from Pf(Yaounde)__AAN87588.1__CSP
augaugcgcaaacucgcuauccucuccguuucgagcuuccucuucgucgaagcccuauuccaagaauaccaaugcuacggcagcuccuccaacaccagaguccuaaacgaacucaacuacgacaacgcaggcaccaaccucuacaacgaacucgaaaugaacuacuacggcaaacaagaaaacugguacucccuaaaaaaaaacagccgaucccucggcgaaaacgacgacggcaacaacaacaacggcgacaacggccgagaaggcaaagacgaagacaaacgcgacggcaacaacgaagacaacgaaaaacuccgcaaacccaagcacaaaaaacuaaaacaaccagccgacgggaacccagaccccaacgccaaccccaacgucgaccccaacgccaaccccaacguagaccccaacgccaaccccaacgucgaccccaacgcgaacccuaacgcaaaccccaacgccaaccccaacgccaacccuaacgcuaaccccaacgccaaccccaacgccaaccccaacgcaaacccaaacgcaaacccgaacgucgacccuaacgccaaccccaacgcaaacccaaacgccaacccgaacgcgaaucccaacgcaaacccaaacgcaaaccccaacgcaaaccccaacgcuaacccgaacgccaacccuaacgccaacccaaacgcaaaccccaacgccaaccccaacgcuaacccuaacgccaaccccaacgcaaacccaaacgccaaccccaacgcaaaccccaacgcaaacccaaacgccaaucccaacgccaacccuaacgccaaccccaacgccaacccaaacgccaacccaaacaaaaacaaccaaggcaacggccaaggccacaacaugcccaacgauccaaaccgaaacgucgacgaaaacgccaaugcaaacaacgccgucaaaaauaacaacaacgaagaacccuccgaccaacacauagaaaaauaccuaaacaaaaucaaaaacucccuaucaaccgagugguccccaugcagcguaaccugcggcaacggcauacaaguccgaaucaaacccggcuccgccaacaaacccaaagaccaacuugacuacgccaacgacaucgaaaaaaaaauaugcaagauggaaaaaugcagcuccguauucaacgucguaaacuccuccaucggccuaaucaugguccucucauuccucuuccuaaacuaa

SEQ ID NO: 5872 - RNA, 1209 nt, Artificial Sequence
  derived and/or modified CDS sequence (opt11) from Pf(CMC247)__ADF48384.1__CSP
augagaaaacuggcaauccucagcgucuccuccuuccucuucgucgaagcccuauuccaggaauaucaaugcuacgguagcucauccaacacccgcguccucaacgaacucaacuacgacaacgccggaaccaaccucuacaacgaacucgaaaugaacuacuacggcaaacaagaaaacugguacucccucaaaaagaacucccgcucccuaggcgaaaacgacgacgguaacaacaauaacggcgacaacggccgcgaaggaaaagacgaagacaaacgugacggaaauaacgaagacaacgaaaaacuacgcaaaccaaaacacaaaaaacucaaacaaccaggagacggaaacccggacccgaacgccaaccccaacguagacccaaacgccaacccaaacgucgaccccaacgccaacccgaacguagaccccaacgccaacccaaacgcaaacccuaacgccaaccccaacgcaaaccccaaugcaaaccccaacgcaaaccccaacgcaaacccaaacgccaacccaaacgcaaacccgaacgccaaccccaacgcaaaccccaacgccaaccccaacgcaaacccaaacgcaaaccccaacgcgaacccaaacgcaaaccccaacgccaacccgaacgcaaaccccaacgccaacccaaacgccaacccaaacgccaacccaaacgccaaccccaacgcaaacccaaacgcgaaccccaacgccaacccaaacgcaaacccaaacgcaaaccccaacgccaaccccaacgccaaccccaacgccaacccaaacgccaaccccaacgcaaaccccaacgccaacccuaacaaaaacaaccaaggcaacggacaaggccacaacaugcccaacgaccccaaccgaaacguagacgaaaaugccaacgcaaacaacgacgaaaacaacaacaaugaggaaccaagcgacaaacacaucgaacaauaccucaagaaaauccaauacagccucuccacagaauggucccccugcuccguaaccugcggaaacggaauccagguccgaaucaaacccggcucugcagacaaacccaaagaccaacuagacuacgaaaacgacaucgaaaaaaaaauaugcaaaauggaaaagugcucuuccguauucaacgucgucaacuccagcauaggacucauaaugguccucuccuuccucuuucuaaacuaa

SEQ ID NO: 5873 - RNA, 1206 nt, Artificial Sequence
  derived and/or modified CDS sequence (opt11) from Pf(Gha1109-215)__BAM84833.1__CSP
augaugcgcaaacucgccauccuauccguaaguucguuccuguucgucgaagcgcucuuccaagaauaccagugcuacggaucaagcuccaacacacgcguccucaaugaacuaaacuacgacaacgccggaaccaaccucuacaacgaacucgaaaugaacuacuacggcaagcaagaaaacugguacucucucaaaaaaaacagcagaucccugggcgaaaacgacgacggaaacaacgaagacaacgaaaaacuacgcaaacccaaacacaaaaaacucaaacaaccagccgacgggaaccccgacccaaacgccaacccaaacgucgacccaaacgcgaacccgaacguagacccaaacgccaacccaaacguagacccaaacgccaauccaaacgcaaauccaaacgcuaacccaaacgccaacccaaacgcaaacccuaacgcaaaccccaacgcaaacccaaacgccaacccaaacgccaacccaaacgcaaaccccaacgccaacccaaacgcaaacccaaacgccaacccaaacgcuaacccaaacgccaacccaaacgcaaauccaaacgccaacccaaacgucgacccaaacgcaaaccccaacgccaacccgaacgccaaccccaacgcaaacccuaacgcaaacccaaacgccaacccaaacgccaacccaaacgcaaacccaaacgcaaacccaaacgccaacccaaacgccaacccgaacgcaaacccaaacgcaaacccaaacgcaaaccccaacgcgaacccgaacgcaaaccccaacgcaaacccaaacgccaaccccaacgccaaccccaacaaaaacaaccaaggcaacggccaaggccacaacaugccgaacgaccccaaccgcaacgucgacgaaaaugcuaaagccaacaacgccgucaaaaacaacaacaacgaagaacccucagacaaacacauagaacaauaccuaaaaacaauccagaacucccucucaacagaauggucccccugcagcgucaccugcggcaacggaauacaagucagaaucaaacccggcucagccaacaaaccaaaagaccaacuagacuacgaaaacgacaucgaaaaaaaaauaugcaaaauggaaaaaugcagcuccguauucaacguggucaacuccuccaucggccucauaaugguccucuccuuccucuuccucaacuaa

SEQ ID NO: 5874 - RNA, 1203 nt, Artificial Sequence
  derived and/or modified CDS sequence (opt11) from Pf(Gha1109-199)__BAM84831.1__CSP
augaugcgaaaacuagccauccucucggugucgagcuuccucuucgucgaagcccuauuccaagaauaccaaugcuacggcagcuccuccaacacccgaguccucaacgaacucaacuacgacaacgccggcaccaaccuguacaacgaacuagaaaugaacuacuauggcaaacaagaaaacugguacagccuaaaaaaaaacucccgcucccuaggcgaaaacgaugacggcaacaacaacaacggagacaacggccgcgaagggaaagacgaagacaaacgggacggaaacaacgaagacaacgaaaaacuaagaaaaccaaagcacaaaaaacuaaaacaacccgcagacggaaaccccgaucccaacgcaaacccaaacgucgacccuaacgccaaccccaacguagacccaaacgccaaccccaacguagacccgaacgccaaccccaacgcaaaccccaacgccaaccccaacgcaaaccccaacgccaaccccaacgcaaacccgaacgccaaccccaacgccaacccaaacgccaaccccaacgcuaaccccaacgccaacccaaaugcaaaccccaacgucgaccccaacgcuaacccaaacgccaaccccaacgcgaaccccaacgccaacccaaacgccaacccaaacgccaacccaaacgccaacccaaacgcaaaccccaacgccaaccccaacgccaaccccaacgccaacccaaacgcaaacccaaacgccaacccaaacgcaaacccgaacgccaaccccaacgcaaacccaaacgccaacccaaacgcaaacccaaacgcuaaccccaacaagaacaaccaaggcaacgggcaagggcacaacaugcccaacgacccaaacagaaacguagacgaaaacgccaacgccaacagcgccgucaaaaacaacaacaacgaagaacccuccgacaaacacaucaaagaauaccuaaacaaaauccaaaacagccucucaaccgaauggucccccuguagcguaaccugcggaaauggcauacaaguacgaauaaaacccggcuccgccaacaaacccaaagacgaacucgacuacgccaaugacaucgaaaaaaaaaucugcaaaauggaaaaaugcuccuccguauucaacguagucaacucuuccaucggucuaaucaugguccucucauuccucuuccuaaacuaa

SEQ ID NO: 5875 - RNA, 1194 nt, Artificial Sequence
  derived and/or modified CDS sequence (opt11) from Pf(Asembo Bay)__AAN87582.1__CSP
augaugcguaaacuagcaauccugagcguaagcucauuccuguucguagaagcccucuuccaagaauaccaaugcuacggcuccagcuccaacacacgaguacucaacgaacuaaacuacgacaacgccggaaccaaccuuuacaacgagcucgaaaugaacuacuacggaaaacaagagaacugguacucacucaaaaaaaacagcagaagccucggcgaaaacgacgacggaaacaacgaagacaacgagaaacuacgcaaacccaaacacaagaaacuaaaacaacccgcagacgguaaccccgacccaaacgccaacccaaacguagacccaaacgcaaacccaaacguagacccgaacgccaacccaaacguggacccgaacgcaaacccaaacgcgaacccaaacgcaaaccccaaugcgaacccaaacgcaaaccccaacgcaaaccccaacgccaacccaaaugcaaacccaaacgcaaacccaaacgcaaaccccaacgccaacccgaacgcgaauccgaacgcaaaccccaacgccaacccgaacgcaaacccgaacgccaaccccaacgcaaacccgaacguagacccaaacgccaaccccaacgcaaaccccaacgccaacccaaacgccaacccaaacgcaaacccaaacgccaaccccaacgcaaacccaaacgccaaccccaacgcaaacccaaacgccaacccaaacgcuaacccaaacgcaaacccgaaugcaaaccccaacgcaaacccaaacgcaaacccaaacgcaaacccaaacgccaacccaaacgccaacccaaacaaaaauaaccaaggcaacggacaagggcacaacaugccaaacgaccccaaccgcaacgucgacgaaaacgcaaacgccaacaacgcagucaaaaacaacaacaaugaagaaccauccgaccaacacauagaaaaauaccuaaaaacgauccaaaauucacucucgaccgaauggucccccugcuccgucaccugcggcaacggaauacaaguacgcaucaaaccaggcucagccaacaaaccaaaagaccaacuugacuacgccaacgacauagaaaaaaaaauaugcaaaauggaaaaaugcuccucagucuucaacgucguaaacagcucaaucggacuaauaaugguccucuccuuccuauuccuaaacuaa

SEQ ID NO: 5876 - RNA, 1194 nt, Artificial Sequence
  derived and/or modified CDS sequence (opt11) from Pf(Tz98-017)__BAM84782.1__CSP
augaugcgaaaacuagcaauccuaagcguaagcucauuccuauucgucgaagcacucuuccaagaauaccaaugcuacggcuccagcucaaacacucgaguacucaacgaacuaaacuacgacaacgccggcaccaaccucuauaacgaacucgaaaugaacuacuauggcaaacaagaaaacugguacucgcucaaaaaaaacucccgaagccuaggcgaaaacgacgacggaaacaacgaagacaacgagaaacuacgcaaacccaaacacaaaaaacuaaaacaacccgcagacggaaaccccgacccaaacgcuaacccaaacguggacccaaacgccaaccccaacguggacccaaacgcgaacccaaacgucgaccccaacgcaaacccaaacgccaacccaaacgccaaccccaacgcaaaccccaaugcaaacccgaacgccaacccgaacgcgaacccaaacgccaacccaaacgcgaacccaaacgccaacccaaacgcaaaccccaacgccaaccccaacgcgaaccccaacgccaacccaaacgccaacccaaacgcaaacccaaacgccaacccaaacguagaccccaacgcaaacccaaacgccaaccccaacgcaaacccuaacgccaaccccaacgcaaacccaaacgcaaacccgaaugcgaacccaaacgcgaacccaaacgcuaacccaaacgcaaacccgaacgcaaacccaaacgcaaaccccaacgccaacccaaacgcgaacccgaacgccaacccaaacgcaaacccgaacgccaacccaaacgccaaccccaacaaaaacaaccaaggaaacggccaaggucacaacaugccaaacgaccccaaccgaaacgucgacgaaaacgccaacgccaacaacgccgucaaaaacaacaacaacgaagagccaucagacaaacacauagaacaauaccuuaacaaaaucaaaaacucgaucuccaccgaguggucacccugcuccguaaccugcggcaacggcauacaaguacgcaucaaacccggcucagccaacaaaccgaaagacgaacuaaacuacgaaaacgacauagaaaagaaaaucugcaaaauggaaaaaugcucauccguauucaacgucgucaacuccucaaucggccucauaaugguacucuccuuccuauuccuaaacuaa

SEQ ID NO: 5877 - RNA, 1194 nt, Artificial Sequence
  derived and/or modified CDS sequence (opt11) from Pf(Yaounde)__AAN87583.1__CSP
augaugcgcaaacucgccauccuaucaguguccucauuccucuucgucgaagcccuauuccaagaauaccaaugcuacggaucauccuccaacacacgcguacucaacgaacucaacuacgacaacgccggcacaaaccucuacaacgaacucgaaaugaacuacuacggcaaacaagagaacugguacucccucaaaaaaaacucccgaucccuaggcgaaaacgacgacgguaacaacgaagacaacgaaaaacuccgcaagccaaaacacaaaaaacuaaaacaacccgcggacggcaaccccgacccgaacgcaaacccaaacgucgacccuaacgccaacccaaacgucgacccaaacgccaacccaaacgucgacccaaacgcaaaccccaacgccaacccaaacgcaaaccccaacgccaacccaaacgcgaaccccaacgccaacccgaacgccaacccaaacgccaacccaaacgccaaccccaacgcaaacccaaacgccaacccaaacgcaaaccccaacgccaauccaaacgccaaccccaacgcaaacccaaacgccaaccccaacgcaaacccaaacgucgacccaaacgcaaaccccaacgcaaacccaaacgccaaccccaacgcaaaccccaacgccaacccaaacgcgaacccaaacgccaacccaaacgcaaaccccaacgccaacccaaacgccaacccaaacgcaaacccgaacgcaaacccaaaugcaaacccaaacgccaaccccaacgcaaacccaaacgcaaaccccaacgcaaacccaaacgcgaacccgaacaaaaacaaccaaggcaacggccaaggccacaacaugccaaacgauccaaaccgaaacgucgacgaaaacgccaacgccaacaacgcgguaaaaaacaacaacaacgaagaaccaucagaccagcacaucgaaaaauaccuaaaacgcauccagaacucccucuccacagaauggucacccugcuccgucaccugcggaaacggaauccaaguccgaauaaaacccggaucagccaacaaaccaaaagaccaacucgacuacgccaacgacauugaaaaaaaaaucugcaaaauggaaaaaugcagcuccguauucaacguuguaaauucauccaucggccucaucaugguuuuaucauuccuauuccuuaacuaa

SEQ ID NO: 5878 - RNA, 1191 nt, Artificial Sequence
  derived and/or modified CDS sequence (opt11) from Pf(Amazonas)__AAN87593.1__CSP
augaugcgcaaacuggccauccucuccgucagcagcuuccuauucguagaagcccuguuccaagaauaccaaugcuacggaagcucaagcaacaccagaguccucaacgaacucaacuaugacaacgccggaaccaaccuauacaacgaacuagaaaugaacuacuacgggaaacaagagaacugguacagccucaaaaaaaacucccgcucacucggagaaaacgacgacggcaacaacaacaacggagacaacggaagagaaggcaaagacgaagacaaacgcgacggcaacaacgaagacaacgagaaacuccgcaaaccaaaacacaaaaaacucaaacaaccagcagacggcaaccccgacccaaacgcgaacccaaacgucgaccccaacgcaaacccaaacgucgacccaaacgccaacccaaacgucgacccaaacgcaaaccccaacgcaaaccccaacgccaaccccaacgccaaccccaacgcaaacccaaacgcaaacccaaacgccaacccaaacgccaacccgaacgcaaaccccaacgccaacccaaacgccaaccccaacgcaaacccaaacguggaccccaacgccaacccaaacgccaacccgaacgccaaccccaacgcgaacccuaacgcaaaccccaacgcaaaccccaacgcaaaccccaaugccaaccccaacgccaaccccaacgcaaaccccaacgcaaaccccaacgcaaaccccaacgccaacccaaacgcgaaccccaacgcaaaccccaacgccaacccaaacgccaacccaaacgccaaccccaacaaaaacaaccaaggaaacggccaaggccacaacaugcccaacgaccccaacagaaacguagacgaaaacgccaacgccaacaacgccguaaaaaacaacaacaacgaagaacccucagacaaacacaucacagaauaccuaaaacgaauccaaaacagccucuccacagaauggucccccugcuccguaaccugcggcaacggcauacaaguccgcaucaaacccggcucagccggcaaauccaaaaacgaacuagacuacgaaaacgacaucgaaaaaaaaaucugcaaaauggaaaaaugcucaucggucuucaaugucguaaacuccucgaucggccucauaaugguccuaucauuccucuuccuuaacuaa

SEQ ID NO: 5879 - RNA, 1191 nt, Artificial Sequence
  derived and/or modified CDS sequence (opt11) from Pf(Amazonas)__AAN87594.1__CSP
augaugcgcaaacucgccauacucagcguaucaucauuccucuucgucgaagcccucuuccaagaauaccaaugcuacggcucauccuccaacacccgaguacuaaacgaacucaacuacgacaacgcaggcacaaaccuauacaacgaacuggaaaugaacuacuacggcaaacaagaaaacugguauucccuaaagaaaaacucacgcucacucggcgaaaacgacgacggaaacaacaacaacggcgacaacggaagagaaggcaaagacgaagacaaacgagacggaaacaacgaagacaacgaaaaccucagaaaacccaaacacaagaaacucaaacaacccgccgacggcaaccccgacccaaacgccaaccccaacgucgaccccaacgcaaaccccaacgucgaccccaacgccaaccccaacguagauccaaacgccaacccaaacgcaaaccccaacgcaaacccaaacgccaaccccaacgccaaccccaacgccaacccaaacgcaaacccaaacgccaaccccaacgcaaaccccaacgcaaaccccaacgccaaccccaacgccaacccaaacgucgaccccaacgccaacccaaacgccaaccccaacgccaaccccaacgccaacccaaacgcaaacccaaacgcgaaccccaacgcaaacccaaacgccaacccaaacgccaaccccaacgccaaccccaacgcaaacccaaacgccaaccccaacgccaacccaaacgcaaacccgaacgccaaccccaaugccaacccaaacgccaaccccaacgccaaccccaacaaaaacaaccaaggcaacggccaaggacacaacaugccaaacgaccccaaccgaaauguagacgaaaacgccaacgccaacaacgccguaaagaacaacaacaacgaagaacccuccgacaaacacauaaccgaauaccuaaaacgaauacaaaacucacuauccaccgaaugguccccaugcucagucacaugcggcaacggcauccaaguccgcaucaaaccaggcucagccggcaaauccaaaaacgaacucgauuacgaaaacgacauagaaaagaaaaucugcaaaauggagaaaugcuccucagucuucaacguaguaaacagcuccauaggacucaucaugguccucucauuccuuuuccuaaacuag

SEQ ID NO: 5880 - RNA, 1191 nt, Artificial Sequence
  derived and/or modified CDS sequence (opt11) from Pf(Bolivar)__AAN87592.1__CSP
augaugcgcaaacuugcaauccuauccguuucaagcuuccucuucgucgaagcacucuuccaagaauaccaaugcuacggaucauccagcaacacccggguauuaaaugaacuaaacuacgacaacgcaggcaccaaccuauacaacgaacuagagaugaacuacuacggcaaacaagaaaacugguacucacucaaaaaaaacucacgaucccuaggagaaaacgacgacggcaacaacaacaacggcgacaacggccgagaaggcaaagacgaagacaaacgcgacggcaauaacgaagacaacgaaaaacuccgaaaaccaaaacacaaaaaauuaaaacaaccagcagacggcaacccagaccccaacgccaaucccaacgucgaccccaacgccaaccccaacgucgaccccaacgcaaaucccaacguagaccccaacgcaaaccccaacgcuaaccccaacgcaaaccccaacgcaaaccccaacgcaaaccccaacgccaaccccaacgccaacccgaacgccaaccccaacgccaacccaaacgcaaacccaaacgcaaacccaaacgccaaccccaacgucgaccccaacgcaaacccuaacgccaacccaaacgcaaacccaaacgcuaacccaaacgccaaccccaacgccaaccccaacgcaaaccccaacgccaacccgaacgcaaaccccaacgcaaaccccaacgcaaaccccaacgccaaccccaacgcaaacccaaacgccaaccccaacgccaaccccaacgccaacccaaacgcaaacccgaacgccaaccccaacaaaaacaaucaaggaaacgggcaaggacacaauaugcccaacgaccccaaccgaaacguagacgaaaacgcuaacgccaacaacgccgucaaaaacaacaacaacgaggaacccucagacaaacauaucacugaauaccuaaaacgaauccaaaacucacucucaacagaaugguccccgugcagcgucaccugcggcaacggcauacaaguccgcaucaaacccggaucagcaggaaaaucaaaaaaccaacucgacuacgagaacgacauagaaaaaaaaaucugcaaaauggaaaaaugcuccuccguauucaacgucguaaacagcucaaucggacucauaaugguacuauccuuccucuuccucaacuaa

SEQ ID NO: 5881 - RNA, 1182 nt, Artificial Sequence
  derived and/or modified CDS sequence (opt11) from Pf(30)__AGR53781.1__CSP
augaugcgcaaacucgccauacugucaguauccucauuccuauucguagaagcccucuuccaagaauaccaaugcuacggcuccuccucgaacacccgaguccucaacgaacucaacuacgacaacgccggcaccaaccucuacaacgaacuagaaaugaacuacuacggcaaacaagaaaacugguacucccucaaaaaaaacagccgcucccucggcgaaaacgacgacggcaacaacgaagacaacgaaaaacuccgaaaaccaaaacacaaaaaacucaaacaacccggcgacggaaaccccgaccccaacgccaaccccaacguagaccccaacgccaacccgaacguagacccaaacgccaaccccaacguagaccccaacgccaaccccaacgccaacccaaacgccaacccgaaugccaaccccaacgccaacccaaacgcaaaccccaacgccaacccaaacgcaaacccaaacgcaaaccccaacgccaaccccaacgccaacccaaacgcgaaccccaacgcaaacccaaacgcgaacccgaacgccaacccgaacguugaccccaacgccaacccaaacgcaaaccccaacgccaacccuaacgccaacccaaacgcaaaccccaacgcaaaccccaaugccaaccccaacgccaacccaaacgccaauccaaacgcuaacccaaacgcgaaccccaacgcaaaccccaacgcaaaccccaacgcaaaccccaacgccaacccaaacgccaaccccaacgcgaaccccaacgccaaccccaaugcaaaccccaacaaaaacaaucaagggaacggccaaggucacaauaugcccaacgaccccaaccgcaacgucgacgaaaacgcaaacgcaaacaacgccgucaaaaacaacaacaaugaagagcccuccgacaaacacaucaccgaauaccucaaaaaaauacagaacucgcucuccaccgaauggucaccaugcagcgucacaugcggaaacggcauacaaguccgcaucaaacccggcuccgccggaaaaucaaaaaacgaacuagacuacgaaaacgacaucgaaaaaaaaauauguaagauggagaaaugcuccucagucuucaacguagucaacagcucaaucggccucaucaugguacuaucguuccucuuccugaacuaa

SEQ ID NO: 5882 - RNA, 1182 nt, Artificial Sequence
  derived and/or modified CDS sequence (opt11) from Pf(Gha1108-087)__BAM84819.1__CSP
augaugcgcaaacuugcaauccucucagucagcuccuuccuauucguggaagcacucuuccaagaauaccaaugcuacggaucaagcuccaacacccgcguacucaacgaacucaacuacgacaacgccgggacaaaccucuacaacgaacuagaaaugaacuacuacggcaaacaggaaaacugguacucacucaaaaaaaacucccgcucccucggagaaaacgacgacggcaacaacgaagacaacgaaaaacuacgcaaacccaaacacaaaaaauuaaaacaacccgcagacggaaacccagacccaaacgcaaacccaaacguggaccccaacgccaacccaaacgucgacccaaacgccaacccaaacgucgacccaaacgccaaccccaacgccaacccaaacgccaaccccaacgccaaccccaacgccaacccgaacgccaaccccaacgcaaaccccaacgcaaacccaaacgcaaacccaaacgcaaacccaaacgcaaaccccaacgccaaccccaacgccaacccaaacgccaaccccaacgccaaccccaacgccaacccaaacguagaccccaacgcaaaccccaacgccaauccaaacgccaacccaaaugccaaccccaacgcgaaccccaacgcgaacccgaacgcgaacccaaacgcaaacccaaacgccaaccccaacgccaaccccaacgccaaccccaacgccaacccaaacgcaaacccaaacgcuaaccccaacgcaaacccaaacgcgaaccccaacgccaaccccaacgcaaacccaaacaaaaacaaccaaggaaacgggcaaggacacaacaugccgaacgaccccaaccgcaacgucgacgaaaaugccaacgccaacaacgcaguuaaaaacaacaacaacgaagaacccucagaccaacacauagaaaaauaccucaaacgcauccaaaacucccucuccaccgaauggucacccugcagcgucaccugcggcaacggcauacaaguccgaaucaaaccaggcuccgcaaacaaacccaaagaccaauuagacuacgccaacgacauagagaaaaaaauaugcaaaauggaaaaaugcuccuccguauucaacgucgucaacagcuccauaggacucaucaugguucuaucauuccuauuccugaacuaa

SEQ ID NO: 5883 - RNA, 1182 nt, Artificial Sequence
  derived and/or modified CDS sequence (opt11) from Pf(Gha1108-098)__BAM84821.1__CSP
augaugcgcaaacucgccauacuauccgucaguuccuuccuauucgucgaagcgcucuuucaagaauaccaaugcuacggcucauccucaaacacccgcguccuaaacgaacucaacuacgacaacgcaggcaccaaccuauacaacgagcucgagaugaacuacuacggaaaacaagaaaacugguacucacuaaaaaaaaacuccagaagccucggcgaaaacgacgacggcaacaacgaagauaacgaaaaacuccgcaaacccaaacacaaaaaacuaaaacaacccggggacggcaacccggaccccaacgccaaccccaacgucgacccaaacgcgaacccaaacgucgacccaaacgcaaacccaaacguagacccaaacgccaacccaaacgccaacccgaacgccaacccaaacgcaaacccaaacgcaaaucccaacgcuaaccccaacgccaacccaaacgccaacccaaacgccaacccaaacgccaaccccaacgccaacccaaacgcaaaccccaacgcaaacccaaacgcaaaccccaacgccaaccccaaugucgaccccaacgcaaaccccaacgccaacccaaacgcaaauccaaacgccaacccuaacgcaaaccccaacgccaacccaaacgccaaccccaacgccaaucccaacgcgaacccaaacgccaaccccaacgcaaacccaaacgccaacccaaacgcaaacccaaacgcaaacccaaacgccaacccaaacgcaaacccaaacgcgaaccccaacgcaaaccccaacgcaaacccaaacaaaaacaaccaagggaacggccaaggccacaacaugcccaacgaaccaaaccgcaacgucgacgaaaacgccaacgccaacaacgcagucaaaaacaauaacaacgaagaacccucagacaaacacaucgaacaauaccuaaacaaaauccaaaacucccucucgaccgaauggucacccugcagcguaaccugcggaaacggcauccaaguacgcauaaaacccggcucagccaacaaaccaaaagaccaacucgacuacgccaacgauauagaaaaaaaaauaugcaaaauggaaaaaugcagcucugucuucaacguaguaaacagcuccaucggacucaucaugguacucucauuucuauuccuaaacuag

SEQ ID NO: 5884 - RNA, 1182 nt, Artificial Sequence
  derived and/or modified CDS sequence (opt11) from Pf(Gha1108-101)__BAM84808.1__CSP
augaugcgcaaacuagcgauccuaagcgucuccucuuuccuauucguagaagcccucuuucaagaauaccaaugcuauggcucaagcucgaacacacgcguacuaaacgaacuaaacuacgacaacgccgggaccaaccucuacaacgaacucgaaaugaauuacuacggcaaacaagaaaacugguacucacucaaaaaaaacagcaggagucucggcgaaaacgacgacggaaacaacgaagacaacgaaaaacuaagaaaaccaaaacacaaaaaacugaaacaaccagcggacggaaaccccgacccaaacgcgaacccaaacgucgacccaaacgccaaccccaacguagacccuaacgcaaacccaaacgucgacccaaacgcaaacccaaacgccaaccccaacgcaaacccaaacgcaaacccaaacgcaaacccaaacgcaaacccaaacgcaaauccgaaugcgaaccccaacgcaaacccaaacgcaaacccaaacgcaaacccgaacgcaaaccccaacgcaaaccccaaugcaaaccccaacgccaaccccaacguagaccccaacgccaacccuaacgccaaccccaacgccaauccaaacgcaaacccaaacgcaaaccccaacgcaaacccgaacgcaaacccaaacgcaaacccaaacgcgaacccaaacgcaaauccaaacgccaaccccaacgccaaccccaacgcaaacccaaacgcaaaccccaacgcaaacccgaacgcaaaccccaacgccaacccaaacgcgaacccaaacgcaaacccaaacaaaaacaaccaaggcaacggacaaggacacaacaugccgaacgaccccaaccgaaacguagacgaaaacgccaacgccaacaacgccguaaaaaacaacaauaacgaagaacccucggaccaacacauagaaaaauaccuaaacaagaucaaaaacucacucucaaccgaauggucccccugcagcgugaccugcggcaacggcauccaaguccgcaucaaaccgggcucagcaaacaaaccgaaagaccaacuagauuacgccaacgacaucgaaaaaaaaauaugcaaaauggagaaaugcagcucaguauucaacgucgucaacuccucaaucgggcuaaucaugguccuauccuuucucuuccuaaacuag

SEQ ID NO: 5885 - RNA, 1182 nt, Artificial Sequence
  derived and/or modified CDS sequence (opt11) from Pf(Gha1108-148)__BAM84814.1__CSP
augaugcgcaaacucgcaauacuaagcguauccucauuuuuauucguagaagcacuauuccaagaauaccaaugcuacggcucauccucaaacacacgcguacuaaacgaauuaaacuacgacaacgcaggcaccaaccuauacaacgaacuugaaaugaacuacuacggcaaacaagaaaacugguacucccuaaaaaaaaacuccagaagccuaggugaaaacgacgacggaaacaacgaagacaacgaaaaacuacgaaaacccaaacacaaaaaacucaaacaaccaggggacggcaacccggacccaaacgcaaacccaaacguagaccccaacgcaaacccaaacgucgacccgaacgccaacccaaacguagacccaaacgcaaaccccaacgcaaacccaaacgcaaacccgaacgccaaccccaacgcgaaccccaacgcaaacccaaacgcaaacccaaacgccaacccaaacgcaaacccaaaugcaaacccaaacgcaaacccaaaugcaaacccgaacgcaaacccgaacgcaaacccgaacgcaaacccaaacguagacccgaacgcaaacccaaacgcaaaccccaacgcaaaccccaacgcaaacccaaacgcaaacccaaacgcaaaccccaacgcaaacccaaacgcaaacccaaacgcaaacccaaacgcaaaccccaacgccaacccgaacgccaacccaaacgcgaacccaaacgcaaacccgaacgccaacccaaacgcaaacccaaacgcaaacccaaacgcgaacccaaacgcaaacccaaacaaaaacaaccaaggcaacgggcaaggacacaacaugcccaacgaccccaaccgcaacgucgacgaaaacgcaaacgccaacuccgcagucaaaaacaacaacaacgaagaacccucagacaaacacauaaaagaauaccuuaacaaaauccagaacucgcucuccaccgaauggucacccugcagcgucaccugcggcaacggcauccaaguacgaauaaaaccaggcuccgccaauaaacccaaagacgaauuagacuacgccaacgacaucgaaaagaaaaucugcaaaauggaaaaaugcucaucggucuucaacgucgucaacagcucaaucggccucauaaugguacucucauuccuguuccuaaacuaa

SEQ ID NO: 5886 - RNA, 1182 nt, Artificial Sequence
  derived and/or modified CDS sequence (opt11) from Pf(Gha1109-097)__BAM84838.1__CSP
augaugcgaaagcucgccauccuauccguaagcucauuccuauucguggaagcccucuuccaagaauaccaaugcuacggcucaagcuccaacacccgaguacucaacgagcuaaacuacgacaacgcaggcaccaaccucuacaacgaacucgaaaugaacuacuacggcaagcaagaaaacugguacucacuuaaaaaaaacuccaggucccugggagaaaacgacgacggaaacaaugaagacaacgaaaaacuacgcaaacccaaacacaaaaaacuaaaacagcccgcggacgggaacccggaccccaacgcgaaccccaacguagaccccaacgccaacccaaacguagacccaaacgcaaaccccaauguagaccccaacgcaaacccaaacgccaacccgaacgcaaaccccaacgcaaaccccaacgcaaacccaaacgcaaaccccaacgcaaauccaaacgcaaacccaaacgcaaacccaaacgcaaaccccaacgcaaauccaaacgcaaacccgaacgcaaacccaaacgcaaaccccaacgccaacccaaacguagacccuaacgcaaacccaaacgccaacccaaacgccaaccccaacgccaaccccaacgccaacccgaacgcaaaccccaacgcaaacccaaacgccaacccgaacgccaaccccaacgcaaaccccaacgccaaccccaacgcaaacccaaacgcgaacccaaacgccaacccuaacgcaaacccgaacgccaaccccaacgcaaacccaaacgcaaacccaaacgcuaaccccaacaaaaacaaccaaggaaacggccaaggccacaacaugccaaaugacccaaaccgcaacgucgacgaaaacgccaaagccaacaacgcagucaaaaacaacaacaacgaagaacccuccgacaaacacaucgaacaauaccucaaaacaauacaaaacucccuaucaaccgaguggucacccugcagcguaaccugcggcaacggcauacaaguccgaaucaaacccggcucagccaacaaaccaaaagaccaacuagacuaugaaaacgacaucgaaaaaaaaauaugcaaaauggaaaaaugcagcuccgucuucaacgucgucaauagcuccaucggacucauaaugguucucuccuuccuauucuuaaacuag

SEQ ID NO: 5887 - RNA, 1182 nt, Artificial Sequence
  derived and/or modified CDS sequence (opt11) from Pf(Gha1110-021)__BAM84839.1__CSP
augaugcgcaaacucgccauacucucagucaguucauuccucuucguagaagcccucuuccaagaauaccaaugcuacggcucauccuccaauacccgcguccucaaugaacucaacuaugacaacgcaggcaccaaccucuacaacgaacuagaaaugaacuacuacggcaaacaagagaacugguacucacucaaaaaaaacagcagaucccucggcgaaaacgacgacggaaacaacgaagacaacgagaaacuacgcaaacccaaacacaaaaaacuaaaacaacccgccgacgggaacccagaccccaacgccaaccccaacguagaccccaacgccaaccccaacgucgacccgaacgcaaaccccaacgucgacccaaacgccaaccccaacgccaacccaaacgcaaaccccaacgcaaauccaaacgcaaacccuaacgccaaccccaacgcaaacccaaacgcaaacccaaacgcgaacccaaacgcaaaccccaacgcaaaccccaacgccaacccaaacgcaaaccccaacgcgaaccccaacgccaaccccaacguagaccccaacgcaaacccaaacgccaacccaaacgccaaccccaacgccaaccccaacgccaaccccaacgccaaccccaacgcaaaccccaacgccaacccaaacgcaaaccccaacgcaaacccaaacgcaaaccccaacgccaacccaaacgcuaaccccaacgcaaacccaaacgcaaaccccaacgcaaacccaaacgcaaacccaaacgccaaccccaacgccaacccaaacaaaaacaaccaaggcaacggccaaggccacaacaugccaaacgaccccaaccgcaacgucgacgaaaacgccaacgccaacaacgccgucaaaaacaacaacaacgaagaacccucagacaaacacaucgaacaguaccucaaaacaaucaaaaacucacucuccaccgaauggucgcccugcuccgucaccugcggcaacggcauacaaguccgcauaaaacccggaucagccaacaaacccaaagacgaauuaaacuacgaaaacgacaucgaaaaaaaaaucugcaagauggaaaaaugcagcucagucuuuaacgucguaaacagcuccaucggccuaauaaugguacuaucguuccuauuccugaacuaa

SEQ ID NO: 5888 - RNA, 1182 nt, Artificial Sequence
  derived and/or modified CDS sequence (opt11) from Pf(Tz03-068)__BAM84802.1__CSP
augaugcgcaaacuagcaauccuaucaguaagcucguuccuauucgucgaagcacucuuccaagaauaccagugcuacggcucauccuccaacacccgcguccucaacgaacuaaacuacgacaacgccggaacaaaccucuacaacgaacucgaaaugaacuacuacggcaaacaagaaaacugguacucucucaagaaaaauuccagaagccuaggcgaaaacgacgacgggaacaacgaagauaacgagaaauuacgcaaacccaaacacaaaaaacuaaaacaacccgcagacggcaacccagacccaaacgcaaacccaaacguagacccaaacgcaaaccccaacguagacccgaacgcgaacccaaacguggacccaaacgccaacccaaacgccaacccaaacgcaaaccccaacgccaacccaaacgcaaacccaaacgcaaacccaaacgccaacccaaacgccaacccaaacgccaaccccaacgcaaacccaaacgcaaacccaaacgccaaccccaacgccaacccgaacgccaacccaaacgcgaacccaaacgucgacccaaacgccaaccccaacgcaaacccgaacgcaaacccaaacgccaacccaaacgccaacccaaacgccaaccccaacgccaacccaaacgcaaacccaaacgcaaacccaaacgccaacccaaacgcaaaccccaacgcaaauccaaacgcaaacccaaaugcaaacccaaacgccaaccccaacgccaacccaaacgccaacccaaacgcaaacccaaacgcgaaccccaacaaaaacaaccaaggcaacggacaaggacacaacaugccgaaugacccuaaccgaaacgucgacgaaaacgccaacgccaacaacgcagucaaaaacaacaacaacgaagaacccuccgaccaacacaucgaaaaauaccuaaaaaucauacagaacucacuauccaccgaguggucgcccugcucaguaaccugcggcaacgguauccaaguccgaaucaaacccggauccgcaaacaaaccuaaagaccaacuagacuacgcaaacgacauagaaaaaaaaaucugcaaaauggaaaaaugcuccucagucuuuaacguagucaacagcuccaucggacuaauaaugguacucucauuccuguuccucaacuaa

SEQ ID NO: 5889 - RNA, 1182 nt, Artificial Sequence
  derived and/or modified CDS sequence (opt11) from Pf(Tz03-070)__BAM84803.1__CSP
augaugcgaaaacucgcaauccucucagucuccuccuuccuauucguggaagcccucuuccaagaauaccaaugcuacgguuccagcuccaacacacgcgugcucaacgaacuaaacuacgacaacgccggaaccaaccucuacaacgaacuagaaaugaacuacuacggcaaacaagaaaacugguacucacugaaaaaaaacagcagaagccuaggcgaaaacgacgacgggaacaacgaagacaacgaaaaacuacgaaaacccaaacacaaaaaacugaaacaacccgcggacggaaacccagacccaaacgcgaacccaaacgucgacccaaacgcaaacccaaacguagacccgaacgcaaacccaaacguagaccccaacgccaacccgaacgcaaacccaaacgcaaacccaaacgcgaaccccaacgcaaacccaaacgcaaacccaaacgcaaacccaaacgccaaccccaacgcaaacccaaacgcaaaccccaacgccaauccaaacgcaaacccgaacgcgaacccaaacgcaaaccccaacgccaaucccaacgcaaacccaaacguagaccccaacgcaaacccaaacgcaaacccgaacgcaaacccaaacgccaacccaaacgcaaacccgaacgcaaacccaaacgccaaccccaacgcgaacccaaacgccaacccaaacgcaaaccccaacgcaaacccaaacgccaacccaaacgcgaaccccaacgcaaacccaaacgcaaacccgaacgcaaacccaaacgcaaacccaaacgcgaacccaaacaaaaauaaccaaggcaacgggcaaggacacaacaugcccaaugaccccaaccgcaacgucgacgaaaacgccaacgccaacaacgcggucaagaacaacaacaacgaagaaccaucggaccaacacauagaaaaauacuuacaaaaaauccaaaacucacucucaaccgaguggucacccugcagcgucacaugcggcaacgguauccaagugcgcauaaaacccggcucagccaacaaaccaaaagaccaacuaaacuacgaaaacgacaucgaaaaaaaaauaugcaagauggaaaaauguagcucaguauucaacgucgucaacuccucgaucggacucauaaugguacucucauuccuguuccuaaacuaa

SEQ ID NO: 5890 - RNA, 1182 nt, Artificial Sequence
  derived and/or modified CDS sequence (opt11) from Pf(Yaounde)__AAN87579.1__CSP
augaugcgcaaacuugccauccuaagcgucagcucguuccuauucgucgaagcacucuuccaagaauaccaaugcuacggcuccagcucaaacacacgaguacucaacgaacucaacuacgacaacgcaggcaccaaccucuacaacgaacucgaaaugaacuacuacggcaaacaagaaaacugguacucacucaaaaaaaacuccagaagccucggugaaaacgacgacggcaacaacgaagacaacgaaaaacuccgcaaacccaaacacaaaaaacucaaacaaccuggggacggaaaccccgaccccaacgcaaacccaaacgucgacccaaacgcaaacccaaacgucgacccaaacgcaaaccccaacguagacccaaacgcgaaccccaacgcaaacccaaacgccaacccaaacgcaaaccccaacgccaacccaaacgccaacccaaacgccaaccccaacgccaacccaaacgccaacccaaacgccaacccaaacgcaaacccgaacgcaaaccccaacgccaaccccaacgcgaaccccaacgcgaacccaaacgucgaccccaacgcgaaccccaacgccaacccaaacgcaaaccccaacgcgaacccaaacgccaaccccaacgcaaaccccaacgcgaacccgaacgcaaaccccaacgccaauccaaacgccaacccaaacgcgaacccgaacgcaaaccccaacgccaaccccaacgcaaacccaaacgcaaacccgaacgcaaaccccaacgcuaaccccaacgcaaacccuaacgcaaaccccaacaaaaacaaccaaggcaacggccaaggacacaacaugccaaacgaccccaaccgcaaugucgacaaaaaugccaacgccaacaacgcagucaaaaacaacaacaaugaagaacccucggacaaacacaucgaagaauaccuaaaaaaaaucaaaaacuccaucuccacugaauggucccccugcuccgucaccugcggcaacggcauacaaguccgcauaaaacccggcuccgccaacaaaccgaaagacgaacuagacuacgaaaacgacaucgaaaaaaaaauaugcaagauggaaaaaugcuccucagucuucaacguagucaacucaucaauaggacucaucaugguacucucauuccuauuccucaacuaa

SEQ ID NO: 5891 - RNA, 1182 nt, Artificial Sequence
  derived and/or modified CDS sequence (opt11) from Pf(Yaounde)__AAN87578.1__CSP
augaugcgcaaacuagccauccucagcguaagcucauuccucuucguagaagcccucuuccaagaauaucaaugcuacggcucaagcuccaacacccgcguccucaacgaacuaaacuaugacaacgccggaaccaaccuauacaacgaacuugaaaugaacuacuacggcaaacaagaaaacugguacucccucaaaaaaaacuccagaagccuuggcgaaaacgaugacggaaacaacgaagacaacgaaaaacuccgaaaacccaaacacaaaaaacuaaaacaacccggggacggaaaccccgaccccaacgcaaacccaaacguagaccccaaugcaaaccccaacguagaccccaacgcaaacccgaacguagacccgaacgcaaaccccaacgcaaaccccaacgcgaacccaaacgccaacccaaacgccaacccaaacgccaacccgaacgccaacccaaacgcgaaccccaacgcaaacccuaacgccaaccccaacgcaaaccccaacgcgaacccaaacgccaacccaaacgcaaauccaaacgcaaacccaaacguagacccaaacgccaacccaaacgcgaaccccaacgcaaacccaaacgcaaaccccaacgcaaacccaaacgcaaacccaaacgcaaacccaaacgccaaccccaacgccaacccaaacgccaacccgaacgcaaaccccaacgccaaccccaacgccaacccaaacgcaaacccuaacgccaacccgaacgccaaccccaacgccaacccaaacgcgaaccccaacgcgaacccaaacaaaaacaaccaaggaaacggccaaggacacaacaugcccaacgaccccaaucgcaacguaaacgaaaacgccaacgccaacaacgccguuaaaaacaacaacaacgaagagcccucagacaaacacauagaaaaauaccuaaaagaaauccaaaacucacucucaaccgaauggucccccugcagcguaaccugcggcaacggcauccaaguacgcaucaaaccaggauccgccggaaaaccaaaaaacgaacuggacuacgaaaacgacauagaaaagaaaauaugcaaaauggaaaaaugcuccucaguauucaacgucgucaacuccucgaucggccucauaaugguccuauccuuccuauuccuaaauuaa

SEQ ID NO: 5892 - RNA, 1179 nt, Artificial Sequence
  derived and/or modified CDS sequence (opt11) from Pf(Asembo Bay)__AAN87607.1__CSP
augaugagaaaacucgccauacucucaguaagcucauuccuauucgucgaggcacucuuccaggaauaccaaugcuacggguccucaagcaacaccagaguccuaaacgaacuaaacuacgacaacgccggcacaaaccuauacaacgaacuagaaaugaacuauuacggcaaacaagaaaacugguauagccugaagaaaaacucccgcucacuaggggaaaacgacgacggcaacaacaacaacggagacaacggccgagaaggaaaagacgaagacaaacgcgacggcaacaacgaagacaacgaaaaacucagaaaacccaaacacaagaaacuaaaacaacccgcagacggcaaccccgacccaaacgcaaaccccaacgucgaccccaacgcaaacccaaacguggacccgaacgcgaaccccaacgcaaacccaaacgcaaaucccaacgcaaaccccaacgccaacccgaacgccaaccccaacgcgaacccaaacgccaacccaaacgccaacccaaacgcaaaccccaaugcaaacccaaacgccaaccccaacguagacccgaacgccaacccaaacgccaacccaaacgcaaacccaaacgcgaaccccaacgcaaaccccaacgcaaaccccaacgccaaccccaacgcaaaccccaacgccaaucccaacgccaaccccaacgcaaaccccaacgccaacccgaacgcaaacccaaacgcaaaccccaacgccaaccccaacgccaaccccaacgccaacccaaacgccaacccaaacgcaaacccaaacaaaaacaaccaaggaaacggccaaggacacaacaugccaaacgaccccaacagaaacgucgacgaaaacgcaaacgccaacaacgcagugaaaaacaacaacaacgaagaacccagcgacaagcacauagaacaauaccuaaacaaaaucaaaaacucaaucuccaccgaaugguccccaugcagcguaaccugcggcaacggcauacaaguccgcauaaaaccaggcucggccaacaaaccaaaggaccaacuggacuacgaaaacgacauagaaaagaaaauaugcaaaauggaaaaaugcagcucagucuucaauguagucaacuccuccaucggacugaucaugguacucuccuucuuguuccugaacuaa

SEQ ID NO: 5893 - RNA, 1179 nt, Artificial Sequence
  derived and/or modified CDS sequence (opt11) from Pf(Asembo Bay)__AAN87608.1__CSP
augaugagaaaacucgcaauccuuagcguauccuccuuccucuucguagaagcccucuuccaagaauaccaaugcuacggcuccucauccaacacccgcguccucaacgaacucaacuacgacaacgccggaaccaaccuauacaacgaacuagaaaugaacuacuacggaaaacaagaaaacugguacagccuaaaaaaaaacagccgcucccucggcgaaaacgacgacggaaacaacaacaacggcgacaacggccgcgaaggcaaagacgaagacaaacgcgacggcaacaacgaagacaacgaaaaacuaagaaaacccaagcacaaaaaacuaaaacaacccgccgacggcaacccagacccaaacgcgaacccaaacgucgacccgaaugcgaaccccaacgucgaccccaacgcaaacccaaacgucgacccaaacgcaaaccccaacgccaacccaaacgccaacccaaacgcaaaccccaaugcaaacccaaaugccaaccccaaugcaaacccaaacgcaaauccaaacgccaacccaaacgcaaaccccaacgucgauccaaacgcaaacccaaacgcaaaccccaacgccaaccccaaugccaacccaaacgcaaacccuaacgccaacccaaacgccaaccccaacgccaaccccaacgcaaaccccaacgcaaacccaaacgccaaucccaacgccaacccaaacgccaaccccaacgccaacccaaacgcaaaccccaacgccaacccaaacgccaaccccaacgcgaaccccaacgccaaccccaacaagaacaaccaaggaaacggacaaggccacaacaugccaaacgaccccaaccgaaacgucgacgaaaacgccaacgccaacaacgcagucaaaaacaacaacaacgaagaaccauccgacaaacacaucgaacaauaccucaaaaucauaaaaaacucacuauccacagaauggucccccugcucagucaccugcggcaacggaauccaaguacgaaucaaaccaggcuccgccaacaaacccaaagacgaacuagacuacgccaacgacauagaaaaaaaaaucugcaaaauggaaaaaugcucauccgucuucaacgucgucaacucaagcaucggacuaaucaugguccucagcuuccuauuccuaaacuaa

SEQ ID NO: 5894 - RNA, 1179 nt, Artificial Sequence
  derived and/or modified CDS sequence (opt11) from Pf(Asembo Bay)__AAN87595.1__CSP
augaugcgaaagcucgccauccuauccgucuccucauuucucuucguagaagcacuguuccaagaauaccaaugcuacggguccuccuccaacacacgaguccucaacgaacucaacuacgacaacgccggcacuaaccuauacaacgaacuagaaaugaacuacuacggcaaacaagaaaacugguacagccugaaaaaaaacucccgcucacucggggaaaaugacgacggaaacaacaacaacggcgacaacggacgcgaaggcaaagacgaagacaaacgcgacggaaacaacgaagacaacgaaaaacucagaaaaccaaaacacaaaaaacucaaacaaccugcagacggcaaccccgaccccaacgccaacccaaacgucgacccaaacgcgaaccccaacgucgaccccaacgcaaauccaaacgucgaccccaacgccaaccccaacgcaaaccccaacgcaaaccccaacgccaaccccaacgcaaaccccaacgcaaacccaaacgcaaacccgaacgcaaacccgaacgccaacccaaacgccaaccccaacgucgaccccaacgcaaacccaaacgccaaccccaacgccaacccaaacgccaaccccaacgcaaaucccaacgccaacccaaacgcaaaccccaacgccaaccccaacgccaaccccaacgccaacccaaacgccaauccaaacgcaaaccccaacgcgaaccccaacgccaaccccaacgcaaaccccaacgcaaaucccaacgccaaccccaacgccaacccgaacgccaacccaaacaaaaacaaccaaggcaacggccaaggacacaacaugcccaacgaccccaacagaaacgucgacgaaaacgccaacgcaaacaacgcaguaaaaaacaacaacaacgaagagcccuccgacaagcacaucacagaauaccuaaaaagaauccaaaacucccucucaacagaauggucaccaugcagcguaaccugcggcaacggcauccaaguaagaaucaaaccaggaucggccggaaaauccaaaaacgaacuagacuacgaaaacgacauagaaaaaaaaauaugcaaaauggaaaaaugcucauccgucuucaaugucgucaauuccagcauuggacucaucaugguccucuccuuccucuuccuaaacuaa

SEQ ID NO: 5895 - RNA, 1179 nt, Artificial Sequence
  derived and/or modified CDS sequence (opt11) from Pf(India)__AAN87618.1__CSP
augaugcgcaaacuagccauccuaucagucuccagcuuccucuucgucgaagcccucuuccaagaauaccaaugcuacggaagcuccagcaacacaagaguccuuaacgagcucaacuacgacaacgcaggcacaaaccucuacaacgaacuugaaaugaacuacuacggcaaacaagaaaacugguacucccucaaaaagaacucccgcagccucggcgaaaacgacgacggcaacaauaacaacggcgacaacggacgcgaaggcaaagaugaagacaaacgagacggcaacaacgaagacaacgaaaaacuccgcaaacccaaacacaaaaaacucaaacaacccggcggcgauaaccccgacccaaacgccaaccccaacgucgaccccaacgccaaccccaacgccaaccccaacgcaaaccccaacgccaaccccaacgccaaccccaacgccaaccccaacgcaaacccaaacgcaaacccaaacgcgaaccccaacgccaaccccaacgccaaccccaacgcaaaccccaacgccaaccccaacgccaaccccaacgccaacccaaacgcaaaccccaaugccaacccaaacgcaaaccccaacgccaacccgaacgccaaccccaacgccaacccaaacgccaacccaaacgcaaacccaaacgcgaaccccaacgccaacccgaacgcuaaccccaacgcaaacccaaacgccaaccccaacgcuaacccaaacgccaaccccaacgcaaacccaaacgccaauccgaacgcaaaccccaacgcaaaccccaacaagaacaaucaaggaaacggccaaggccacaacaugcccaacgaccccaaccgcaacguagacgaaaacgcuaacgccaacaacgcagucaaaaacaacaacaacgaagaacccucagacaaacacauagaacaauaccuaaaaaaaauccaaaacucgcucuccacagaauggucacccugcuccgucaccugcggaaacggcauccaaguccgcauaaaaccaggcucagccaacaaacccaaagacgaacucgacuacgaaaacgacaucgaaaagaaaaucugcaaaauggagaaaugcucauccgucuucaacgucgucaacuccucaaucggccucaucaugguacucucauuccuguuccucaacuaa

SEQ ID NO: 5896 - RNA, 1170 nt, Artificial Sequence
  derived and/or modified CDS sequence (opt11) from Pf(Asembo Bay)__AAN87585.1__CSP
augaugcgcaaacucgccauucuaagcgucuccuccuuccuauucgucgaagcccucuuccaagaauaccaaugcuacggcuccagcuccaacacccgaguucucaacgaacuaaacuacgacaacgcagggaccaaccucuacaaugaacuagaaaugaacuacuacggcaaacaagaaaacugguacucgcuaaagaaaaacucacgcucccucggcgaaaacgacgacggaaacaacgaagacaacgaaaaacuccgcaaacccaaacacaagaaacuaaaacaaccagcagacggaaaccccgaccccaacgccaacccgaacgucgacccgaacgccaaccccaacguagaccccaacgccaacccgaacgucgaccccaacgccaacccaaacgccaaccccaacgcgaaccccaacgccaacccgaacgccaacccaaacgccaacccaaacgcaaacccaaacgcuaaccccaacgcaaacccaaacgccaaccccaacgcaaaccccaacgcaaacccaaacgccaaucccaacgccaaccccaacgccaacccgaacgucgacccaaacgcaaacccaaacgcaaacccaaacgcaaacccaaacgccaacccuaacgccaacccaaacgccaaucccaacgccaacccaaacgccaacccgaacgccaacccaaacgccaacccaaacgcaaaccccaacgcaaaccccaacgccaaccccaacgccaaccccaacgccaacccaaacgccaaccccaacgccaacccaaacgccaaccccaacaaaaacaaccaaggaaacggacaaggucacaacaugcccaacgacccaaaccgcaacguagacgaaaacgccaacgcaaauaacgccgucaaaaacaacaacaacgaagaaccuucagaccaacauauugaaaaauaccuaaaaaccauccaaaacucccucucaaccgaaugguccccaugcagcguaaccugcggaaacggcauacaaguccgcauuaaacccggcuccgccaacaaacccaaagaccaacuagacuacgccaacgacaucgaaaagaaaaucugcaaaauggaaaaaugcagcuccgucuucaacgucgucaacagcuccaucgggcucauaaugguccuaucauuccuauuccuaaacuaa

SEQ ID NO: 5897 - RNA, 1170 nt, Artificial Sequence
  derived and/or modified CDS sequence (opt11) from Pf(Asembo Bay)__AAN87577.1__CSP
augaugcgcaaacucgccauccuaagcguaagcucauuccuauucgucgaagcacucuuccaagaauaccaaugcuacggcucgagcuccaacacccgcguccucaacgaacuaaacuacgacaacgccggaaccaaccucuacaacgaacuagaaaugaacuacuacggcaaacaagaaaacugguacucgcucaaaaaaaacucuagaucacuaggagagaacgacgacggaaacaacgaagacaacgaaaaacuccgcaaacccaaacacaaaaaacuaaaacaaccaggagacggaaacccggaccccaacgcaaaccccaacguggacccaaacgccaacccgaauguugaccccaacgccaacccuaacgucgaccccaacgcaaacccaaacgcaaaccccaacgcaaaccccaacgcaaaccccaacgcaaacccaaacgccaacccaaacgcaaacccaaacgccaacccaaacgcgaacccaaacgccaacccaaacgcgaacccgaacgccaaccccaacgcaaacccaaacgccaacccaaacgucgacccaaacgcaaacccaaacgccaacccuaacgcaaacccaaacgcaaacccaaacgcaaacccgaacgccaacccaaacgcaaacccaaacgcgaaccccaacgcuaacccaaacgccaacccaaacgcgaacccaaacgcaaacccaaaugcaaacccgaacgccaacccaaacgcaaacccaaaugccaaccccaacgcuaacccuaacgcaaacccaaacgcaaacccaaacaaaaacaaccaaggaaacggccaaggccacaacaugcccaacgaccccaaccgaaacgucaacgaaaacgcaaacgccaacaacgcaguaaaaaacaacaacaacgaagaacccuccgacaaacacauagaaaaauaccugaaagaaauacagaacucccucucgaccgaauggucgcccugcagcgucacuugcggaaacggaauccaaguccgaaucaaaccaggcuccgccggaaaaccaaaaaacgaacuagacuacgaaaacgacauagaaaaaaaaaucugcaaaauggaaaaaugcagcucagucuucaacgucgucaacagcuccaucggacucauaaugguacucucauuccucuuccuaaacuaa

SEQ ID NO: 5898 - RNA, 1170 nt, Artificial Sequence
  derived and/or modified CDS sequence (opt11) from Pf(Gha1108-043)__BAM84815.1__CSP
augaugcgcaaacucgcaaucuugagcguauccuccuuccuguucguagaagcacucuuccaagaauaccaaugcuacggcucauccucaaacacacgcguccucaacgaacugaacuacgacaacgccggcacaaaccucuauaacgaacuagagaugaacuacuauggcaaacaagaaaacugguacucccucaaaaaaaacagccgaagccucggcgaaaacgacgacggaaacaacgaagacaacgaaaaacugcgcaaacccaaacacaaaaaacucaaacaacccggagacggaaacccugaccccaacgcaaaccccaacguagacccgaacgccaacccaaacgucgaccccaaugccaaccccaacguagacccaaacgcgaaccccaacgccaacccaaacgcaaacccgaacgcgaaccccaacgccaacccaaacgcaaacccaaacgccaacccaaacgccaaccccaacgccaacccaaacgccaacccaaacgccaacccaaacgccaacccaaaugcaaacccaaacgccaacccaaacgucgacccaaaugcaaacccaaacgcaaaccccaacgcgaacccaaacgcaaaccccaacgcaaacccaaacgcaaaccccaacgccaacccaaacgccaaccccaacgcaaaccccaacgccaacccaaacgcaaacccaaacgcgaacccaaacgccaacccgaacgcaaacccaaacgccaaucccaacgccaacccaaacgccaacccaaacgcaaacccaaacgcaaaccccaacaagaacaaccaaggaaacggacaaggacacaacaugccuaacgauccaaaccgcaacgucgacgaaaacgccaaugccaacagcgcagucaaaaacaacaacaacgaagaaccaucagacaaacacauaaaagaauaccuaaacaaaauccaaaacucgcuuuccacagaauggucgccaugcagcguaacaugcggcaacggcauacaagucagaauaaaaccaggaucggccaacaaaccaaaagacgaacuagacuacgcaaaugacauagaaaaaaaaauaugcaaaauggaaaaaugcagcucagucuucaacguggucaacagcucaauaggacucaucaugguacucuccuuccuguuccuaaacuaa

SEQ ID NO: 5899 - RNA, 1170 nt, Artificial Sequence
  derived and/or modified CDS sequence (opt11) from Pf(Gha1108-052)__BAM84816.1__CSP
augaugcgcaaacuagcgauacuauccguauccucauuccuauucgucgaagcacuauuccaagaauaccagugcuacggauccaguucaaacacccgcguacucaacgaacuaaacuacgacaacgccggcaccaaucucuacaacgaacucgaaaugaacuacuacggcaaacaagaaaacugguacucacuaaaaaaaaacagccggagccuaggagaaaacgacgacggcaacaacgaagacaacgaaaaacugcgcaagccaaagcacaaaaaacuaaaacaacccgccgacggcaacccagacccaaacgcaaacccaaacguagacccaaacgcaaacccaaacguagacccaaacgcaaacccgaacguagacccaaacgcaaacccaaacgccaaccccaacgcgaacccaaacgccaacccgaacgcaaacccaaacgcaaacccaaaugcaaacccaaacgcaaaccccaacgccaacccaaacgccaacccaaacgcuaacccaaacgcaaacccaaacgcaaacccaaacgccaaccccaacguggaccccaacgcaaacccaaaugccaacccaaacgcaaacccaaacgcgaacccaaacgcaaacccgaacgccaaccccaacgccaacccgaacgccaaccccaacgcaaacccaaacgcaaaccccaacgcaaacccaaaugccaacccaaacgcaaacccaaacgcaaacccgaacgcaaacccaaacgccaacccaaacgcaaaccccaacgcaaacccaaacgcaaacccaaacaaaaacaaccaaggcaacggccaaggacacaacaugccgaacgacccaaaccgcaacgucgacgaaaacgccaacgccaacagcgcagucaaaaacaacaacaacgaagagcccuccgacaaacacauagaacaguaccucaaaacaauccaaaacucccuaucaaccgaauggucaccaugcucagucaccugcggcaauggaauacaagugcgcaucaaaccgggcucugccaacaaaccaaaagaccaacuagacuacgaaaacgacaucgaaaaaaaaaucugcaaaauggaaaaaugcagcucagucuucaacguagucaauaguucgaucggccucauaaugguccuaucguuccuuuuccuaaacuaa

SEQ ID NO: 5900 - RNA, 1170 nt, Artificial Sequence
  derived and/or modified CDS sequence (opt11) from Pf(Gha1108-124)__BAM84812.1__CSP
augaugcgcaaacuagccauccuauccgugagcucuuuccuauucgucgaagcacucuuccaagaauaccaaugcuacggcucaagcuccaacacccgcguacucaacgaauuaaacuacgacaacgccggaaccaaccucuacaacgaacucgaaaugaacuacuacggcaaacaagaaaacugguacucccucaagaaaaacagcagaagccucggcgaaaacgacgacggaaacaacgaagacaacgaaaaacuacgcaaacccaaacacaagaaacuaaaacagcccgccgacggaaaccccgaccccaacgcaaacccaaacguagacccaaacgcaaacccaaacgucgaccccaacgcaaacccgaacguagacccaaacgccaacccaaacgcgaacccuaacgcgaacccgaacgccaaccccaacgccaacccaaacgcaaacccaaaugcaaacccaaacgccaaccccaacgcgaacccgaacgccaacccaaacgcaaacccaaacgccaaccccaacgcgaaccccaacgccaacccgaacgcaaacccgaacgucgacccaaacgcaaacccaaacgcaaacccaaacgcaaacccaaacgcaaacccaaacgcaaacccaaacgcaaacccaaacgcaaacccaaacgccaaccccaacgcaaacccgaacgcaaacccaaaugcaaacccaaacgcaaaccccaacgccaaccccaacgcaaacccaaaugcaaacccaaaugcaaaccccaacgcaaacccaaacgcaaacccuaacaaaaacaaccaaggcaacgggcaagggcacaacaugccaaacgacccaaaccgcaaugucgacgaaaacgccaacgccaacaacgcugucaaaaacaacaacaaugaagaacccuccgaccaacacaucgaaaaauaccuuaacaaaaucaaaaacucccucucgaccgaguggucaccaugcuccguaaccugcggcaacggcauacaagucagaauaaaacccggcucagccaacaaacccaaagaccaacuagacuacgccaacgacaucgaaaagaaaauaugcaaaauggaaaaaugcagcuccgucuucaacgucgucaacagcuccaucgggcuaauaauggugcucucuuuccucuuccuaaacuaa

SEQ ID NO: 5901 - RNA, 1170 nt, Artificial Sequence
  derived and/or modified CDS sequence (opt11) from Pf(Gha1109-003)__BAM84834.1__CSP
augaugcgcaaacucgcaauccuguccgucagcucauucuuauucguggaagcacucuuccaagaauaccaaugcuacggcucgagcucaaacacacgcguccucaacgaacuaaacuacgacaacgcaggaaccaaccuuuacaacgaacucgaaaugaacuacuacggcaaacaagaaaacugguacucccucaaaaaaaacuccagaagccucggcgaaaacgacgacggcaacaacgaagacaacgagaaacuucgcaaaccaaaacacaaaaaacuaaaacaacccgccgacggaaacccagacccaaacgcgaacccgaacgucgaccccaacgccaaccccaacguagacccaaacgccaaccccaacgucgaccccaacgccaaucccaacgcaaacccaaacgcgaaccccaacgcuaaccccaacgcaaacccaaacgcaaaccccaacgcaaacccaaacgcaaacccaaacgcaaauccaaacgcaaacccaaacgccaacccaaacgccaaccccaacgccaaccccaacgcaaacccaaacguagaccccaacgcaaacccaaacgcaaaccccaacgcaaaccccaacgcaaacccaaacgcgaaccccaacgcgaacccgaacgcaaacccaaacgcaaaccccaaugccaacccaaacgccaaccccaacgcaaacccgaaugcaaaccccaacgccaacccaaacgccaacccaaacgcaaacccaaacgccaaccccaacgcaaaccccaacgcaaaucccaacgccaacccaaacaaaaacaaccaaggaaacggacaaggccacaauaugccaaacgacccaaacagaaacguagacgaaaacgccaacgcaaacgaugccgucaaaaacaacaacaacgaagaaccaucagaccaacacauagaaaaauaccuaaaaaucaucaaaaacucacucucaaccgaauggucgcccugcagcguaaccugcggcaacggcauacaagugcgcauaaaaccaggcucggccaacaaacccaaagaccaacucgacuacgccaacgacauagaaaaaaaaauaugcaagauggaaaaauguagcucagucuucaacgucgucaacucaucaaucggacucauaaugguccucucauuccuguuccugaacuaa

SEQ ID NO: 5902 - RNA, 1170 nt, Artificial Sequence
  derived and/or modified CDS sequence (opt11) from Pf(Gha1109-058)__BAM84835.1__CSP
augaugcgaaagcuugcaauccuauccguauccuccuuccuauucgucgaagcccuauuccaagaauaccaaugcuacggcuccagcucaaacacacgcguacucaacgaacuaaacuacgacaacgccggcacaaaccuauacaacgaacucgaaaugaacuacuacggcaaacaagagaacugguacucccucaaaaaaaacucccgcagccuaggcgaaaacgacgacggaaacaacgaagacaacgaaaaacuacgcaagcccaaacacaagaaacuaaaacaacccggagacggcaacccagacccaaacgcaaacccaaacguagacccuaacgcaaacccaaacgucgaccccaacgccaacccaaauguagaccccaacgcaaacccaaacgcgaacccaaacgcaaacccaaacgccaacccgaacgcaaacccaaacgcaaaccccaacgcaaacccaaacgcaaaccccaacgcaaaccccaacgcaaacccgaacgcaaacccaaacgccaauccgaacgccaaccccaacgccaacccgaacgucgacccaaacgcaaacccaaacgcaaacccaaacgccaacccaaacgcaaauccaaacgccaacccaaacgccaaccccaacgccaacccaaacgcaaaccccaacgccaacccaaacgcaaacccaaacgccaauccaaacgccaacccaaacgcaaacccaaacgcgaacccaaacgccaacccgaacgccaaccccaacgcgaacccaaacgcaaacccaaacgccaacccaaacaaaaacaaccaaggcaacggacaaggacacaacaugccaaacgaccccaaccgcaacgucgacgaaaacgccaacgccaacaacgccgucaaaaacaacaacaacgaagaacccucagacaaacacaucacagaauaccucaaaaaaauccaaaacucccucuccaccgaauggucucccugcagcguaaccugcgguaacggaauacaaguccgaaucaaacccggaucagcaggaaaauccaaaaacgaacuggacuacgaaaacgacauagaaaaaaaaauaugcaaaauggaaaaaugcuccucagucuucaacguaguaaacagcuccaucggccucauaaugguacuaucauucuuauuccuaaacuag

SEQ ID NO: 5903 - RNA, 1170 nt, Artificial Sequence
  derived and/or modified CDS sequence (opt11) from Pf(Gha1109-105)__BAM84822.1__CSP
augaugcgcaaacucgcaauacuaaguguaagcuccuuccuauucguagaagcccucuuccaagaauaccaaugcuacggcucaucauccaacacccgcguccucaacgaacuaaacuacgacaacgccggaaccaaccucuacaacgaacuugaaaugaacuacuacggcaaacaagaaaacugguacucccuaaagaaaaacucaagaucccuaggagaaaacgacgacggcaacaacgaagacaacgaaaaacuccgcaaaccaaagcacaaaaaacugaaacaacccgccgacggcaacccagacccgaacgccaaccccaacgucgaccccaacgcaaaccccaacgcaaacccaaacgcaaaccccaacgcaaacccaaacgccaacccaaacgcaaaccccaacguagaccccaacgccaacccaaacguagaccccaacgccaacccaaacgcgaacccaaacgcaaaccccaacgcaaaccccaaugcaaacccgaacgcaaaccccaacgcaaaccccaacgcgaacccgaacgucgacccaaacgccaacccaaacgcaaaccccaacgccaacccaaacgcaaacccaaacgcaaaccccaacgccaaccccaacgccaacccaaacgcgaaccccaacgccaacccaaacgccaaucccaacgcaaaccccaacgcaaaccccaacgccaaccccaacgcaaacccaaacgcgaaccccaacgcaaacccaaacgccaacccgaacgcaaacccgaacgccaacccaaacgcuaacccaaacaaaaacaaccaaggaaacggccaaggccacaacaugccaaacgaccccaaccgaaacgucgacgaaaacgccaaagccaacaacgcgguaaaaaacaacaacaacgaagaacccuccgacaaacacauagaacaauaccuaaaaaccauccaaaacucacuuuccaccgaauggucacccuguagcguaaccugcggaaacggaauacaagugcgaauuaaacccggcuccgccaacaaaccaaaagaccaacuagauuaugaaaacgacaucgaaaaaaaaauaugcaaaauggaaaaaugcagcuccgucuucaacguagucaacagcucaauaggccucaucauggugcucucauuccucuuccuaaacuaa

SEQ ID NO: 5904 - RNA, 1170 nt, Artificial Sequence
  derived and/or modified CDS sequence (opt11) from Pf(Gha1109-111)__BAM84823.1__CSP
augaugcgcaaacucgcaauccuaucugucuccucauuccucuucguggaagcccucuuccaagaauaccaaugcuacggcuccuccuccaacaccagagugcucaaugaacucaacuacgacaacgccggaaccaaccuauacaacgaacuagaaaugaacuacuacggcaaacaagaaaacugguacucacucaaaaaaaacuccagaagccuaggcgaaaacgacgacggaaacaacgaagacaacgaaaaacugcguaaaccaaaacacaaaaaacucaaacaacccggagacggaaacccagaccccaacgcaaacccaaacguagacccaaacgcaaaccccaacguagauccaaacgcaaaccccaacguugacccaaacgcaaaccccaacgcaaacccgaacgcaaacccaaacgcaaacccaaacgccaaccccaaugcuaaccccaacgcaaacccaaacgcaaacccgaacgcaaacccgaacgccaaccccaacgcaaaccccaacgcaaaccccaacgcaaaccccaacgcaaacccaaacguagaccccaacgccaacccaaacgcaaacccaaacgcaaacccaaacgcgaacccaaacgcgaacccaaacgcaaacccaaacgccaaccccaacgccaaccccaacgcaaacccgaacgcaaacccaaacgcgaaccccaacgcaaacccgaacgcaaaccccaacgccaaccccaacgcaaacccaaaugcaaaccccaacgcaaaccccaacgcaaacccaaacgcaaaccccaacaagaacaaccaaggaaacggacaaggacacaacaugcccaacgaccccaaccgcaacguagacgaaaacgccaacgccaacaacgccgucaaaaacaacaacaaugaagaacccucagacaaacacauaaaagaauaccucaacaaaauacagaacuccaucucaacagaaugguccccaugcagcguaaccugcggcaacggcauacaagugcgcauaaaaccaggcucagccgacaaacccaaagaccaacuagacuacaucaacgacauagaaaaaaaaauaugcaaaauggaaaaaugcagcuccguauucaacgucgucaacagcuccauaggacuaaucauggugcuauccuuccuauuccuaaacuag

SEQ ID NO: 5905 - RNA, 1170 nt, Artificial Sequence
  derived and/or modified CDS sequence (opt11) from Pf(Gha1109-125)__BAM84824.1__CSP
augaugcgcaaacucgcuaucuuaagcguaagcucuuuccucuucguggaagcacucuuccaagaauaccaaugcuacggcuccuccucaaacacacgcguccucaacgaacucaacuaugacaacgccggcacaaaccucuacaacgaacuugaaaugaacuacuacggcaagcaagaaaauugguacucacucaaaaaaaacagccgcucacuaggcgagaacgacgacggcaacaacgaagacaacgagaaacuccgaaaaccaaaacacaaaaaacucaaacaacccgccgacggaaacccagacccaaacgccaaccccaacgucgacccaaacgcaaacccaaacguagacccgaacgcaaaccccaacguagaccccaacgcaaaccccaacgccaacccaaacgccaacccgaacgccaacccgaacgccaacccaaacgccaaccccaacgcaaaccccaacgccaaccccaacgccaaccccaacgccaaccccaacgccaacccaaacgccaacccaaacgccaacccaaacgccaaccccaacgcaaauccaaacgucgacccuaacgcaaacccaaaugccaaccccaacgcaaaccccaacgcgaacccaaacgccaacccaaacgcaaacccaaacgccaaccccaacgcaaaccccaacgcaaacccgaacgccaacccaaacgcaaaccccaacgcaaacccaaacgccaacccaaacgccaacccaaacgccaaccccaacgcaaacccaaacgccaacccaaacgccaacccaaacaaaaacaaccaaggcaacggacaaggccacaacaugccaaacgaccccaaucgcaacguagacgaaaacgccaacgccaacaacgcaguaaaaaacaacaacaacgaagaaccuucagaccaacacaucgaaaaauaccucaaaacaaucaagaacucgcucucaaccgaauggucccccugcagcgugaccugcggcaacggcauacagguacgcaucaaaccaggcuccgccaacaaaccaaaagaccaacucgacuacgccaaugacauagaaaaaaaaaucugcaaaauggaaaaaugcuccucagucuucaacgucgucaacucaucuaucggccuaauaaugguacucucauuccuauuccuaaacuag

SEQ ID NO: 5906 - RNA, 1170 nt, Artificial Sequence
  derived and/or modified CDS sequence (opt11) from Pf(Gha1109-127)__BAM84825.1__CSP
augaugcgcaagcucgcaauccugagcgucagcucauucuuauucguagaagcacuauuccaagaauaccaaugcuacggcuccucaucaaacacacgaguccuaaacgaacucaacuacgacaacgccggcacaaaccuauacaacgaacuagaaaugaacuacuacggaaaacaagagaacugguacucacucaaaaaaaacucaagaagccuaggcgaaaacgacgacggcaacaaugaagacaacgaaaaacuaagaaaacccaaacacaaaaaacuaaaacaacccggcgacggcaaccccgacccaaacgcuaaccccaacgucgauccgaacgcaaaccccaacgucgacccuaacgcaaaccccaacgucgacccaaacgcaaacccaaacgcgaaccccaacgccaacccaaacgcaaacccaaacgccaacccaaacgcgaaccccaacgcuaacccaaacgccaaccccaacgccaacccaaacgccaaccccaacgcaaacccaaaugcaaacccaaacgccaacccaaacgcaaauccaaacgucgaccccaacgccaaccccaacgccaacccuaacgcaaaccccaacgcaaacccaaacgcaaacccaaacgcaaacccaaacgccaacccgaacgcgaaccccaacgcgaacccgaacgccaaccccaacgcaaaccccaacgccaacccgaacgcaaaccccaacgccaacccaaacgcgaacccaaacgccaacccaaacgccaacccaaacgccaaccccaacgcaaaccccaacaaaaacaaccaaggaaacggccaaggccacaacaugccaaacgaccccaaccgcaacguagacgaaaacgccaacgccaacaacgcuguaaaaaacaacaacaacgaagaacccuccgacaaacacauaaccgaauaccugaaaaaaaucaaaaacucccucucaaccgaauggucaccaugcuccgucaccugcggcaacggcauacaaguccgcaucaaacccggcuccgccggcaaaucaaaaaacgaacucgacuaugaaaacgacauagaaaagaaaaucugcaaaauggaaaaaugcuccuccgucuucaacgucgucaacagcucaaucggccucauaaugguacucuccuuccuauuccucaacuaa

SEQ ID NO: 5907 - RNA, 1170 nt, Artificial Sequence
  derived and/or modified CDS sequence (opt11) from Pf(Gha1109-158)__BAM84826.1__CSP
augaugcgcaagcucgccauccucagcgucagcucauuccucuucguagaagcccuauuccaagaauaccaaugcuacggaucaagcucaaacacaagaguacucaacgaacuaaacuacgacaacgccggcaccaaccucuacaacgagcuagaaaugaacuacuacgguaaacaagaaaacugguacucacucaagaaaaacagccgcagccugggcgaaaacgacgacggaaacaacgaagacaacgaaaaacuacgaaaacccaaacacaagaaacucaaacaacccgccgacgguaacccggacccgaacgccaaccccaacgucgaccccaacgcaaacccaaacguagaccccaacgccaacccaaacguagacccaaacgcaaaccccaacgccaacccaaacgcaaaccccaacgcaaacccaaacgcgaaccccaacgccaaccccaacgcaaacccaaacgcaaacccuaacgccaaccccaacgccaacccaaaugccaaccccaacgccaacccaaacgcaaacccaaacgccaacccaaacgucgaccccaacgcaaacccaaacgccaacccaaacgcaaacccaaacgcaaacccaaacgcaaauccaaacgccaacccaaacgcaaacccaaacgccaacccaaacgcgaacccgaacgcaaaccccaacgccaaccccaacgcaaacccgaacgcaaacccaaacgcaaacccaaacgcaaaccccaacgccaacccaaacgccaacccaaacgcaaacccaaacgcaaacccaaacaaaaacaaccaagggaacggacaaggacacaacaugccaaacgaccccaaucgcaacgucgacgaaaacgccaacgccaacaacgcagucaaaaacaacaacaacgaagaaccaucagacaaacacauagaacaauacuuaaaaaccaucaaaaacucacucucgaccgaaugguccccaugcuccguaaccugcggaaacggaauacaaguccgcaucaaaccuggaucagcaaacaaaccgaaagaccagcuagacuacgccaaugacauagaaaagaaaauaugcaaaauggaaaaaugcagcucagucuucaacguagucaacagcuccaucggacucauaauggugcuuuccuuccuguuccuaaacuaa

SEQ ID NO: 5908 - RNA, 1170 nt, Artificial Sequence
  derived and/or modified CDS sequence (opt11) from Pf(Gha1109-205)__BAM84832.1__CSP
augaugcgcaaacucgccauccuaagcgucucauccuuccuauucgucgaagcccucuuccaagaauaccaaugcuacggcuccucuucaaacacacgugugcucaacgaacuaaacuacgacaacgccgggaccaaccucuacaacgaacucgaaaugaacuacuacggcaaacaagaaaacugguacucacucaaaaaaaacucccgcagccuaggcgaaaacgacgacggcaacaacgaagacaacgagaaacuacguaaacccaaacacaaaaaacuaaaacagccagcagacggaaaccccgacccaaacgcaaacccaaacguagacccaaacgccaaccccaacgucgaccccaacgccaaccccaacgucgaccccaacgcaaacccuaacgccaaccccaacgccaacccaaacgccaaucccaaugccaacccaaacgccaacccaaacgccaacccaaacgcaaacccaaacgccaaccccaacgccaacccaaacgcaaacccaaacgccaaccccaacgccaacccaaacgcaaaccccaacguagaccccaacgcaaacccaaacgccaaccccaacgccaaccccaacgcaaacccaaacgcaaacccaaacgcaaaccccaacgcaaacccaaacgcaaacccgaaugcaaaccccaacgccaacccaaacgccaacccaaacgcaaacccaaacgcaaaccccaacgcaaaccccaacgccaacccaaacgcaaacccaaacgcaaaccccaacgccaacccgaacgcgaacccaaacaaaaacaaccaaggcaacggccaaggacacaacaugccaaacgaccccaaccgcaacguagacgaaaacgccaacgcaaacaacgcaguaaaaaacaacaacaacgaagaacccuccgaccagcacauagaaaaauaccucaaaaucauccaaaacucccucucaaccgaauggucacccugcagcgucacaugcggcaacggcauucaaguacgcaucaaacccggauccgccaacaaacccaaagaccaacucgacuacgcaaacgacauagaaaaaaaaauaugcaagauggaaaaaugcagcucaguauucaacguaguaaacuccucaaucggccucaucaugguccuaucauuucuauuccuaaacuaa

SEQ ID NO: 5909 - RNA, 1170 nt, Artificial Sequence
  derived and/or modified CDS sequence (opt11) from Pf(T9/96)__BAD73957.1__CSP
augaugcgcaaacucgccauccucuccgucuccucguuccucuucgucgaagcacucuuccaagaauaucaaugcuacggaucauccucaaacacccgaguacucaacgaacucaacuacgacaacgcagggaccaaccucuacaacgagcucgaaaugaacuacuacggaaaacaagaaaacugguacucccuuaaaaaaaacucacgaucccuaggcgaaaacgacgacggcaacaacgaagacaacgaaaaacuacgcaaacccaaacacaaaaaacuaaaacaaccagccgacggaaaccccgaccccaacgcgaaccccaacguggacccaaacgcgaacccaaacgucgacccaaacgcaaacccgaacgucgacccaaacgccaacccgaacgccaaccccaacgccaaccccaacgcgaacccaaacgccaacccgaaugccaacccaaacgccaacccaaacgccaacccaaacgccaaccccaacgccaaccccaacgcaaacccaaacgcaaacccaaacgccaacccaaacgccaaccccaacgucgacccaaacgccaacccaaacgcgaaccccaacgcaaaccccaacgcaaacccgaacgccaacccaaacgcaaacccgaacgccaaccccaacgccaaccccaacgcaaacccaaacgcaaaccccaacgccaacccaaacgcaaaccccaacgccaacccaaacgccaaccccaacgccaaccccaacgcaaacccuaacgcaaacccaaacgccaaccccaaugccaaccccaacaaaaacaaccaaggcaacggccaaggccacaacaugccaaacgaccccaaccgcaaugucgacgaaaacgccaacgcaaacaacgcaguaaagaacaacaacaacgaagagcccuccgacaaacacaucgaacaguaccuaaaaacaaucaagaacucacuaucaaccgaauggucucccugcuccgucaccugcggaaacggcauacaaguccgcauaaaacccggcuccgccaacaaaccaaaagacgaacucgacuacgccaacgacauagaaaaaaaaauaugcaaaauggaaaaaugcaguucagucuucaacgugguuaacuccuccaucggacucaucaugguccucuccuuccuauuucuuaacuaa

SEQ ID NO: 5910 - RNA, 1170 nt, Artificial Sequence
  derived and/or modified CDS sequence (opt11) from Pf(Tz93-015)__BAM84752.1__CSP
augaugcgaaaacuagccauccucuccguauccucguuccuauucgucgaagcccucuuccaagaauaccaaugcuacggauccuccucaaacacccgcguacucaacgaacuaaacuacgacaacgcuggcacaaaccuauauaacgaacucgaaaugaacuacuacggcaaacaagagaacugguacucacuuaaaaaaaacucccgcagcuuaggcgaaaacgaugacggcaacaacgaagacaacgaaaaacugcgcaaacccaaacacaaaaaacucaaacaaccaggggacggcaauccugaccccaacgcaaaccccaacguagaccccaacgcaaacccuaacgucgacccgaacgccaacccaaacgucgaccccaacgccaaccccaacgcuaacccaaacgccaauccaaacgccaaccccaacgccaacccaaacgccaaccccaacgccaaccccaacgcaaacccaaacgccaacccaaacgcaaaccccaacgcaaaccccaacgcaaacccgaacgcaaacccaaacgcaaaccccaacguagacccaaacgccaaccccaacgccaaccccaacgccaacccaaacgccaacccgaacgccaaccccaacgccaaccccaacgcaaacccgaaugcaaacccaaacgcgaacccaaacgccaaccccaacgcgaaccccaacgcgaacccaaacgccaacccuaacgccaacccgaacgcgaaccccaacgccaacccaaacgcaaacccaaacgccaaccccaacgcaaacccaaacaaaaacaaccaaggcaacggacaaggccacaacaugccaaacgaccccaaccgaaacguagacgaaaacgccaacgcaaacgacgccgucaaaaacaacaacaacgaagagcccucagaccagcacauagaaaaauaccugaaaaucaucaagaacucacuaucaaccgaauggucccccugcuccguaaccugcggcaacggcauccaaguacgcauaaaaccgggcucagccaacaaaccaaaagaccaacuagacuaugccaacgacaucgaaaaaaaaauaugcaaaauggaaaaaugcagcucaguauucaacgucgucaacagcucaaucggacucauaauggucuuaucauuccuauuccuaaacuaa

SEQ ID NO: 5911 - RNA, 1170 nt, Artificial Sequence
  derived and/or modified CDS sequence (opt11) from Pf(Tz93-050)__BAM84762.1__CSP
augaugcgcaaacucgcaauccuauccguauccuccuuccucuucgucgaagcccucuuccaagaauaccaaugcuacggaagcuccucgaacacccgcguacuaaacgaacuuaacuacgacaacgccggaaccaaccucuacaacgaacuagaaaugaacuacuacggcaaacaagaaaacugguacucccucaaaaagaacuccaggucccuaggcgaaaaugacgacggcaacaacgaagacaacgaaaaacuacgaaaaccuaaacacaagaaacuaaaacaacccggcgacggcaaccccgaccccaacgccaaccccaacguagacccaaacgcaaacccgaacguagaccccaacgcaaaccccaacgucgaccccaacgccaaccccaacgcaaaccccaacgccaaccccaaugccaaccccaacgccaacccaaacgccaaccccaacgccaacccaaacgccaacccgaacgcaaacccuaacgccaaccccaacgccaacccaaacgccaaccccaacgcaaacccaaacgcaaaccccaacguagaccccaacgcgaacccaaacgccaacccaaacgcaaacccaaacgcgaaccccaacgcaaacccaaacgcgaacccaaacgcgaaccccaacgccaaucccaacgccaacccaaacgcaaaccccaacgcaaaccccaaugccaacccaaacgccaaccccaacgcaaacccaaacgcaaacccaaacgcaaaccccaacgcaaaccccaacgccaacccaaacgcaaaccccaacaaaaacaaccaaggaaacggccaaggccacaacaugcccaacgaccccaaccgcaacguagacgaaaacgcaaacgccaacaacccggucaaaaacaacaacaacgaagaacccuccgacaaacacauaacagaauaccuaaagaaaaucaaaaacucaauaucaaccgaauggucacccugcuccguaaccugcggcaacgguauccaaguacgcauaaaacccggcuccgccaacaaacccaaagacgaacuggacuacgaaaacgacauagaaaagaaaauaugcaaaauggaaaaaugcuccuccguauucaacguaguaaacucaucaaucggccucaucaugguccuauccuuccuauuccuaaacuaa

SEQ ID NO: 5912 - RNA, 1170 nt, Artificial Sequence
  derived and/or modified CDS sequence (opt11) from Pf(Tz93-105)__BAM84774.1__CSP
augaugcgcaaacuagcaauccuuagcguaagcucauuccuauucgucgaagcacucuuccaagaauaccaaugcuacggcucaagcuccaacacacgcguccuaaacgaacuuaacuacgacaacgcaggaaccaacuuauacaacgaacucgaaaugaacuacuacggaaaacaagagaacugguacucacucaagaaaaacagccgaagccuaggagagaacgacgacggcaacaacgaagacaacgaaaaacugcgaaaacccaaacacaagaaacuuaaacagcccggagacggaaaccccgaccccaacgcaaaccccaacguagaccccaacgcaaaccccaacgucgacccaaacgccaacccgaacgucgacccgaacgccaacccgaacgcaaaccccaacgccaacccgaacgcaaacccaaacgcgaacccaaacgccaaccccaacgcgaaccccaacgccaacccaaacgcaaacccaaaugcaaaccccaacgccaacccaaacgccaacccaaacgcaaacccgaacgccaaccccaacguagaccccaacgcaaaccccaacgcaaauccaaacgccaacccaaacgcaaaccccaacgcaaacccaaacgcaaaccccaacgcaaacccaaacgcaaacccaaacgccaacccaaacgcaaacccaaacgccaacccaaacgcaaacccaaacgcaaacccaaacgccaacccaaacgcaaaccccaacgcaaacccgaacgcaaacccaaacgccaacccaaacgcaaacccaaacaaaaacaaccaaggcaacggacaaggccacaacaugcccaacgaccccaacagaaacgucgacgaaaaugccaacgccaacaacgcagucaaaaacaacaacaacgaagaaccaucagaccaacacauagaaaaauaccugaaaaucauacaaaacucgcucucaaccgaguggucucccugcuccgugaccugcggcaacggcauacaaguacgaaucaaaccuggcucagcaaacaaaccaaaagaccaauuggacuaugccaacgacauagaaaagaaaauaugcaaaauggaaaaaugcuccucagucuucaacgucgucaacuccucaaucggacucauaaugguacuuucauuccuguuccucaacuaa

SEQ ID NO: 5913 - RNA, 1170 nt, Artificial Sequence
  derived and/or modified CDS sequence (opt11) from Pf(Tz93-121)__BAM84777.1__CSP
augaugcgcaaacucgcaauccugagcgucagcuccuuccuauucguagaagcccucuuucaagaguaccaaugcuacgguuccuccuccaacacacgcguccucaacgaacucaacuacgacaacgccggcaccaaucucuacaacgaacucgaaaugaacuacuacggcaaacaagaaaacugguacucacucaaaaaaaacucccgaucccucggcgaaaacgacgacggcaacaacgaagacaacgaaaaauuacgcaagcccaaacacaaaaaacuaaaacaacccggagacggcaaccccgaccccaacgcaaacccaaacguggaccccaacgccaacccaaacgucgacccaaacgccaacccaaacgucgaccccaacgccaaccccaacgccaaccccaacgccaacccaaacgcaaaccccaacgccaacccaaacgccaaccccaacgcaaaccccaacgcaaaccccaacgcuaacccgaacgccaacccaaacgccaaccccaacgucgaccccaacgccaaccccaacgccaacccaaacgccaaccccaacgccaacccuaacgccaaccccaacgcaaaccccaacgccaaccccaacgcuaaccccaacgcaaaccccaacgccaaccccaacgccaacccaaaugccaaccccaacgccaaccccaacgccaaccccaacgccaacccaaacgcuaacccaaacgccaaccccaacgccaacccuaaugcgaacccaaacgccaaccccaacgccaacccaaacgccaaccccaacaaaaauaaccaaggcaacggccaaggacacaacaugcccaacgaccccaaccgaaacgucgaugaaaacgcaaacgccaacaacgccgucaaaaacaacaacaacgaagaacccucggaccaacacaucgaaaaauaccuaaaaaaaaucaaaaacucaauauccaccgaauggucacccugcagcgucaccugcggcaacggcauccaaguacgaaucaaacccggauccgccaacaaacccaaagacgaacuagacuacgaaaacgacaucgaaaaaaaaaucugcaaaauggaaaaaugcucaucagucuucaacgucgucaauuccucaaucggacucaucaugguccucuccuuccuauuccuaaacuag

SEQ ID NO: 5914 - RNA, 1170 nt, Artificial Sequence
  derived and/or modified CDS sequence (opt11) from Pf(Tz98-032)__BAM84786.1__CSP
augaugcgcaaacuagcaauauuauccguauccucauuucuauucgucgaagcccucuuccaagaauaccaaugcuacggaucaagcucaaacacacgagugcucaacgaacuaaacuacgacaacgccggcaccaaccucuauaacgaacucgaaaugaacuacuacggcaaacaagaaaacugguacucccucaagaaaaacuccagaucccuaggcgaaaacgacgacggaaacaacgaagacaacgagaaacuccgcaaacccaaacacaagaaacucaaacagcccgccgacggcaacccagaccccaacgcaaacccaaacguagacccaaacgcaaaccccaacguggacccgaacgcaaacccaaacguagaccccaacgccaacccaaacgcaaaccccaacgcaaaccccaacgcgaacccgaacgccaaccccaacgcaaacccaaacgccaacccaaacgccaacccaaacgcaaacccgaacgcaaacccaaacgccaacccaaacgcaaacccaaacgcaaaccccaacgccaacccaaacgcgaaccccaacguagacccaaacgcaaacccaaacgccaacccaaacgcaaacccaaacgcaaacccgaacgccaacccaaacgcaaaccccaacgcgaacccaaacgcaaacccaaacgccaaccccaacgcaaaccccaacgcgaacccaaacgccaaccccaacgcaaacccaaacgccaacccaaacgcaaacccaaacgccaacccaaacgccaacccaaacgcaaacccaaacaaaaacaaccaaggaaacggacaaggacacaacaugccaaacgaccccaaccgcaacgucgacgaaaaugccaaugccaacaacgccgucaaaaacaacaacaacgaagaacccucagacaaacacauagaacaauaccugaacaaaaucaaaaacuccaucucaaccgaauggucccccugcagcguaaccugcggcaacggcauccaaguacgaauaaaaccagguucggccaacaaaccgaaagaugaacucaacuacgaaaacgacaucgaaaagaaaauaugcaaaauggaaaaaugcagcuccgucuuuaacguagucaacuccuccaucggacuaauaaugguacucuccuuccuauuccuaaacuag

SEQ ID NO: 5915 - RNA, 1170 nt, Artificial Sequence
  derived and/or modified CDS sequence (opt11) from Pf(Tz98-107)__BAM84796.1__CSP
augaugcgcaaacucgcaauccucuccgucuccuccuuccucuucgucgaagcccucuuccaagaauaccaaugcuacggauccagcucgaacacacgcgugcucaacgaacucaacuacgacaacgccgggaccaaccucuacaacgaacuagaaaugaacuacuacggcaaacaagaaaacugguacucgcucaaaaaaaacucccgcagcuuaggcgaaaacgacgacggaaacaaugaagacaacgaaaaacuucgcaaacccaaacacaaaaaacucaaacagcccgccgacggaaacccagaccccaacgccaacccaaacguagacccaaacgcaaacccuaacgucgacccaaacgcgaacccaaacgucgaccccaacgcgaacccaaacgccaaccccaacgccaaccccaacgccaaccccaacgcaaaccccaacgcaaaccccaacgcaaaccccaacgccaaccccaacgccaaccccaacgcaaaccccaacgccaacccaaacgccaaccccaacgcgaacccaaacgccaacccgaacgucgaccccaacgccaacccaaacgcaaacccaaacgccaacccaaacgccaacccaaacgccaacccaaacgccaacccaaacgccaacccaaacgccaaccccaacgccaaccccaacgcaaaccccaacgccaacccuaacgccaacccaaaugcaaaccccaacgccaaccccaacgccaaccccaacgccaacccaaacgcaaacccaaacgcaaaccccaacgcaaaccccaacaaaaacaaccaaggaaacggccaaggccacaacaugccaaacgacccaaaccgcaacguugacgaaaacgccaacgcaaacaacgccguuaaaaauaacaacaacgaagaacccucagaccaacacauagaaaaauaccugaaacgaauccaaaacucccucuccaccgaauggucacccugcuccgugaccugcggaaacggcauacaaguccguaucaaacccggcucggccaacaaacccaaagaccaacucgacuacgcuaacgacauagaaaaaaaaaucugcaaaauggaaaaaugcagcucagucuucaacgucguaaacagcucaaucggacuuauaaugguccuaucauuccuauuccuaaacuag

SEQ ID NO: 5916 - RNA, 1167 nt, Artificial Sequence
  derived and/or modified CDS sequence (opt11) from Pf(Asembo Bay)__AAN87599.1__CSP
augaugcgaaaacuagccauccucuccguuuccuccuuccucuucgucgaagcccucuuccaagaauaccaaugcuacggcuccuccucaaauacccggguccucaacgaacucaacuacgacaacgccggcaccaaccucuacaacgaacucgaaaugaacuacuacggcaaacaagaaaacugguacucccucaaaaaaaacucacgcucccucggcgaaaacgacgacggaaacaacaauaacggcgacaacggccgcgaaggaaaagacgaagacaaacgcgacggcaacaacgaagacaacgaaaaacuccgcaaaccaaaacacaaaaaacuaaaacaacccgcagacggaaaccccgaccccaacgccaacccuaacgucgaccccaacgcaaaccccaacgucgaccccaaugccaaccccaacguggaccccaacgcaaacccaaacgcaaaccccaacgccaaccccaacgcaaaccccaacgcaaaccccaacgcaaaccccaacgcaaaccccaacgccaaccccaacgccaacccuaacguagacccaaacgccaacccaaacgcaaaccccaacgccaaccccaacgccaaccccaacgccaaccccaacgcaaacccaaacgccaacccaaacgccaaccccaacgccaaccccaacgccaacccuaacgcaaaccccaacgcaaaccccaacgccaaccccaacgccaacccgaacgccaaccccaacgcaaaccccaacgccaaccccaacgcaaauccaaacgccaaccccaacaaaaacaaccaagguaacggucaaggacacaacaugcccaacgacccaaaccgcaacguagacgaaaacgcaaacgccaacaacgccgucaagaacaauaacaacgaagaacccucagacaaacauaucgaacaauaucucaacaaaauccaaaacagccucuccacagaauggucgccaugcagcgucacaugcggcaacggcauccaaguacgcaucaaaccaggcuccgcaaacaaacccaaagaccaacuagacuaugccaacgacauagaaaagaaaaucugcaaaauggagaaaugcucaucaguauucaacgucgucaacuccucaaucggccuaaucaugguccuaucauuccucuuccucaacuaa

SEQ ID NO: 5917 - RNA, 1158 nt, Artificial Sequence
  derived and/or modified CDS sequence (opt11) from Pf(Asembo Bay)__AAN87581.1__CSP
augaugcgcaaacucgcaauacugagcgucagcucauuccuguucgucgaagcccucuuccaagaauaccaaugcuacggaucaagcuccaacacccgcguccucaacgaacuaaacuaugacaacgcaggcacaaaccucuacaacgaacucgaaaugaacuacuauggcaaacaagaaaacugguacucgcucaaaaaaaacucccgaagccuaggcgaaaacgacgacggcaacaacgaagacaacgaaaaacuacgaaaacccaaacacaaaaaacucaaacaacccgcggacggcaaccccgacccaaacgcaaaucccaacgucgacccaaacgccaacccaaacguggaccccaacgccaacccaaacgucgacccaaacgcaaacccaaacgccaacccaaacgcaaacccgaacgccaacccgaacgcuaaccccaacgccaacccaaacgccaaccccaacgccaacccaaacgccaacccaaacgcaaaccccaacgcaaauccuaacgcaaaccccaacgcaaaccccaacgucgaccccaacgccaauccgaacgcuaaccccaacgcaaaccccaacgcaaacccaaacgccaacccgaacgcgaauccgaacgcaaacccaaacgcaaacccaaacgccaaccccaacgcaaacccaaaugcaaaccccaacgccaaccccaacgcaaaccccaacgcaaacccaaacgccaaucccaacgcaaaccccaacgccaaccccaacgcaaacccaaacgcaaacccaaacaaaaacaaccaaggcaacggucaaggccacaacaugccaaacgaccccaaccguaaugucgacgaaaacgccaaggccaacaacgcagucaaaaacaacaacaacgaagaacccucagacaaacacauuaaacaauaccuaaaaaaaauccaaaacucgaucucaacagaauggucacccugcagcgucaccugcggcaacggcauccaaguccgcaucaaacccggaucugccgacaaaccaaaagaccaauuagacuaugacaacgacauagaaaaaaaaaucugcaaaauggaaaaaugcagcuccgucuucaacgucguaaacagcuccaucggacucauaaugguccucuccuuccucuuccuaaacuaa

SEQ ID NO: 5918 - RNA, 1158 nt, Artificial Sequence
  derived and/or modified CDS sequence (opt11) from Pf(Gha1108-115)__BAM84810.1__CSP
augaugcgaaaacucgccauacucagcgucaguuccuucuuguucgucgaagcacucuuccaagaauaccagugcuacggcuccagcucaaacacaagaguacucaacgaacucaacuacgacaacgccggcacaaaccucuacaacgaacuagagaugaacuacuacggcaaacaagaaaacugguacucacucaaaaaaaacuccaggagccuaggcgaaaacgacgacggaaacaacgaagacaacgaaaaauuaagaaaaccaaaacacaaaaaacucaaacaacccgccgacggcaaccccgacccaaacgcaaacccaaacgucgaccccaacgccaacccaaacgucgacccaaacgcaaacccaaacgucgaccccaacgccaacccaaacgcaaaccccaacgcuaaccccaacgccaacccaaacgcaaaccccaacgccaacccaaacgcgaacccaaacgcaaaccccaacgccaacccaaacgccaaccccaacgucgacccaaacgccaacccaaaugccaaccccaacgccaacccaaacgcaaaccccaacgccaaccccaacgccaaccccaacgccaacccaaacgcaaaccccaacgcaaaccccaacgcaaacccaaacgcaaauccaaacgcaaaccccaacgccaaccccaacgccaacccaaacgcaaaccccaacgccaaccccaacgcaaaccccaacgcaaaccccaacgcgaaccccaacgcgaaccccaacgcaaacccaaacgccaaccccaacaagaacaaccaaggaaacggccaaggacacaacaugccgaacgaccccaaccgcaacgucgacgaaaacgccaacgccaacaacgccgucaaaaacaacaacaacgaagaacccuccgaccagcauaucgaaaaauaccuccaaaaaauacaaaauucccucucaaccgaauggucaccaugcucagucaccugcggcaacggcauacaaguacgcaucaaaccgggauccgccaacaaaccuaaagaccaacugaacuacgaaaacgauaucgaaaaaaaaauaugcaaaauggaaaaaugcagcuccgucuucaacgugguaaacuccucaaucggccuaaucaugguucucucauuccuauuccucaacuaa

SEQ ID NO: 5919 - RNA, 1158 nt, Artificial Sequence
  derived and/or modified CDS sequence (opt11) from Pf(Gha1108-119)__BAM84811.1__CSP
augaugcgaaaacucgccauccucagcguaucaucauuccucuucgucgaagcacucuuccaagaauaccagugcuacggcucaagcuccaacacccgcguccuaaacgaacuaaacuacgacaacgccggaaccaaccuauacaacgaacuagaaaugaacuacuacggcaaacaagaaaacugguacucacucaaaaaaaacagcagaucccugggcgaaaacgacgacggaaacaacgaagacaacgaaaaacuacgcaaaccaaaacacaaaaagcucaaacaaccaggcgacgggaacccagaccccaacgccaacccaaacguagacccaaacgcgaacccgaacguagaccccaacgccaacccaaacguggacccaaacgcaaaccccaacgcaaaccccaacgcaaacccaaacgcaaacccaaacgcaaacccgaacgccaaccccaacgcaaacccaaacgccaacccaaacgcaaacccaaacgccaaccccaacgcaaacccaaacgccaacccaaacgcaaacccaaacgucgacccaaacgccaacccaaacgcaaacccaaacgcaaacccaaacgcgaacccaaacgcaaacccaaacgcaaacccaaacgccaaccccaacgcaaacccuaacgcaaacccgaacgcaaacccaaacgccaaccccaacgcaaacccaaacgccaacccaaacgcaaaccccaacgcuaacccgaacgcaaaccccaacgcaaacccaaacgccaaccccaacgccaacccaaacaaaaacaaccaaggcaacggacaagggcacaacaugcccaacgaccccaaccgaaacgucgacgaaaacgcuaacgcuaacaacgcagucaaaaacaacaacaacgaagagcccuccgaccaacacaucgaaaaauaccuaaaaacaaucaaaaacucacuaucgaccgaauggucccccuguuccgugaccugcggcaacggcauccaaguacgcauaaaaccaggcuccgccaacaaaccaaaagaccaacuggacuacgaaaacgacauagaaaaaaaaaucugcaagauggaaaaaugcucaucagucuucaacguagucaacagcucaaucggacuuauaaugguccuauccuuccucuuccuaaacuaa

SEQ ID NO: 5920 - RNA, 1158 nt, Artificial Sequence
  derived and/or modified CDS sequence (opt11) from Pf(Gha1109-071)__BAM84836.1__CSP
augaugcgcaagcucgccauccuguccgucuccuccuuucucuucgucgaagcacucuuccaagaauaccaaugcuacggcucauccuccaacacacgcguacuaaacgaacuaaacuacgacaacgccggcaccaaccucuacaacgaacuagaaaugaacuacuacggcaaacaagaaaacugguacucacucaaaaaaaacuccagaucccugggcgagaaugacgacgggaacaacgaagacaacgagaaacuacgcaaaccaaaacacaaaaaacucaaacaacccggagacggcaacccugaccccaacgcaaacccaaacgucgacccaaacgcaaaccccaacguagacccgaacgccaaccccaacgucgacccaaacgccaacccaaacgccaaccccaacgccaaccccaacgccaacccuaacgccaaccccaacgccaaccccaacgcgaaccccaacgccaaccccaacgcaaacccaaacgccaacccaaacgccaaccccaacgccaacccaaacgccaaccccaacgccaacccuaacgucgaccccaacgccaacccgaacgccaacccaaacgccaaccccaacgccaacccgaacgcuaaccccaacgccaacccaaacgccaacccaaacgccaaccccaacgccaacccgaacgccaaccccaacgcaaaccccaacgcaaaccccaacgccaaccccaacgcaaaccccaacgccaaccccaacgcuaaccccaacgcaaaucccaacgcaaaccccaacaagaacaaccaagggaacggacagggacacaacaugcccaacgaccccaacagaaacgucgacgaaaacgccaacgccaacaacgccguaaaaaacaacaacaacgaagaacccucagaccaacauaucgaaaaauacauaaaaaaaauccaaaacucacuauccacagaauggucccccugcuccguaacaugcggcaacgguauccaagugcgcauaaaacccggcucagcaaacaaacccaaagacgaacucaacuacgaaaacgauaucgaaaaaaaaaucugcaaaauggaaaaaugcuccucaguauucaacgucguaaacagcuccaucggccucaucaugguucucucauucuuauuccucaacuaa

SEQ ID NO: 5921 - RNA, 1158 nt, Artificial Sequence
  derived and/or modified CDS sequence (opt11) from Pf(Gha1109-163)__BAM84827.1__CSP
augaugcgaaaacucgccauccucuccguaagcucguuccuauucguugaagcacucuuccaagaauaccaaugcuacggaucauccucaaacacacgaguccucaacgaauuaaacuacgacaacgccggcaccaaccucuacaacgaacuagaaaugaacuacuacggcaaacaagaaaacugguacucccucaaaaaaaacagcagaucccuaggcgaaaacgacgacggaaacaacgaagacaacgaaaaacuaagaaaacccaaacacaaaaaacuaaaacaacccgcagacggaaaccccgaccccaacgcaaaccccaacguagacccaaacgcaaaccccaacguagacccaaacgccaacccaaacgucgaccccaacgccaacccaaacgccaacccaaacgccaacccgaacgcaaacccaaacgcaaacccaaacgccaacccaaacgcgaaccccaacgccaacccaaacgccaacccuaacgccaacccaaacgcaaacccaaacgcuaacccaaaugccaaccccaacgccaaccccaacgucgacccaaacgcaaaccccaacgcaaacccaaacgcaaacccuaacgccaaccccaacgccaaccccaacgcaaacccaaacgcaaacccaaacgccaaccccaacgcaaaccccaacgcaaaccccaacgccaacccaaacgcaaaccccaacgcaaaccccaacgccaacccgaacgccaacccgaacgcgaacccaaacgcaaacccaaacgccaacccaaauaaaaacaaccaaggcaacggccaaggccacaacaugcccaaugaccccaaccgcaacgucgacgaaaaugccaacgccaacaacgcagucaaaaacaacaacaacgaagaaccuucagaccaacacauagaaaaguacuuaaaaaccauccaaaacucacucuccacugaauggucccccugcuccgucacuugcggaaacggcauccaaguccgcaucaaaccaggcagcgccaacaaaccaaaagaccaacuagacuacgccaacgacauugaaaaaaaaaucugcaaaauggaaaaaugcagcuccguauucaacguaguaaacagcuccaucggacucaucaugguccucuccuuccucuuccugaacuaa

SEQ ID NO: 5922 - RNA, 1158 nt, Artificial Sequence
  derived and/or modified CDS sequence (opt11) from Pf(Tz93-007)__BAM84748.1__CSP
augaugcgcaaacuagcgauccuauccgucagcuccuuccucuucgucgaagcacucuuccaagaauaccaaugcuacggcucaagcuccaacacgcgcguacucaacgaacucaacuacgacaacgccggcaccaaccuauacaacgagcucgaaaugaacuacuacggaaaacaagaaaacugguacucccucaaaaaaaacucacgcucacuaggcgaaaacgacgacggaaacaacgaagacaacgaaaaacucaggaaacccaaacacaaaaaacucaaacaacccgcggacggaaaccccgacccgaacgcaaaccccaacgucgaccccaaugccaacccaaacgucgaccccaacgccaacccaaacgucgacccaaacgcaaacccaaacgcaaacccaaacgccaacccaaacgcaaacccuaacgcaaaccccaacgccaacccaaacgccaaccccaacgcaaaccccaacgcuaacccaaacgccaacccgaacgccaacccaaacgccaacccaaacgcaaaccccaacguggaccccaacgcaaaccccaacgccaaccccaacgccaacccaaacgcaaaccccaacgcaaacccaaacgccaaccccaacgccaacccaaacgcaaacccaaacgcaaacccaaacgccaacccaaacgccaaccccaacgccaaccccaacgcaaaccccaacgcaaaucccaacgcaaacccaaacgcaaaccccaacgcgaaccccaacgccaaccccaaugcaaacccgaacaagaacaaccaaggaaacggccaaggccauaacaugccaaacgacccaaaccgaaacguagacgaaaaugccaacgccaacaacgcaguaaaaaacaauaacaacgaagagcccuccgacaaacacaucgaacaauaccuaaaaacaaucaaaaacucacucucaaccgaauggucgcccugcuccguaaccugcggaaacggcauccaaguccgcaucaaacccggcuccgccaacaaacccaaagacgaacuagacuacgcaaacgacaucgaaaaaaaaaucugcaaaauggaaaaaugcuccuccgucuucaacgucgucaacucaucuaucggccuaaucaugguccucuccuuccuauuccuaaacuaa

SEQ ID NO: 5923 - RNA, 1158 nt, Artificial Sequence
  derived and/or modified CDS sequence (opt11) from Pf(Tz93-008)__BAM84749.1__CSP
augaugcgaaaacuugcaauccugagugucagcuccuuccuauuuguagaagcccuauuccaagaauaucaaugcuacggcucaagcucaaacacacgcguacucaacgaauuaaacuacgacaacgccggaaccaaccucuacaacgaacucgaaaugaacuacuacggcaaacaagaaaacugguacucccucaaaaaaaacagccgcagccucggagaaaacgacgacggaaacaacgaagacaacgaaaaauuacgcaaacccaaacacaaaaaacuaaaacaacccgcagacggaaacccugaccccaacgcaaacccaaacguagacccaaacgccaacccgaacgucgacccaaacgcaaaccccaacgucgaccccaacgcaaaccccaacgcaaaccccaacgccaaucccaacgcaaaccccaacgcgaaccccaacgcaaacccaaacgcaaaccccaacgcuaaccccaacgccaaccccaacgcaaaccccaacgccaaccccaacgccaacccaaacgccaaccccaacguagacccaaacgcgaacccaaacgcgaacccuaacgcaaaccccaacgcaaaccccaacgccaaccccaacgccaacccaaacgcaaaccccaacgccaacccgaacgccaaccccaacgccaacccaaacgcaaacccuaacgccaaccccaacgcaaaccccaacgccaaccccaacgcaaacccaaacgccaacccaaacgcgaaccccaacgcaaaccccaaugcaaaccccaacaaaaacaaccaaggaaacggccaagggcacaacaugcccaacgacccaaaucgcaacgucgacgaaaacgccaacgccaacaacgcagucaaaaacaacaacaacgaagaacccucugacaaacacauaacagaauacuuaaaaaaaauccaaaacucccucuccaccgaguggucccccugcagcgucaccugcggcaacggcauacaaguccgcauaaaacccggcucagccggaaaaucgaaaaacgaacuagacuacgaaaacgacaucgaaaaaaaaaucugcaaaauggaaaaaugcagcucagucuucaacgucgucaacuccuccaucggccuaaucaugguccucucguuccucuuccucaacuaa

SEQ ID NO: 5924 - RNA, 1158 nt, Artificial Sequence
  derived and/or modified CDS sequence (opt11) from Pf(Tz93-013)__BAM84751.1__CSP
augaugcgaaagcucgccauccuauccgucagcuccuuccuauucgucgaagcgcucuuccaagaauaccaaugcuacggaucauccucaaacacgcguguacucaacgaacuaaacuacgacaacgccggaaccaaccucuacaacgagcucgagaugaacuacuacggcaaacaagaaaacugguacucacucaagaaaaacagcagaagccuaggcgaaaacgacgacggcaacaacgaagacaacgaaaaacuccgaaaacccaaacacaaaaaacugaaacaaccagcagacggcaacccggacccaaacgccaacccaaacguagacccaaacgccaacccuaacguagacccaaacgccaacccgaacguagaccccaacgccaaccccaacgcaaacccgaacgcaaacccaaacgcaaaccccaacgcgaacccaaacgccaaucccaacgccaauccaaacgcaaacccaaacgcaaacccgaacgcaaacccaaacgcaaaccccaacgcaaaccccaacgccaacccaaacgucgacccgaacgcaaacccaaacgcaaacccaaacgcaaacccaaacgccaacccaaacgccaacccaaacgcaaacccaaacgcuaaccccaacgcaaacccaaacgcaaacccaaaugcaaaccccaacgcaaacccaaacgccaacccaaacgccaacccaaacgccaacccaaacgcaaaccccaacgcaaaccccaacgcaaacccaaacgcaaacccaaacgccaacccaaacaaaaacaaucaaggaaacggacaaggacacaacaugcccaacgaccccaaccgcaacguaaaugaaaacgcuaacgccaacaacgcagucaaaaacaacaacaacgaagaacccuccgacaaacacauaaccgaauaccugaaaaaaauccaaaacucacuuucaacagaauggucacccuguucaguaaccugcggcaacggcauacaaguacgcauaaaacccggcucagccggaaaaucacgcgacgaacuagacuacgaaaacgacauagaaaaaaaaauaugcaagauggaaaaaugcagcucagucuuuaacgucgucaacuccuccaucggacuaauaaugguacucuccuuccuauuccuaaacuaa

SEQ ID NO: 5925 - RNA, 1158 nt, Artificial Sequence
  derived and/or modified CDS sequence (opt11) from Pf(Tz93-048)__BAM84761.1__CSP
augaugcgcaaacuagcaauccuguccguauccuccuuccuuuucgucgaagcacucuuccaagaauaccaaugcuacggcucaagcuccaacacccgcgugcucaacgaacugaacuacgacaaugccggaacaaaccucuacaacgaacucgaaaugaacuacuacggcaaacaagaaaacugguacucccucaaaaaaaacuccagaagccuaggagagaacgacgacggaaacaacgaagacaacgaaaaacuacgcaaacccaaacacaaaaaacuaaaacaacccgccgacggaaacccagacccaaacgcaaaccccaacguggacccaaacgcaaacccaaacgucgaccccaacgcaaaccccaacguagauccaaacgccaacccaaacgcaaaccccaacgcgaaccccaacgcaaacccaaacgcaaaccccaacgcgaacccaaacgcaaacccgaacgccaacccaaacgccaacccaaacgcaaaccccaacgcaaacccaaacgcaaacccaaacgccaaccccaacgcaaaccccaacguagaccccaacgccaaccccaacgcgaaccccaacgcaaaccccaacgccaacccgaacgcgaaccccaacgccaacccaaacgcaaaccccaacgcaaacccaaacgcaaaucccaacgcgaaccccaacgcaaaccccaacgccaacccaaacgccaaccccaacgccaaccccaacgcaaacccgaacgcaaaccccaacgccaaccccaacgccaaccccaacaaaaacaaccaaggaaacggacaaggccacaacaugccaaacgaccccaaccgcaacgucgacgaaaacgccaacgccaacaacgcagucaaaaacaacaacaacgaagaacccucagaccaacacauagaaaaauaccucaaaaucaucaaaaacucccucucaaccgaauggucccccugcuccguaaccugcggcaacggaauccaaguacgaauaaaaccaggcuccgccaacaaacccaaagaccaacuagacuacgccaacgacaucgaaaaaaaaauaugcaagauggaaaaaugcagcucgguauucaacguaguaaauagcuccaucggacucauaaugguucuaucauuccuauuucucaacuaa

SEQ ID NO: 5926 - RNA, 1158 nt, Artificial Sequence
  derived and/or modified CDS sequence (opt11) from Pf(Tz93-120)__BAM84776.1__CSP
augaugcgcaagcucgccauccucuccgucagcucauuccucuucgucgaagcccucuuccaagaauaccagugcuacgguucauccuccaacacacgcguccucaacgaacucaacuacgacaacgccggcaccaacuuauacaacgaacuagagaugaacuacuacggcaaacaagaaaacugguacucacuuaaaaaaaauagccgcucccucggcgaaaacgacgacggcaacaacgaagacaacgaaaaauuacgcaaacccaaacacaaaaaacuaaaacaaccagcugacggaaaccccgaccccaacgcuaacccgaacgucgacccaaacgcaaaccccaacguagacccaaacgccaaccccaacgucgaccccaacgccaacccaaaugccaaccccaacgcaaaccccaacgccaaccccaacgccaaccccaacgcaaaccccaacgccaaccccaacgccaacccaaacgcaaaccccaacgccaaccccaacgccaaccccaacgccaacccaaacgccaaccccaacguagaccccaacgcaaaccccaacgcaaaccccaacgcaaaccccaacgccaacccaaacgccaaccccaacgcaaacccgaacgccaaccccaacgccaacccuaacgccaaccccaacgcgaacccaaacgcaaacccaaacgcaaaccccaaugcaaaccccaacgcaaacccaaacgcaaaccccaacgccaaccccaacgcaaacccaaacgcaaacccuaacgccaacccaaacaagaacaaccaaggaaacggccaaggacacaacaugccaaacgaccccaaucgcaacgucgacgaaaacgccaacgcuaacaacgcagucaaaaacaacaacaacgaagaaccaucagaccagcacauagaaaaauaccucaaaauaauucaaaacucacucuccacugaaugguccccauguucuguaaccugcggcaacggcauccaaguccgaauaaaaccaggcucagccaacaaaccaaaagaccaacuagacuacgccaacgacauagaaaaaaaaaucugcaaaauggaaaaaugcuccucagucuucaacgucgucaacuccuccaucggccucaucaugguacucuccuuccucuuccuaaacuaa

SEQ ID NO: 5927 - RNA, 1158 nt, Artificial Sequence
  derived and/or modified CDS sequence (opt11) from Pf(Tz98-101)__BAM84794.1__CSP
augaugcgcaaacucgcaaucuugagcguauccuccuuccucuucguggaagcccuauuccaagaauaccaaugcuauggcucaagcuccaacacacgcguccucaacgaacuaaacuacgacaacgccggaaccaaccucuacaaugaacucgagaugaacuacuacggcaagcaagaaaacugguacucgcuaaagaaaaacagccgaagccuaggagaaaacgacgacggcaacaacgaagacaacgagaaacuacgcaaacccaaacacaagaaacucaaacaacccgccgacggaaacccagacccgaacgcaaacccaaacguagacccgaacgcaaacccaaacguagaccccaacgcaaacccgaacgucgacccgaacgcaaacccaaacgcaaacccgaacgcaaacccaaacgcaaacccaaacgccaacccaaacgcaaaccccaaugcgaacccgaacgcaaacccaaacgcgaacccaaaugcgaaccccaacgcaaacccgaacgcgaacccaaacgcaaacccaaacgcaaacccaaacguggacccgaacgcgaacccaaacgcaaaccccaacgccaacccaaacgcgaacccaaacgcaaacccaaacgccaacccgaacgccaacccaaacgcaaaccccaaugccaacccaaacgcgaacccaaacgcaaaccccaacgcaaaccccaacgccaacccgaacgcaaacccaaacgcaaaccccaacgcaaacccgaacgcaaacccaaacgcaaaccccaacaaaaacaaccaagggaacggacaaggacacaacaugcccaacgaccccaaccgcaacgucgacgaaaaugccaacgccaacaacgcagucaagaacaacaacaacgaagaacccucagacaaacacaucaccgaauaccuaaaaagaauccagaacucacucucaaccgaauggucgcccugcagcguaaccugcggcaacggcauacaaguccgcauaaaaccuggcucggcaggcaaaagcaaaaacgaacuagacuacgaaaacgacauagaaaagaaaaucugcaaaauggaaaaaugcucaucggucuucaacguugucaacuccucaauaggccucauaaugguacucuccuuccuauucuugaacuaa

SEQ ID NO: 5928 - RNA, 1158 nt, Artificial Sequence
  derived and/or modified CDS sequence (opt11) from Pf(Yaounde)__AAN87580.1__CSP
augaugagaaaacucgccauacucagcgugucaucauuccucuucgucgaagcacuuuuccaagaauaccaaugcuacggcucuagcucaaacacacgaguacucaacgaacuuaacuacgacaacgccggaacaaaucucuacaacgaacucgaaaugaacuacuacggaaaacaagaaaacugguacucucuaaaaaaaaacucccgaucacucggcgaaaacgaugacggcaacaacgaagacaacgaaaaacuacgcaaacccaaacacaaaaaacuaaaacaacccgcagacggaaaccccgaccccaacgcaaacccaaacgucgacccaaacgccaacccaaacgucgacccgaacgcaaacccgaacgucgacccaaacgccaaccccaacgccaaccccaacgccaacccgaacgcaaacccaaacgcaaaccccaacgccaaccccaacgcgaacccaaacgccaacccaaacgccaaccccaacgccaaccccaaugcaaaccccaacgccaacccaaacgcaaaccccaacgucgacccaaacgccaacccaaacgcaaaccccaacgccaacccaaacgccaaccccaacgccaaccccaacgccaacccaaacgcaaaccccaacgccaaccccaacgccaaccccaacgcaaaccccaacgcaaaccccaacgccaacccaaacgccaacccgaacgccaaccccaacgccaaucccaacgccaaccccaacgccaaccccaacgccaaccccaacgcaaaccccaacaaaaacaaccaagguaacggacaaggacacaacaugccgaacgacccaaaccgaaacguagacgaaaacgccaaagccaacaacgcaguaaaaaacaacaacaaugaagaacccuccgacaaacacaucgaacaauaccuaaaaacaauccaaaacucacuaucaaccgaauggucccccugcuccgucacaugcggaaacgguauacaaguccgcaucaaacccggcuccgccaacaaacccaaagaccaacuagacuacgaaaacgacauagaaaaaaaaauaugcaaaauggaaaaaugcuccuccgucuucaacgucgucaacuccuccaucggacuuaucaugguccucuccuuccuauuccuaaacuaa

SEQ ID NO: 5929 - RNA, 1143 nt, Artificial Sequence
  derived and/or modified CDS sequence (opt11) from Pf(Asembo Bay)__AAN87610.1__CSP
augaugcgcaaacuggcaauccucucggucuccuccuuccucuucgucgaagcacucuuccaagaauaccaauguuacggauccucauccaacacccgcguccucaacgaacucaacuacgacaacgcuggaaccaaccucuacaacgaacuagaaaugaacuacuacggaaaacaagaaaacugguacucccuaaaaaaaaacucccgcucccucggcgaaaacgacgacggcaacaacaacaacggagacaacggccgagaaggcaaagacgaagacaaacgcgacgggaacaacgaagacaacgaaaaacuccgcaaacccaaacacaaaaaacuaaaacaaccaggcgacggcaaccccgaucccaacgccaacccaaacgucgacccaaaugccaaccccaacgucgaccccaacgccaaccccaacguagaccccaacgcaaacccaaacgcaaaccccaacgcaaaccccaacgcaaacccaaacgccaaccccaacgccaaucccaacgcaaacccaaacgcgaacccaaacgccaacccaaacgcaaaccccaacgcaaaccccaacgcaaacccgaacgcaaaccccaacgccaaccccaacgccaacccaaacgccaacccgaacgcuaaccccaacgccaaccccaacgccaaccccaacgcaaaccccaacgccaacccaaacgccaaucccaacgccaacccaaacgccaacccaaaugcaaaccccaacgccaaucccaacgcgaacccaaacaaaaacaaccaaggaaacggccaaggccacaacaugccaaacgaccccaaccgcaacguugacgaaaaugccaacgccaacaacgcagucaaaaacaacaacaacgaagaaccauccgacaaacacaucgaacaauaccucaacaaaaucaaaaauuccaucuccaccgaauggucccccugcuccguaaccugcggaaacggcauacaaguacgcauaaaacccggaucagccaacaaacccaaagaccaacuagacuacgccaacgacaucgaaaaaaaaaucugcaaaauggaaaaaugcagcucagucuucaacguagucaacagcuccaucggacucaucaugguccucucauuccuguuccugaacuaa

SEQ ID NO: 5930 - RNA, 1143 nt, Artificial Sequence
  derived and/or modified CDS sequence (opt11) from Pf(India)__AAN87619.1__CSP
augaugcgaaaacucgccauacucucagucuccagcuuccuauucgucgaagcacucuuccaagaauaccaaugcuacggaagcuccuccaacacacgcguccugaacgaacucaacuaugacaacgcaggcaccaaccuguacaacgaacucgaaaugaacuacuacgggaaacaggaaaacugguacucacucaagaaaaacucccgcucccucggcgaaaacgacgacggaaacaacaacaacggagacaacggaagggaaggcaaagacgaagacaaacgagacggcaauaacgaagacaacgagaaacuccgaaaacccaaacacaaaaaacuaaaacaacccggaggagacaaccccgaccccaacgcaaacccaaacgccaaccccaacgccaaccccaacgccaaccccaacgccaaccccaacgcaaaccccaacgucgacccaaacgccaaccccaacgccaacccaaacgccaacccaaacgcuaaucccaacgcgaaccccaacgcaaaccccaacgcaaacccaaacgcaaacccaaacgcaaaccccaacgccaacccgaacgcaaaccccaacgcaaauccaaacgcaaaccccaaugcaaaccccaacgcaaaccccaacgccaacccaaacgcaaaccccaacgccaaccccaacgccaaccccaacgcaaaccccaacgccaaccccaacgcaaaccccaacgcaaacccaaacgcgaacccaaacgcaaacccaaacgccaaccccaacaaaaacaaccaagguaacggccaaggacacaacaugcccaacgacccaaaccgcaacguagacgaaaacgcaaacgccaacaacgcagucaaaaacaacaacaacgaagagcccuccgacaaacacaucgaacaauaccuaaaaaaaauccaaaacucccucuccacagaguggucgcccugcuccgucaccugcggaaacggcauccaaguccgaauaaaaccaggaucagcuaacaaacccaaagacgaauuagacuacgaaaacgacauagaaaagaaaauaugcaagauggaaaaaugcucaucggucuucaacgucguaaacagcuccaucggccucaucaugguacuauccuuccucuuccuaaacuaa

SEQ ID NO: 5931 - RNA, 1107 nt, Artificial Sequence
  derived and/or modified CDS sequence (opt11) from Pf(India)__AAN87617.1__CSP
augaugcgcaaacucgccauccucagcguauccuccuuccucuucgucgaagcccuguuccaagaauaccaaugcuacggauccagcuccaacacccgcguacucaacgaacuaaacuacgacaacgccggcaccaaccuguacaacgaacuagaaaugaacuacuacggcaaacaagaaaacugguacucccucaaaaaaaacucccgcucccucggagaaaacgacgacggcaacaacaacaacggagacaacggaagagaaggcaaagacgaagacaaacgcgacggcaacaacgaagacaacgaaaaacucagaaaacccaaacauaaaaaacucaaacaacccggcggcgacaacccggaccccaacgccaacccaaacgucgaccccaacgccaacccgaacgcaaacccgaacgccaaccccaacgcaaaccccaacgccaacccaaacgccaaccccaacgcaaacccaaacgccaaccccaacgcaaaucccaacgcaaacccaaacgcaaaccccaacgcaaacccaaacgccaaccccaacgccaauccaaacgcaaaccccaacgccaaccccaacgcgaacccaaacgccaaccccaacgccaacccaaacgcaaaccccaacgccaacccaaacgcaaaccccaacgcgaaccccaacgcaaaccccaacgcaaaccccaacgccaaccccaacgccaacccaaacgccaacccaaacaaaaacaaccaaggaaacggacaaggccacaacaugcccaacgacccaaaccgcaacguagacgagaacgccaacgccaacaacgccguaaaaaacaacaacaacgaagaacccucagacaagcacauagaacaauaccucaaaaaaauccaaaacucccucuccacagaauggucgcccugcuccguaacaugcggaaacggcauacaaguacgaauaaaacccggcucagcuaacaaacccaaagacgaacuagacuacgaaaacgacauugaaaaaaaaauaugcaaaauggaaaaaugcuccucagucuucaacgucgucaacuccuccaucggccucaucaugguccucagcuuccuauuccucaacuag

SEQ ID NO: 5932 - RNA, 1095 nt, Artificial Sequence
  derived and/or modified CDS sequence (opt11) from Pf(India)__AAN87616.1__CSP
augaugcgcaaacucgccauccucuccgucuccucauuccuauucgucgaagcccucuuccaagaauaccaaugcuacggcuccuccucaaacaccagaguccucaacgaacucaacuacgacaacgccgguacaaaccucuacaacgaacucgaaaugaacuauuacggcaaacaagaaaacugguacucccuuaaaaaaaacucccgcucacucggcgaaaacgacgacggcaacaacaacaacggugacaacggacgagaaggcaaagacgaagacaaaagagacggcaacaacgaagacaacgaaaaacuccgcaaacccaaacacaaaaaacuaaaacagcccggcggagacaacccagacccgaacgcaaacccuaacguagacccaaaugccaaccccaacgccaaccccaacgccaaccccaacgccaaccccaacgccaaccccaacgcaaaccccaacgccaaccccaacgcaaaccccaacgcuaaccccaacgccaaccccaacgccaacccaaacgccaacccaaacgccaacccaaacgccaaccccaacgccaaccccaacgccaacccuaacgcaaaccccaacgccaacccaaacgcaaaccccaacgcaaacccaaacgccaacccaaacgccaaccccaacgcaaaccccaacgcaaacccaaacgccaaccccaacgcaaaccccaacgcaaaccccaacaaaaacaaccaaggcaacggccagggacacaacaugcccaacgaccccaaccguaacgucgacgaaaacgccaacgccaacaacgccguuaaaaacaacaacaacgaagaacccagcgacaaacacauagaacaauaccucaaaaaaauccaaaacucccucucaaccgaauggagccccugcuccgucaccugcggaaacggcauacaaguacgaaucaagcccggcuccgcaaacaaaccaaaagacgaacuagacuacgaaaacgacaucgaaaaaaaaaucugcaaaauggaaaaaugcuccucaguauucaacgucguaaacucauccaucggccucaucaugguacucuccuuccuauuccuaaacuaa

SEQ ID NO: 5933 - RNA, 1092 nt, Artificial Sequence
  derived and/or modified CDS sequence (opt11) from Pf(Bolivar)__AAN87600.1__CSP
augaugcgcaaacucgccauccuauccguaagcucauuccucuucgucgaagcgcuuuuccaagaauaccagugcuacggcucgagcuccaacacccgcguccucaacgaacuaaacuacgacaacgccgguaccaaccuauacaacgaacucgaaaugaacuacuacggcaaacaagaaaacugguacucacucaagaaaaacucccgaucccuaggcgaaaacgacgacggaaacaacaacaacggcgacaacggacgagaaggcaaagacgaagacaaacgcgacggaaacaacgaagacaacgaaaaacuccguaaacccaaacacaaaaagcucaaacaaccagccgacggcaacccagaccccaacgccaaccccaacgucgaccccaacgccaacccaaaccccaacgccaacccacccaacgccaaccccaacgcaaaccccaacgcaaaccccaacgcaaaccccaacguagacccuaacgccaaccccaacgccaaccccaacgccaacccaaacgccaacccaaacgcaaaccccaacgcaaaccccaacgccaaccccaacgcaaacccaaacgccaacccaaacgccaaccccaaugcaaaccccaacgcuaaccccaacgcgaaccccaacgccaacccaaacgccaacccaaacgcaaaccccaacgccaaccccaacgcaaacccgaacgcaaacccaaacaagaacaaccaaggcaacggccaagggcacaacaugccuaacgaccccaaccgaaacgucgacgaaaacgcaaacgccaacaacgcagucaaaaacaacaacaacgaagaaccaucagacaaacacaucgaacaauaccuaaacaaaauacaaaauucccucucaacagaauggucccccugcagcguaacaugcggaaacggcauccaaguccgaauaaaacccggaucugccaacaaacccaaagaccaacucgacuacgccaacgacaucgaaaagaaaaucugcaaaauggaaaaaugcuccucggucuucaacguagucaacagcuccaucggccucaucaugguccuuucauuucuauuucucaacuaa

SEQ ID NO: 5934 - RNA, 1083 nt, Artificial Sequence
  derived and/or modified CDS sequence (opt11) from Pf(Asembo Bay)__AAN87597.1__CSP
augaugcgcaaacuagcaauccucagcgucuccucuuuccuauucgucgaagcacuauuccaagaauaccaaugcuacggcucaucaaguaacaccagaguccuaaacgaacuuaacuacgacaacgccggcaccaaccucuacaacgaacucgaaaugaacuacuacggcaaacaagaaaacugguacucccucaaaaaaaacucacgaucccucggcgaaaaugacgacggaaacaacaacaacggcgacaacggaagagaagguaaagacgaagacaaacgagacgggaacaacgaagacaacgaaaaacuccgcaaacccaagcacaaaaaacucaaacaacccgccgacggcaacccagaccccaacgcaaaccccaacgucgacccaaacgcaaaccccaacgcaaaccccaacgccaacccgaacgcaaaccccaacgccaacccaaacgccaacccaaacguagaccccaaugcaaaucccaacgccaacccaaacgccaacccaaacgccaacccaaacgccaaccccaacgcaaacccaaacgcaaaccccaacgccaaccccaacgccaaccccaacgccaaccccaacgccaacccaaacgcuaaccccaacgccaacccaaacgccaaccccaacgcaaaccccaacgccaacccaaacgcaaaccccaacgccaaccccaacgccaacccaaacaaaaacaaccaaggcaacggccaaggccacaacaugccaaacgaccccaaccgcaacguagacgaaaacgcaaacgccaacaacgccgucaaaaacaacaacaacgaagaacccuccgacaaacacaucaaagaauaccuaaaaaucaucccuaacucccucuccaccgaauggucacccugcuccguaacaugcggcaacggcauccaaguacgaauaaaaccaggcuccgccggcaaacccaaagacgagcucgacuacgccaaugacaucgaaaagaaaaucugcaaaauggaaaaaugcuccucgguauucaacgucgucaacagcuccaucggacucaucaugguccucagcuuccucuuccuaaacuaa

SEQ ID NO: 5935 - RNA, 1083 nt, Artificial Sequence
  derived and/or modified CDS sequence (opt11) from Pf(Asembo Bay)__AAN87596.1__CSP
augaugcgaaaacucgcaauacucuccguauccagcuuccucuucgucgaggcccuauuccaagaauaccagugcuacggcagcuccagcaacacccgcguccucaacgaacuaaacuacgacaacgccggaacaaaccuuuacaacgaacucgaaaugaacuacuacggcaaacaagaaaacugguacucccuaaaaaagaacucccgcucacucggcgaaaacgacgacggcaacaacaacaacggcgacaacggccgcgaaggaaaagacgaagacaaacgcgacggcaacaacgaagacaacgaaaaacuacgcaaacccaaacacaaaaaacucaaacaacccgccgacggcaaccccgaccccaacgcaaaccccaacgucgaccccaacgccaaccccaaugccaaccccaacgcaaacccuaacgccaaccccaacgcaaaccccaacgcaaacccaaacgucgaccccaacgccaaccccaacgccaacccaaacgccaaccccaacgcaaacccaaacgccaaccccaacgccaaccccaacgccaacccaaacgccaaccccaacgcaaacccaaacgccaacccaaacgccaaccccaacgccaaccccaacgccaaccccaacgcaaacccgaacgcaaacccaaacgccaaccccaacgcgaaccccaacgccaaccccaacgcaaacccuaacaaaaacaaccaaggaaacggacaaggacacaacaugcccaacgaccccaaccgcaauguagacgaaaacgccaacgcaaacaacgcagucaaaaacaauaacaacgaagaacccucagacaaacacaucaaagaauaccugaaaauaauccaaaacagccucuccaccgaauggucccccugcuccgucaccugcggcaacggaauccaaguccgcaucaaaccaggauccgccgguaaaccaaaagacgaacucgacuacgccaacgacauagaaaaaaaaauaugcaaaauggaaaagugcucaucagucuucaacgucgucaacagcucaaucggccuaaucaugguccuauccuuccucuuccuaaacuaa

SEQ ID NO: 5936 - RNA, 1071 nt, Artificial Sequence
  derived and/or modified CDS sequence (opt11) from Pf(India)__AAN87615.1__CSP
augaugcgcaaacuagccauccucucgguauccuccuuccuauucgucgaagcccuauuccaagaauaccaaugcuacggauccuccuccaacacacgcguccucaacgaacucaacuacgacaacgccggcacaaaccucuacaacgaacucgaaaugaacuacuacggaaaacaggaaaacugguacucccugaaaaaaaacucgcgcucccuuggagaaaacgacgacggcaauaacaacaacggagacaacggacgggaaggcaaagaugaagacaaacgcgacggcaauaacgaagacaacgagaaacuccgcaaacccaaacacaaaaaacucaaacaacccggagacggcaacccagacccaaacgcaaacccaaacgucgaccccaacgcaaaccccaacgccaacccaaacgccaaccccaacgcuaacccaaacgccaaccccaacgcaaacccgaacgccaaccccaacgccaacccaaacgccaaccccaacgccaaccccaacgcaaaccccaacgccaacccuaacgucaaccccaacgccaaccccaacgccaaccccaacgccaaccccaacgccaaccccaacgcaaaccccaacgccaaccccaacgccaaccccaacgccaaccccaacgccaaccccaacgcaaaccccaacgcaaaccccaaugccaaccccaacaagaacaaccaaggaaacggacaaggccacaacaugcccaacgacccaaaccgcaacgucgacgaaaacgccaauguaaacaacgccgucaaaaacaacaacaacgaagaacccagcgacaaacacaucgaacaauaccucaaaaaaauccaaaacucccucuccaccgaauggucccccugcagcgucaccugcggaaacggcauacaaguccgcaucaaacccggauccgcaaacaaacccaaagacgaacuagacuacgaaaacgacaucgaaaaaaaaaucugcaaaauggaaaaaugcucaucaguauucaacgucgucaacagcuccaucggucucauaaugguacuaucauuccucuuccucaacuag

SEQ ID NO: 5937 - RNA, 1110 nt, Artificial Sequence
  derived and/or modified CDS sequence (opt11) from Pk(UMMAC6)__AHF20622.1__CSP
augaagaacuucauacugcuggcggugagcucaauauuguugguggaccugcuaccaacacacuucgagcauaauguggaucugagucgggcaauaaacgugaauggagugaguuucaacaacguagacacaagcaguuuaggggcggcacaggugaggcagagugcgaguagaggaagggggcuaggagagaagccgaaggagggggcggauaaggagaagaagaaggagaaggagaaggagaaagaagaggaaccgaagaagccgaacgaaaacaagcuaauacagccggagcaaccggcggcgggagcgggaggggagcaaccggcggcaggggcaggaggggagcagccagcggcaggggcagggggagagcagccagcagcaggagcgggaggggagcagccagcggcgggggcagggggagaacagccggcggcgggagcgagaggggagcagccagcggcgggggcgggaggggagcagccggcggcaggggcaggaggggagcaaccagcggcaggggcaggaggagagcaaccggcagcgggggcaggaggggaacagccggcggcgggggcgggaggggagcaaccagcggcgggggcgcgaggggagcaaccggcagcaggggcagggggagagcagccagcggcgggggcgggaggggagcagccggcgccggcgccgaggagggaacaaccagcagcgggagcagggggagagcagccggcgccggcgccaagaagagaacagccggcaccgggagcgggggcgggggacggggcgaggggagggaaugcgggggcggggaaggggcaggggcaaaacaaccagggggcgaacguaccgaacgagaagguagugaacgauuacuugcauaaaauaaggagcagcgugacaacggaguggacgccgugcagcguaacaugugggaacggggugaggauaaggaggaaggggcacgcagggaauaagaaggcggaggaccuaacgauggacgaucuggagguggaggcguguguaauggacaagugcgcggggauauuuaacguaguaaguaacagucugggauuagugauacugcugguguuggcgcuguucaacuga

SEQ ID NO: 5938 - RNA, 1092 nt, Artificial Sequence
  derived and/or modified CDS sequence (opt11) from Pk(H (SL1_PK))__XP_002259002.1__CSP
augaaaaacuucauacuccuagccguaagcucgauccugcucguagaccuacucccaacacacuucgaacacaacguagaccucucacgcgcgauaaacguaaacggaguaagcuuuaacaacgucgacaccuccagccugggcgcagcccaagucaggcaaucugccucacgcggacgaggacuaggagaaaaacccaaagaaggggcagacaaagaaaaaaaaaaagaaaaaggaaaagaaaaagaagaagaacccaaaaaaccaaacgaaaacaaacugaaacaaccaaacgagggacaaccacaggcccaaggcgacggcgcaaacgcaggccaaccccaagcacaaggcgacggagcgaacgcaggacaaccccaggcacagggcgacggcgcgaacgcaggacaaccccaggcacaaggagacggcgcaaacgcgggccaaccacaagcccaaggagacggcgcgaacgcgggccaaccccaagcacaaggagacggcgcaaacgcaggccaaccccaagcacagggagauggagcaaacgcgggacagccccaggcacaaggagacggcgcgaacgcaggacaaccacaagcacaaggcgauggcgcaaacgcgggacaaccccaagcacaaggcgacggcgcgaacgcaggacaaccccaagcccaaggagacagagcgaacgcaggccaaccccaagcccaaggagacggcgcgaacguaccccgacaaggacgaaacggaggaggcgcaccagcaggaggaaacgaaggcaacaaacaagccggaaaaggacaaggacaaaacaaccaaggcgcaaacgcgcccaacgaaaaagucguaaacgacuaccugcacaaaaucagaagcucagucacgaccgaauggacacccugcagcguaaccugcggcaacggaguacgcauacggagaaaagcacaugcgggcaacaaaaaagcagaagaccuaacaauggacgaccuggaggucgaggcaugcguaauggacaaaugcgccggcauauucaacguagugagcaacaguuuaggccuagugauacuacuaguccuggcccuauucaacuaa

SEQ ID NO: 5939 - RNA, 1443 nt, Artificial Sequence
  derived and/or modified CDS sequence (opt11) from Pk(SGEHIH2-im-Y09-12)__AFD97213.1__CSP
augaaaaauuuuauacuacuagcggugagcagcauacugcugguagaccuacugccaacacacuuugaacacaacguagacuuaaguagagcgauaaacguaaacggggugagcuucaacaacguagacacaucaucacugggggcggcacaaguacggcagagugcaagcagagggagaggacugggagaaaaaccaaaagagggagacgacaaagaaaagaagaaagaaaaagaaaaggaggaagaaccgaagaaacugaacgaaaauaacccaaagaaaccaaacgaggagggcgacggagcaaaacugaaacaaccgaacgaagagggggacggagcaaaacuaaagcagccaaacgcggaagguggagcgaaacuaaagcagccaaacgcagagggaggggcgaacgcaggccaaccaaacgcagaagggggagcaaacgcaggacaaccgaacgcagaagggggagcaaacgcaggacagccaaacgcgggcggggcgaacgcggggcaaccgaaugcggaagggggagcgaacgcaggacaaccaaacgcggaagggggcgcgaacgcaggacagccaaacgcggagggaggggcaaacgcaaggcaaccaaacgcagagggaggggcaaacgcaaggcaaccaaacgcagaagggggagcaaacgcaggacaaccgaacgcagaaggaggggcgaacgcgggacaaccgaacgcagagggaggggcgaacgcgggacagccgaacgcagaaggaggagcgaacgcaagacaaccaaacgcagagggaggagcaaacgcagggcagccaaacgcggaaggaggagcaaacgcaggacaaccgaaugcagagggaggggcaaaugcaggacaaccgaacgcagaaggaggagcaaaugccggacagccgaacgcggaaggaggggcaaacgcaaggcagccgaacgcggagggaggggcaaacgcagggcagccaaacgcagagggaggggcaaacgcagggcaaccgaacgcagaagggggagcgaacgcgaggcagccccaggcagaaggagggggagcaaacgcgagacagccgcaagcagaaggcggaggggcaaacgcgagacaaggagggaacgaagggaacaagcaagcagggaaaggacaaggacaaaacaaccagggagcaaacgcgccaaacgagaaagugguaaacgacuaccugcagaaaauaaggagcagcguaacaauagaauggacacccugcucagugacgugcggaaacgggguaagaauacgaagacgagcgcacgcggacaaaaagaaagcagaagaucuaacaauggacgaucuagaaguggaagcguguguaauggacaaaugcgcaggaauauucaacguagugagcaacucgcuaggacugguaauacuacugguacuagcgcuguucaacuga

SEQ ID NO: 5940 - RNA, 1320 nt, Artificial Sequence
  derived and/or modified CDS sequence (opt11) from Pk(NB028)__AFG25469.1__CSP
augaaaaacuucauacuacuagcgguaaguagcauacuccuaguagaccuacuaccgacacacuucgagcacaauguagaccuaagcagagcgauaaacguaaacggagugagcuucaacaacguagacacaagcagccuaggagcagcgcaaguaagacaaagcgcaagccgaggaaggggacuaggagaaaaaccgaaagaaggcgacgacaaagagaaaaagaaagaaaaagaaaaagaagaagaaccuaaaaaucucaacgaaaacaaaccaaaacaaccgaacgcagaaggagacggagcaaaacuaaaacaaccaaacgccgagggagacggagcgaaauugaaacaaccacaagcagagggagacggcgcgaacgccagacagccccaagccgaaggaaacggcgcaaacgcacgacagccacaagcagagggagacggagcaaacgcaagacaaccacaggccgaaggagacggcgcaaacgcgagacaaccacaagcagaaggcgacggcgcaaacgcaagacaaccccaagcggaaggagacggagcgaacgcacgccaaccacaagcagagggagacggcgcaaacgcaaggcaaccacaggcagaaggagacggcgcgaacgcaagacaaccacaagccgaaggaggaggagcgaacgcaagacaaccacaggcagagggcgauggagcgaacgcaagacaaccccaagcagagggagacggcgcgaacgcaagacagccccaagcggaaggagacggagcgaacgcaagacaaccacaagcagaaggagacggagcgaaugcgagacaaccacaagcagaaggagacggagcaaacgcacgccaaccacaagccgaaggcggaggagcaaacgcacgacagccgcaagccgaaggagacggcgcgaacgcaagacaagcacaagcacagggcgacggagggaacgcaagacaaggaggaaacggaggcggagcaccagcaggaggcaaugaagggaacaaacaagcgggaaaaggccaaggacaaaacaaucaaggagcaaacgcaccaaacgaaaagguaguaaacgacuaccuccaaaagauaagaucaagcgugacaacggaauggaccccaugcaguguaacgugcgggaacggaguaaggaucagaagacgagcacacgccgauaaaaagaaggcagaagaacuaacaauggacgaccuagaaguagaagcaugcguaauggacaaaugcgcaggaaucuucaacguaguaucaaacucacuagggcuggugauauugcucgugcucgcccucuucaacuag

SEQ ID NO: 5941 - RNA, 1278 nt, Artificial Sequence
  derived and/or modified CDS sequence (opt11) from Pk(SGEHIH1-im-Y09-102)__AFD97209.1__CSP
augaaaaacuucauauuacuagcgguaagcucaauacugcuaguagaccuacugccgacgcacuuugaacacaacguagaccugagcagggcgauaaacgugaacggagugagcuucaacaacguggacacaagcagccugggggcggcacaagugaggcaaagugcaagcagggggaggggauuaggagaaaaaccaaaagaaggggaugacaaagagaaaaagaaagaaaaagaaaaagaagaagaaccaaagaaacugaacgaaaacaacccgaaaaagccaaacgaagaaggagacggagcaaaacugaaacaaccaaacgaagaaggcgacggagcaaaacugaaacaaccaaacgcagaaggaggagcgaagcuaaaacagccgaacgcagaagggggagcgaacgcaggacaaccgaacgcagaaggaggggcaaacgcagggcaaccgaacgcggaaggaggagcaaaugcaggacagccaaacgcaggaggggcaaacgcagggcaaccuaacgcagaagggggagcaaacgcggggcagccaaacgcggagggaggggcgaacgcaggacaaccaaacgcggaagggggagcaaacgcaagacaaccgaacgcagaagggggagcgaacgcgaggcaaccaaaugcagagggaggggcaaacgcagggcaaccgaacgcagaaggaggagcaaaugcagggcaaccaaacgcggaagggggagcaaacgcaggacagccgaacgcagaaggaggagcaaacgcaagacaaccaaacgcagaaggaggggcgaacgcggggcagccaaacgcagagggaggggcaaacgcaggacaaccaaacgcagagggaggagcgaacgcgagacagccccaagcagaaggaggaggggcgaacgcaagacagccacaagcagaagggggcggggcaaaugcgaggcaagggggaaacgaaggaaacaaacaggcgggaaagggacaaggacagaacaaccaaggagcaaacgcaccgaacgaaaaagugguaaacgauuaccugcagaaaauaaggagcagugugacgauagaguggacaccgugcagugugacaugcggaaacgggguaagaauaagaaggagagcgcacgcggacaaaaagaaagcagaggaccugacaauggacgaccuagagguagaagcaugcguaauggacagaugugcaggaauauucaacguagugagcaauagucugggacuggugauucugcuggugcuagcgcuauucaacuaa

SEQ ID NO: 5942 - RNA, 1278 nt, Artificial Sequence
  derived and/or modified CDS sequence (opt11) from Pk(SGEHIH1-im-Y09-17)__AFD97205.1__CSP
augaggaacuucauacuacuagcggugagcagcauacugcuaguagaccugcugccaacacacuucgaacacaacguagaucuaagccgggcaauaaacguaaacggcgugagcuucaacaacguagacacaucgagccuaggagcagcacagguaaggcaaagcgcgagcagaggaagaggacugggggaaaaaccaaaggaaggagacgauaaggagaaaaagaaagaaaaagaaaaagaagaagaaccaaagaaacugaacgaaaacaacccaaagaaaccgaacgaagaaggggacggagcaaaacuaaaacagccgaacgaagaaggggacggagcgaaacugaaacagccaaacgcggaaggaggggcgaaauuaaaacaaccaaacgcagaaggaggagcaaacgcgggccaaccaaacgcagaaggaggggcaaacgcggggcaaccaaacgcagaaggaggggcaaacgcagggcaaccaaacgcaggaggagcgaacgcaggacaaccaaacgcggaaggaggagcaaacgcgggacaaccgaacgcagagggaggagcaaacgcgggacagccgaacgcggaaggaggagcaaacgcgagacagccgaacgcggaaggaggagcaaacgcaagacaaccaaacgcggaaggaggagcaaaugcgggccaaccaaacgcagagggaggagcgaacgcaggacaaccgaacgcagaaggaggggcaaacgcagggcagccgaacgcagaaggcggagcaaacgcgagacagccgaacgcggaaggaggagcaaaugcagggcaaccgaacgcggaaggaggggcaaacgcagggcaaccaaacgcagaaggaggggcgaacgcaagacagccgcaggcagaaggaggaggcgcaaacgcaagacagccacaagcagaaggaggaggagcaaacgcaagacaagggggaaacgagggaaauaaacaagcagggaaaggacaaggacagaacaaccaaggagcaaacgccccaaacgaaaagguaguaaacgacuaccuacagaaaauaagaagcagcguaacaauagaauggacaccaugcagcguaacgugcggaaacggagugaggauacggaggagggcccacgcggacaaaaagaaagcagaagaccuaacaauggacgaccuagaaguagaagcgugcgugauggacaaaugcgcaggaauauucaacgucguaagcaacagcuugggauuaguaauauugcuagugcuagcccuauucaacuga

SEQ ID NO: 5943 - RNA, 1278 nt, Artificial Sequence
  derived and/or modified CDS sequence (opt11) from Pk(SGEHIH1-im-Y09-25)__AFD97206.1__CSP
augaaaaacuucauucuacuggcagugagcagcauacugcuaguagaccuacugccgacacacuucgaacacaacguagaccugagcagagcgaucaacgugaacggagucagcuucaacaacguagacacaagcagccuaggggcagcgcaaguccggcagucagcaagucgaggaagaggacuaggggaaaaaccaaaagagggagacgauaaagagaagaagaaagagaaagagaaagaggaagaaccaaagaaauuaaacgaaaacaacccaaagaaaccuaaugaagaaggagacggagcaaaacugaaacaacccaacgaggaaggagacggggccaaacuaaaacaaccgaacgcagaagggggagcaaaacuaaaacaaccgaacgcagaaggaggagcgaacgcaggacaaccaaacgcagaaggaggggcaaacgcagggcaaccaaaugcagagggaggggcaaacgcaggacaaccgaacgcgggaggagcgaacgcagggcaaccgaacgcggagggaggagcgaacgcagggcagccaaacgcagagggaggagcaaacgcggggcagccaaacgcggaagggggagcaaaugcaaggcaaccaaaugcggaaggaggggcgaacgcgagacaaccaaacgcggaaggaggagcaaacgcgggacagccaaacgccgaaggaggggcaaacgcggggcaaccaaacgcagagggaggagcaaacgcggggcaaccgaacgcggaaggaggggcgaacgcgagacaaccaaacgcagagggaggggcgaacgcagggcaaccgaacgcagaaggaggggcaaaugcagggcaaccaaacgcggaagggggagcaaacgcgaggcagccacaggcagaaggaggaggagcaaacgcgaggcaaccacaagcggaagggggaggagcaaacgcaagacagggagggaaugaaggaaacaaacaagcggggaaaggacaaggacaaaacaaccagggggcgaacgcgccgaaugaaaaaguaguaaacgacuaccugcagaaaauaagaagcagcgugaccauagaauggacaccaugcagcguaacgugcggaaacggagugaggaucaggaggagagcgcaugcggacaagaagaaagcggaggaccuaacaauggacgaccuggaaguagaagccugcgugauggacaaaugcgcaggaauauucaacgucguaagcaacagccuaggacugguaauauuacuggugcuagcgcuguucaacuga

SEQ ID NO: 5944 - RNA, 1278 nt, Artificial Sequence
  derived and/or modified CDS sequence (opt11) from Pk(SGEHIH2-im-Y09-11)__AFD97212.1__CSP
augaaaaacuucauacugcuagcagugagcagcauacugcuaguagaccuguuaccaacacacuucgaacacaacguggaucuaaguagagccauaaacguaaacggagugagcuuuaacaacguagauacaagcagccuaggagcagcccagguaagacaaagcgcaagcagaggaagaggacugggggaaaagccaaaggagggagacgacaaagagaaaaagaaagaaaaggagaaggaagaagaaccaaagaaacuaaacgaaaacaacccgaagaaaccaaacgaagaaggagacggagcaaaacucaaacaaccaaacgaggaaggggacggagcgaaacuaaaacaaccaaacgcugaaggaggggcaaagcugaaacaaccaaacgcagaaggaggagcaaacgcaggacaaccaaacgcagaaggaggggcgaacgcagggcaaccaaacgcggaagggggagcaaacgcgggacaaccaaacgccgggggagcaaacgcagggcagccaaacgcagaaggaggagcaaacgcggggcaaccaaacgcggaaggcggggcgaacgcaggacagcccaacgcagaagggggagcaaaugcgagacaaccgaacgcagagggaggagcaaaugcgagacaaccaaacgcggaaggaggagcaaacgcaggacaaccaaacgcggaaggaggggcaaacgcagggcaaccaaacgcagaaggaggggcgaacgcagggcaacccaacgcagaagggggagccaacgcgagacagccaaacgcagaaggaggggcaaacgcagggcagcccaacgcagaaggaggagcaaacgcggggcaaccaaacgcggaagggggagcaaacgcaagacagccgcaagccgaaggaggaggagcgaacgcaaggcaaccgcaagcagaaggaggaggagcgaacgcaagacaaggagggaacgaaggaaacaagcaagcgggcaagggacaaggacaaaauaaucaaggagcaaacgcaccaaacgaaaaaguaguaaacgacuaccugcaaaagauaagaagcaguguaacaauagaguggacgccaugcagcgugacguguggaaacggagugagaauaagaaggagagcacacgcagacaagaaaagagccgaagaccugacaauggacgaccuagaaguagaagcgugcguaauggacaaaugcgcggggauauucaacguaguaaguaacagucucgggcuaguaauccuccuagugcuagcacuauucaacuaa

SEQ ID NO: 5945 - RNA, 1278 nt, Artificial Sequence
  derived and/or modified CDS sequence (opt11) from Pk(SGEHIH2-im-Y09-18)__AFD97214.1__CSP
augaaaaauuucauacugcuagcaguaagcagcauauugcucguggacuuacuaccgacgcauuucgagcacaacguggaccugacaagagcaauaaacgugaacggagucagcuucaacaacguagacaccagcaguuugggagcagcccagguaaggcaaagcgcaagcagaggaagagggcugggagagaaaccaaaagaaggagacgacaaagagaaaaagaaagagaaagagaaagaggaggaaccgaagaaacugaacgagaacaacccaaagaaaccaaacgaagaaggggacggggcaaaacuaaaacaaccgaacgaggaaggagacggagcaaaacuaaaacaaccgaacgcagaaggaggggcgaagcugaaacagccaaaugcggaaggaggggcaaacgcgggacagccaaacgcggaagggggagcgaacgcgggacaaccgaacgcagaaggaggggcgaacgcagggcaaccaaacgcgggaggagcaaacgcggggcaaccaaaugcagaaggaggggcaaacgcgggacagccaaacgcggaaggaggagcaaaugcagggcaaccaaaugcagagggaggggcgaacgcaagacagccaaacgcggaagggggagcaaacgcaagacaaccaaacgcagagggaggcgcaaacgcggggcaaccaaacgcagagggaggggcaaacgcggggcagccgaacgcagaagggggagcaaacgcaggacaaccgaaugcggaaggaggagcaaacgcaagacaaccaaacgcagaagggggagcgaacgcagggcaaccaaacgcagagggaggggcgaacgcgggacagccaaacgcggaaggaggggcgaacgcaagacagccacaagcagaagggggaggggcgaacgcgagacagccgcaagccgaagggggaggagcaaacgcgaggcagggaggaaaugagggaaacaaacaagcgggaaaggggcaagggcaaaauaaucaaggggcgaacgcaccaaacgaaaaaguagugaacgacuacuugcaaaagauaagaagcagcgugacgauagaguggacaccgugcagcguaacaugcggaaacggaguacggauaaggaggagagcacacgcggacaagaaaaaggcagaagacuugacaauggacgaccuagaaguagaagcauguguaauggacaaaugcgcgggaaucuucaacgugguaaguaacagccuggggcuaguaauacuacugguacuagcguuauucaacuaa

SEQ ID NO: 5946 - RNA, 1278 nt, Artificial Sequence
  derived and/or modified CDS sequence (opt11) from Pk(SGEHIH2-im-Y09-3)__AFD97210.1__CSP
augaaaaacuucauacuacuagcaguaagcagcauacugcuaguagaccuauugccgacgcauuucgagcacaacguggaccuaagcagagcgauaaacguaaacggagugagcuucaacaacguagauacgagcagcuugggagcggcacaagugagacaaagcgcaagccgggggaggggacuaggggaaaagccaaaagagggggacgauaaagagaaaaagaaagagaaagagaaagaagaggaaccaaagaaauugaaugaaaacaacccaaagaaaccaaaugaggaaggagacggggcaaagcugaaacaaccgaacgaagaaggggacggggcaaaacuaaagcaaccgaacgcggaaggaggggcgaaauuaaaacaaccaaacgcggagggaggggcaaacgcagggcaaccgaaugcagaagggggagcaaacgccggacagccaaacgcagaagggggagcaaacgcaggacaaccgaacgcaggaggagccaacgcaggacaaccaaacgcagaaggaggagcgaacgccggacaaccaaacgcagagggaggcgcgaacgcaggacaaccgaacgcagagggaggggcaaacgcgcggcaacccaacgcggaaggaggggcaaacgcaaggcaaccgaacgcagggggaggggcaaacgcgggacagccaaaugcagagggaggggcaaacgcaggacaaccgaacgcggagggaggggcgaacgcagggcaacccaacgcagaaggaggagcaaacgcgaggcaaccaaacgcggaaggaggggcgaacgcggggcagccaaacgcggaaggaggggcgaaugcggggcaaccaaacgcggaagggggagcaaacgcaagacaaccacaagcagaaggaggaggggcgaacgcgagacaaccacaggcagagggaggaggagcaaacgcacgccagggaggaaacgaagggaacaaacaagcagggaaagggcaggggcaaaacaaccagggagcaaacgcaccgaacgaaaaggugguaaacgacuaccuacagaaaaucaggagcagugugacaauagaguggacaccgugcagcgugacaugcggaaacggaguacgaauaagaaggagggcgcaugcggacaagaaaaaggcggaagaccuaacaguggacgaccuagagguagaagcgugcgugauggacaagugcgcaggaauauucaauguagugagcaauagccuggggcugguaauacugcuagugcuagcguuguucaacuaa

SEQ ID NO: 5947 - RNA, 1278 nt, Artificial Sequence
  derived and/or modified CDS sequence (opt11) from Pk(SGEHIH2-im-Y09-7)__AFD97211.1__CSP
augagaaacuucauacugcuagcagugagcaguauacugcuaguagaccugcuaccgacacacuucgaacacaacguagaccuaucgagagcaauaaacguaaacggagugagcuucaacaacguggacacaucaagccugggagcagcgcaaguaagacaaucagcaagccggggaagagggcuaggagaaaagcccaaagaaggagacgacaaagagaaaaagaaagaaaaagaaaaagaagaagaaccgaaaaagcugaacgaaaacaacccaaagaaaccaaacgaagagggagacggggcgaaacuaaaacaaccaaacgaggaaggggacggagcaaaacuaaagcaaccgaacgcagaaggaggagcaaagcugaaacaaccgaacgcggagggaggagcaaacgcgggacaaccgaacgcggaaggaggagcgaacgcaggacaaccgaacgccgaaggaggggcaaacgcagggcaaccaaacgcaggaggggcgaacgcagggcaaccaaacgcagagggaggagcaaacgcggggcaaccaaacgcagaagggggagcgaaugcaggacaaccgaacgcagaaggaggagcaaacgcaagacaaccaaacgcggaagggggcgcaaacgcacgacagccaaacgcagaaggaggagcaaacgcagggcaaccgaacgcagaaggaggagcaaacgcagggcaaccaaacgcggaagggggagcaaacgcgggacaaccaaacgcagaaggaggagcaaacgccaggcaaccgaacgcggaaggaggcgcaaacgcaggacaaccaaacgcagagggaggagcaaacgcagggcaaccaaacgcagagggaggagcgaacgcgaggcagccacaagcagaaggagggggagcaaacgcgagacaaccacaggcagaaggaggaggagcgaacgcaagacaaggaggaaacgaaggaaacaaacaagcaggaaaagggcaagggcaaaacaaccagggagcaaacgcgccaaacgaaaaaguagugaacgacuaccugcagaaaauaaggagcagcgugacaauagaguggacaccaugcagcguaaccugcggaaacggaguaagaauaagaagacgagcgcacgcagacaaaaagaaagcagaagaccuaacaauggacgaccuagaaguggaggcaugcguaauggacaaaugcgcaggaaucuucaacgugguaagcaacacacuggggcuagucauacugcuaguacuagcacuauucaacuaa

SEQ ID NO: 5948 - RNA, 1278 nt, Artificial Sequence
  derived and/or modified CDS sequence (opt11) from Pk(UMNGC3)__AHF20628.1__CSP
augaaaaacuucauauuacuggcaguaagcagcauacuacugguagaccugcugccgacacacuucgagcacaacguggacuugaguagggcaauaaacgucaacggagugagcuucaacaacguggacaccucgagccugggagcagcacagguaaggcaaagcgcgagcagaggacggggacuaggagaaaaaccaaaagaaggagacgacaaagagaaaaagaaagagaaagaaaaagaggaggagccaaagaaacugaacgaaaacaacccgaagaaaccaaacgaggaaggagacggggcgaagcuggaacaaccgaacgaggaaggggacggagcaaagcuaaagcaaccaaacgaggaaggagacggggcaaaguuaaagcaaccaaacgcggaaggaggggcaaaacuaaaacagcccaaugcagaagggggagcaaacgcagggcaaccgaacgcagaagggggagcaaacgcaggacagccaaacgcagagggaggagcaaacgcggggcaaccaaacgcaggaggagcaaacgcaggacaaccgaacgcggaagggggagcaaacgcgggacaaccgaacgcggaaggaggagcgaacgcagggcaaccaaacgcggaaggaggagcaaacgcaggacaaccaaacgcggagggaggggcaaacgccagacaaccgaacgcggaagggggagcaaacgcggggcagccaaacgcggagggaggagcgaacgcaggacaaccgaacgcggaaggaggagcgaacgcaggacagccgaacgcagagggcggggcgaacgcaaggcaaccaaacgcggaagggggcgcgaacgcaggacaaccaaacgcagagggaggggcaaacgcagggcaaccaaacgcagaaggaggagcgaacgcaagacagccacaggcagagggagggggagcaaacgcgagacagggaggaaacgagggaaacaaacaggcgggaaaaggacaaggacaaaacaaccagggagcaaacgcgccaaacgagaagguagugaacgacuaccugcagaagauaaggagcagcgugacgauagaauggacgccgugcagugugacgugcgggaacggaguaagaauaagaaggagagcacacgcggacaagaaaaaggcggaggaccugacaaugggagaucuagagguagaagcaugcgugauggacaagugcgcagggguguucaacguagugagcaauagcuugggccugguaauacuacugguacuggcgcuauucaacuga

SEQ ID NO: 5949 - RNA, 1275 nt, Artificial Sequence
  derived and/or modified CDS sequence (opt11) from Pk(prk-1)__ADX31295.1__CSP
augaaaaacuucauacuauuagcaguaagcaguauacugcucguggaccugcugccgacgcacuucgaacacaacguagaccugagcagagcaauaaacgugaacggggugagcuucaauaacguagacacaagcagccuaggggcagcgcaaguaaggcaaagcgcaagcagaggaagggggcugggagaaaaaccaaaagagggggacgacaaggaaaagaagaaagaaaaagaaaaagaagaagaacccaaaaagcucaacgaaaacaacccaaagaaaccaaacgaagaaggagacggagcaaaacugaaacagccagacgaagaaggagacggagcaaaacugaaacaaccaaacgaagaaggggacggcgcgaaacugaaacaaccgaacgcagaaggaggagcaaaauugaagcagccaaacgcagaaggaggagcaaacgcaggacaacccaacgcagaaggaggggcgaacgccggacaaccaaacgcagaaggaggagcaaacgcagggcaaccaaacgcagggggagcgaacgcaggacaaccaaacgcggaagggggagcaaacgcaggacaaccaaacgcggagggaggagcgaacgcaggccaaccgaacgcggaaggaggagccaacgcaggacaaccaaacgcggagggaggggcgaacgcaagacagccgaacgcugagggaggggcaaacgcggggcaaccgaacgcagaaggaggggcgaacgcaggacaaccaaaugcagaagggggagccaacgcagggcaaccaaacgcggagggaggagcaaacgccagacaaccaaacgcagagguagaacaaacgcaggacaacagaaugcaaaaaguagaacaaaugcagacaacggaaugcaggucaggaacgaacgcacgacagccacaagcagaagggggcggggcaaacgcgaggcaagggggaaacgagggaaauaagcaggcagggaaggggcaaggacaaaacaaccaaggggcgaacgcgcccaacgaaaaagugguaaacgacuaucugcaaaagauaagaaguagcgugacaauagaauggacaccaugcagcgugacgugcggaaauggaguaagaauaaggagaagggcacacgcagacaaaaagaaagcagaagaccugacgauggacgaccucgaaguagaggcaugcguaauggacaaaugcgcaggaauauucaacgugguaagcaauagucuaggccugguaauacuccuagugcuagcacuauucaacuga

SEQ ID NO: 5950 - RNA, 1251 nt, Artificial Sequence
  derived and/or modified CDS sequence (opt11) from Pk(UM0018C10)__AHF20648.1__CSP
augaaaaacuucauauuacuagcaguaagcaguauacuacugguagaccuacuaccaacgcacuucgaacauaacguagaucuaagcagagcaauaaacgugaacggagugagcuucaacaacguagacacaaguagccuaggagcagcgcaaguaagacaaagcgcaagcagaggaagaggacuaggagaaaaaccaaaagaaggagacgacaaagaaaagaaaaaggaaaaggagaaagaagaggaaccgaagaagcuaaacgaaaacaaaccgaaacaaccaaacguagaaggggacggggcaaaacuaaaacaaccaaacgaagagggcgacggagcgaaacugaaacaaccgaacgaggaaggagacggggcaaaacuaaaacaaccaaacgcagaaggaggggcaaaacuaaagcaaccaaacgcagaagggggagcgaaugcgggacaaccgaaugcagaagggggagcgaacgcagggcaaccaaacgcagaaggaggagcgaacgcaggacaaccgaacgcagaagggggagcaaacgcaggacaaccgaacgcggagggaggagcaaacgcagggcaaccaaacgcggaagggggagcgaacgcaggacaaccgaacgcagaagggggagcaaacgcagggcaaccgaacgcggagggaggggcaaacgcgagacaaccaaacgcagagggaggagcaaacgcaagacaaccgaacgcagagggaggggcaaacgcaagacaaccaaacgcggagggaggagcgaacgcagggcagccaaacgcagagggaggagcaaacgcgggacaacccaacgcggagggaggagcgaacgcaagacaaccacaggcggaaggaggaggagcaaacgcacgacaaccgcaagcagagggagggggagcaaacgcaaggcagggagggaacgagggcaacaaacaggcaggaaaagggcaaggacaaaacaaccaaggagcaaacgcaccaaacgagaagguaguaaacgacuaccugcagaaaauaagaaguagcguaacaacagaauggacaccgugcagugugacaugcggaaacggcguacgaauacgcagacgagcacacgcagacaagaagaaagccgaagaucuaacaauggacgaccuggaaguggaagcaugcguaauggacaaaugcgcaggaauauucaacgucguaagcaacagccugggccuaguaauauuacugguacuggcacuauucaacuag

SEQ ID NO: 5951 - RNA, 1251 nt, Artificial Sequence
  derived and/or modified CDS sequence (opt11) from Pk(UM0018C6)__AHF20646.1__CSP
augaaaaacuucauacuacuagcggucucgaguauacuacugguagaccuacuacccacgcacuucgagcacaacguggaccugagcagagcaauaaacguaaauggagugagcuucaacaacguagacacgagcucacuaggggcagcacaaguaagacaaagcgcgagcaggggaagagggcugggagagaagccaaaagaaggggacgacaaagagaagaaaaaggaaaaggagaaagaagaggaaccgaagaaacucaacgaaaacaaaccgaaacaaccaaacguagagggagauggagcgaaacuaaaacagccaaacgaagagggggacggagcgaaauuaaaacagccaaacgaagagggagacggagcgaaacuaaaacaaccuaacgcagagggaggagcaaagcuagaacagccaaacgcagagggaggggcgaacgcggggcagccaaacgccgagggaggggcgaacgcagggcaaccaaacgcggaagggggagcgaacgcagggcagcccaaugcggagggaggggcaaacgcggggcaaccaaacgcagaagggggagcgaacgcggggcagccaaacgcagagggaggagcaaacgcaggacagccaaacgcagaaggaggagcgaacgcaggacagccaaacgcagagggaggggcaaacgcaagacaaccgaacgcagaaggaggagcgaacgcaagacagccaaaugcagagggaggagcaaaugcaaggcaaccgaacgcagaagggggagcgaacgcaggacagccaaaugcagaaggaggggcaaacgcaggacaaccaaacgcagaagggggagcaaacgcaagacagccacaagcagaagggggaggggcgaacgcacgacagccgcaggcggaagggggaggggcgaacgcaagacagggaggaaaugagggaaacaaacaagccgggaaaggacaggggcagaacaaccagggagcgaacgcgccaaacgagaaaguagugaacgacuaccugcaaaagauaaggagcagcguaacgacagaauggacgcccugcagcgugacaugcggaaacggggugagaauaaggaggagagcacacgcagacaagaagaaagcggaagaccuaacaauggacgaccuggagguagaggcgugugugauggacaaaugcgcagggauauucaacgucgugagcaacaguuugggauugguaauacugcugguauuggcacuguucaacuga

SEQ ID NO: 5952 - RNA, 1242 nt, Artificial Sequence
  derived and/or modified CDS sequence (opt11) from Pk(SGEHIH1-im-Y09-95)__AFD97208.1__CSP
augaaaaauuucauucuacuggcgguaagcagcauacugcuaguggaccuauuaccgacgcacuucgaacacaacguagaucuaaguagagcgauaaauguaaacggaguaagccuaaacaacguggacaccagcagccuaggagcggcgcaaguaaggcaaagcgcaucgagaggaagaggacuaggagaaaaaccaaaagaaggggacgacaaagagaaaaagaaagaaaaagaaaaagaggaggaacccaagaaacuaaacgaaaacaacccaaagaaaccaaacgaggaaggagacggagcaaaacuaaaacaaccaaacgcagaaggaggagcgaaacuaaaacaaccgaacgcggagggaggggcaaacgcaggacaaccaaacgcagaagggggagcgaacgcaggacaaccaaacgcagagggaggggcaaacgcagggcagccaaacgcaggaggagcaaacgcagggcagccgaacgcggaaggaggagcaaacgcaggacaaccgaacgcggaaggaggagcaaacguaggacaaccaaacgcagaaggaggcgcgaacgcacgacaaccgaacgcagaaggaggagcaaacgcgagacagccaaaugcggaaggaggagcgaacgcggggcagcccaacgcggagggaggggcaaacgcagggcagccgaacgcagaaggaggagcgaacgcgggacaaccgaacgcagaaggaggagcaaacgccagacaaccgaacgcggaagggggagcaaacgcgggacaaccaaacgcagaaggaggggcgaacgcagggcaaccaaacgcagaaggaggggcgaacgcaagacagccacaagcggaagggggaggagcaaacgcgagacagccacaggcagagggagggggagcaaacgcaaggcaaggagggaacgagggaaauaaaagggcagggaaaggacaagggcaaaacaaccaaggcgcaaacgcaccaaacgaaaaagugguaaacgacuaccuccagaaaauaaggagcagcguaacaaucgaauggacgccgugcaguguaacaugcggaaacggaguaagaauaagaaggagagcacacgcagacaaaaagaaagcagaagacuugacgauggacgaccuggagguagaagcgugcguaauggacaaaugcgcagggauauucaacguagugagcaauagccugggcuugguaauacuacugguguuggcacuguucaacuga

SEQ ID NO: 5953 - RNA, 1221 nt, Artificial Sequence
  derived and/or modified CDS sequence (opt11) from Pk(KH100)__ADN94497.1__CSP
augaaaaacuucauauugcuggcagugagcagcauacuauuaguggaccugcugccgacgcacuucgaacacaacguagaccuaagcagagcgauaaacgugaacggaguaucauucaacaacguggacacgagcagccuaggagcggcacaaguaagacagagcgcaagcagggggagagggcuaggggagaagccaaaagaaggggaugacaaagagaaaaagaaggaaaaagaaaaggaagaagaaccgaagaaucucaacgagaacaaaccaaaacagccaaaugccgagggagacggagcaaaaccaaaacagccaaacgcggaaggagacggggcaaaacuaaagcagcccaaugcagaaggagacggagcgaaauuaaagcagccaaacgcagaaggagauggaggaaacgcgaggcagccaaaugcagaaggagacgggggaaaugcgaggcaaccaaacgcagaaggagaugggggaaacgcgagacaaccaaacgcagaaggggacgggggaaaugcaaggcagccgaacgcggaaggagacgggggaaacgcgagacagccaaacgcggaaggggauggcggaaacgcaagacaaccaaaugcagaaggggacggagggaacgcgagacaacccaacgcagaaggagacggagggaacgcgaggcagccgaacgcggagggagaugggggaaacgcaaggcagccgaacgccgagggagacggagggaacgcaagacagccgaaugcagaaggcgacggagggaacgcaagacaaccaaaugcagaaggagacggagcaaacgcacggcaaccaaaugcggaaggagacggagcaaaugcgagacaaccgcaggcggaagggggaggagggaacgcgaggcaaggagggaacgaggggaacaaacaggcagggaaggggcaaggacaaaacaaccaaggagcaaacgcgccgaacgaaaaaguaguaaacgacuaccugcagaaaauaaggagcagcguaacgacagaguggacaccgugcagcgugacaugcgggaacggaguaagaauaagaaggagagcacacgcagacaaaaagaaggcggaggaccugacgauggacgaccuagaaguggaagcgugcguaauggacaaaugcgcggggauauucaacguagugagcaacagcuuaggacucguaauacuacugguacuagcauuauucaacuaa

SEQ ID NO: 5954 - RNA, 1221 nt, Artificial Sequence
  derived and/or modified CDS sequence (opt11) from Pk(KH294)__ADN94542.1__CSP
augaaaaacuucauacugcuagcaguaaguagcauacuccuaguggaccuauuaccaacgcacuucgaacacaacguggaccuaagcagagccauaaacgugaacggggugagcuucaauaacguagacacgagcucgcucggggcagcgcaaguaagacaaagcgcaagcaggggcagagggcuaggcgaaaaaccgaaagaaggcgacgacaaagaaaagaagaaagaaaaggaaaaagaagaagaaccgaaaaaccuaaacgaaaacaagccaaaacagccaaacgccgaaggggacggagcaaaaccaaaacaaccgaacgcagagggcgacggagcgaaacuaaaacagcccaacgcagagggagacggagcaaaauuaaaacagcccaacgccgagggagacgggggaaacgcgcgacaaccaaacgcagaaggggacggagggaacgcaaggcagccaaacgccgaaggagacggagggaacgcaagacaacccaaugcagaaggagacggaggaaacgcaagacaaccaaaugcagaaggcgacggaggaaacgcaagacaaccaaacgcagagggcgacggaggaaacgcgagacagccaaacgccgaaggagacggaggaaacgcacgccaaccaaacgcagaaggagacggcggaaacgcaagacaaccaaacgcagagggagacggcggaaacgcgcgacaacccaacgcagaaggcgacggaggaaaugcaagacaaccaaaugcagaaggagacggagggaacgcacgacagccaaacgcagaaggagacggaggaaacgcaagacaaccaaaugccgaaggagacggagcaaacgcaaggcaaccccaggcagaaggaggaggcgggaacgcgagacaaggcggaaacgagggaaacaaacaagcaggaaaagggcaaggacaaaacaaccaaggggcaaacgcgcccaacgaaaaaguaguaaacgauuaccuacagaagauaaggagcagcgucacaacagaguggacgcccugcagcguaacaugcggaaacggcguacgaauacgccgcagagcgcacgcagacaaaaagaaagcggaggacuuaacaauggacgaccuagaaguggaagccuguguaauggauaaaugcgcaggaauauucaacguagugagcaacagccuaggacugguaauacugcuaguccuagcacuauucaacuaa

SEQ ID NO: 5955 - RNA, 1218 nt, Artificial Sequence
  derived and/or modified CDS sequence (opt11) from Pk(UM0015C4)__AHF20661.1__CSP
augaagaacuucauacuguuggccguaagcagcauacuguuaguggaccugcuaccaacgcacuucgaacacaacguagaccuaagcagagcaauaaacguaaacggggugagcuucaacaacguagacacaagcagccuaggggcggcgcaaguaagacagagcgcgagcagagggcggggacugggagaaaagccaaaggaaggggacgacaaagagaaaaagaaagaaaaagagaaagaggaggagccaaagaaacuagacgaaaauaagccgaaacaaccgaacguggaaggggacggagcaaaacuaaaacaaccaaacgaagagggagacggagcgaagcugaagcaaccaaacgaagagggagacggggcaaagcugaaacaaccgaacgcagaaggaggggcaaaauugaaacagccgaacgcagaaggaggggcaaacgcagggcaaccaaacgcggaaggaggggcaaacgcagggcagccaaacgcagagggaggggcgaacgcaggacagccgaacgcagaagggggagcgaacgcgggacaaccgaacgcagaagggggagcgaacgcagggcaaccaaaugcggaaggaggggcgaacgcagggcagccaaacgccgaaggaggagcgaaugcaagacaaccgaacgcagagggaggagcgaacgcgagacagccaaacgcagagggaggggcgaacgcaaggcagccgaacgcggaaggaggggcaaacgcggggcaaccaaacgcggagggaggggcaaacgcagggcagccaaacgcggagggaggggcgaacgcgaggcaaccacaggcugaagggggaggggcgaacgcaaggcagccacaggcggagggaggaggggcgaacgcaagacagggagggaacgaggggaauaaacaggcgggaaaagggcaaggacagaacaaccaaggagcgaacgcaccaaacgagaaaguggugaacgacuaccugcagaaaaucagaagcagcgugacaacggaguggacaccaugcagcguaacgugcgggaacgggguaagaaucagaaggagagcacacgcagacaagaagaaggcggaagaccugacaauggacgaccuggagguggaggcaugcguaauggacaaaugcgcaggaauauucagcguaguaaguaauucgcugggccugguaauacuguugguacuggcacuauucaauuga

SEQ ID NO: 5956 - RNA, 1218 nt, Artificial Sequence
  derived and/or modified CDS sequence (opt11) from Pk(UM0015C7)__AHF20662.1__CSP
augaagaacuucauacugcuggcaguaagcagcauacugcugguagaccugcugccaacacacuucgaacacaacguagaccugaguagagcaauaaacguaaacggugugagcuucaacaacguagacacgagcagccugggggcggcccaaguaagacaaagcgccaguagaggaagaggacugggggaaaaaccaaaagaaggagacgacaaggagaaaaagaaagagaaagagaaagaggaggagccaaagaaacuaaacgaaaacaaaccgaaacagccaaacguagaaggagacggagcaaaacugaaacaaccgaacgaggaaggagacggagcgaaacuaaagcaaccaaacgaagagggagacggagcaaaacuaaaacaaccaaacgcagaaggaggagcgaaacuaaaacaaccaaacgcagaaggaggagcgaacgcaggacaaccgaacgcagaagggggagcgaacgcaggacaaccgaacgcagagggaggagcaaacgcagggcaaccaaacgcagaaggaggagcaaaugcagggcaaccgaacgcagaaggaggggcgaacgcagggcaaccaaacgcggaaggaggggcgaacgcggggcagccaaacgcggaagggggagcaaacgcaaggcaaccaaacgcagaaggaggggcgaacgcaagacaaccgaacgcagaaggaggagccaacgcgagacaaccgaacgcggaaggaggggcaaacgcgggacaaccaaacgcggaaggaggagcaaacgcgggacaaccgaacgcggaaggaggagcaaacgcaagacaaccccaagcagaaggaggaggagcgaaugcgaggcagccgcaggcagaaggaggaggcgcaaacgcgagacaaggaggcaacgaagggaacaaacaagcaggaaaaggacaagggcaaaacaaccaaggagcgaacgcaccaaacgaaaaaguaguaaacgacuaccugcaaaagaucagaagcagcguaacaacagaguggacaccaugcagcguaacaugcggaaacggaguaagaauaagaagacgagcgcacgcggacaagaagaaggccgaagacuuaacaauggacgaccuagaaguagaagcaugcgugauggacaaaugcgcagggauauucaacgugguaagcaacagccuagggcugguaauacugcuggugcuagcgcuauucaacuaa

SEQ ID NO: 5957 - RNA, 1218 nt, Artificial Sequence
  derived and/or modified CDS sequence (opt11) from Pk(UM009C4)__AHF20644.1__CSP
augaaaaauuucauacugcuagcaguaagcaguauacuacugguagaccugcuaccaacacacuucgaacacaacguagaccuaagcagagcgauaaacgugaacggagugagcuucaacaacguagacaccagcagccuaggagcggcacaagugagacaaagcgcgagcagaggaagggggcuaggagagaaaccaaaagaaggggacgacaaagagaaaaagaaggaaaaagaaaaagaagaagaaccaaagaaacuaaacgaaaacaaaccgaagcaaccaaacguagaaggggacggagcaaaacuaaaacaaccaaacgaagaaggagacggagcaaaacuaaaaagaccgaacgaagaaggagacggagcaaaacuaaagcaaccaaacgcagaaggaggagcaaaaccgaaacaaccaaacgcggaaggaggagcaaacgcgggacaaccaaacgcggaaggaggagcgaacgcaggacaaccaaaugcagaaggaggagcgaacgcagggcaaccgaacgcggaagggggagcgaacgcaggucaaccgaacgcagagggaggagcaaacgcgggacaaccgaacgcagaaggaggggcaaacgcaggacaaccaaacgcagagggaggggcgaacgcaaggcaaccaaacgcggagggaggggcgaaugcaaggcaaccaaacgcagagggaggggcgaacgcgagacaaccgaacgcggaaggaggagcgaacgcgggacagccaaacgcggaagguggggcgaacgcagggcaaccaaacgcagaaggaggagcaaaugcaagacagccgcaggcagaaggaggaggagcaaaugcgcgaagaccgcaggcggaagggggaggggcgaacgcgaggcagggaggcaacgagggaaacaaacaggcaggaaaagggcaaggacaaaacaaccaaggagcaaacgcgccgaacgaaaaaguaguaaacgacuaccugcagaaaauaagaagcagugugaccacagaauggacgccgugcagcguaacauguggaaacggggugagaauaaggagaagggcacacgcggacaaaaagaaagcagaagaccugaccauggacgacuuggagguggaagcaugcguaauggacaaaugcgcaggaauauuuaacguaguaagcaacagccuggggcuaguaauacuacuagcgcuagcacuauucaacuga

SEQ ID NO: 5958 - RNA, 1212 nt, Artificial Sequence
  derived and/or modified CDS sequence (opt11) from Pk(TN027)__AFG25481.1__CSP
augaagaacuuuauacuacucgcaguaagcagcauacuccuaguggaucuacuaccaacacacuucgaacacaacguagacuugagcagagcaaucaacguaaacggagugagcuucaauaacguagacacaagcagucuaggagcagcacaaguaagacaaagcgcaagcaggggaagaggacuaggcgaaaaaccaaaggagggggacgacaaagaaaagaagaaagaaaaagagaaagaagaagaaccgaaaaaccugaacgaaaacaaaccaaaacagccaaacgcagaaggcgauggcgcgaaacugaaacagccaaaugccgaaggggacggagcaaaacuaaaacaaccaaacgccgaaggagacggagcaaaacuaaaacaaccccaagcagaaggagacggcgcaaacgcaagacaaccccaagcagaaggcgacggggcaaacgcgagacaaccacaagcagaaggagacggcgcaaacgcgagacaaccacaggcggaaggagacggcgcaaacgcaagacaaccacaagccgagggagauggagcaaacgcaagacagccacaagccgaaggagacggagcaaacgcgagacaaccacaggccgagggagacggcgcgaacgcgagacagccacaggcagaaggagacggagcaaacgcaaggcagccacaagcagagggagacggagcaaacgcaaggcagccacaggcagagggagacggggcaaaugcgagacaaccacaggcagagggaggaggcgcaaacgcaagacaaccacaagcagaaggagacggggcaaacgcgcgacaagcccaagcacaaggagauggcggaaacgcaagacaaggcggaaacgggggcggggcaccagcgggaggaaacgaaggaaacaaacaagcaggcaaagggcagggacagaacaaccaaggagcaaacgcaccaaacgaaaaaguaguaaacgacuaccuccagaaaauacgaucaagcguaacaacagaauggacaccaugcagcgucacaugcggaaacggaguaagaauccgacgcagagcccaugcagacaaaaagaaagcagaagaccugacgauggacgaccuggaaguggaagcaugcguaauggauaaaugugcagggauauucaacguggucucaaacucgcuagggcuaguaauauuacucgugcuagcacuauucaacuag

SEQ ID NO: 5959 - RNA, 1188 nt, Artificial Sequence
  derived and/or modified CDS sequence (opt11) from Pk(UM0034C7)__AHF20657.1__CSP
augagaaacuucauacuccuagccguaaguucaauacugcucguggaccuacuaccaacacacuucgaacacaacgucgaccucucgagagcaauaaacguaaauggcgugagcuucaacaacgucgauacaucaagccuaggcgcagcacaagucaggcaaucggcgucaagaggccgcggacucggagaaaaacgaaaagaaggggccgauaaagaaaagaagaaagaaaaagaagaagaaccaaagaaaccaaacgaaaacaaacucaaacaaccaaacccggaccaaccacaagcccaaggaaacggagcaaacgccggccaaccacaagcacaaggagacggcgcaaacgcaggacaaccacaagcacaaggcgacggcgcaaacgcaggccaaccacaagcgcaaggagacggagcaaacgcaggacaaccccaagcacaaggagacggcgcaaacgcaggacaaccccaagcccaaggcgacggagcaaacgcaggacaaccacaagcacagggcgacggcgcaaacgcggggcaaccacaagcccaaggagacggcgcgaacgcaggccaaccccaagcccaaggcgacggcgcaaacgcaggacagccccaagcccaaggcgacggagcaaacgcaggacagccccaagcacaaggcgacggagcaaacgcaggacaaccccaagcacaaggagacggagcaaacgcaggccaaccccaagcccaaggagacggcgcaaacgcaggacaaccgcaagcccagggcgacagggcaaacgcgggacagccccaagcacaaggagacggcgcgaacguacccaggcaagggcgaaacggaggaggagcacccgcuggcggcaacgaaggcaacaaacaagcaggaaaagggcaaggacaaaacaaccaaggagcaaacgcgccaaacgaaaaagucguaaacgacuaccugcacaaaaucagaagcagcgucacaaccgaauggaccccaugcagcguaacaugcggaaacggcguacgcauaagaagaaaagcacacgcagggaacaaaaaggcagaagaccuaacgauggacgaccucgaaguagaagccugcguaauggacaagugcgccggaaucuucaacguaguaagcaacagccucggacugguaauacuccuagugcuagccuuauucaacuaa

SEQ ID NO: 5960 - RNA, 1185 nt, Artificial Sequence
  derived and/or modified CDS sequence (opt11) from Pk(KH225)__ADN94498.1__CSP
augaagaacuucauacuacucgcgguaucaagcauacucuuagucgaucuacugccgacgcacuucgaacacaacguggaccugagcagagcaauaaacguaaacggaguaucauucaacaacguagauacgagcagucucggggccgcgcaagugagacaaagcgcaaguaggggaagaggacuaggcgagaaaccaaaagaaggcgacgacaaagagaagaagaaagaaaaagaaaaagaggaagaacccaaaaaccucaacgaaaacaaaccaaaacagccaaacgccgaaggcgacggcgcgaaacugaaacaaccaaaugccgaaggagacggagcaaaacuaaaacagccaaacgcagaaggcgauggaggaaacgcaagacaaccaaacgcagaaggggacggaggaaacgcgagacaaccaaacgcagaaggagacggaggaaacgcgcgacaaccaaacgcagagggagacggaggaaacgcgagacaaccaaacgccgaaggagacggaggaaacgcgagacaaccaaacgccgaaggagacggaggaaacgcgagacaaccaaacgcggagggagacggagggaacgcacgccaaccaaacgcggagggagacggaggaaacgcaagacagccaaacgccgagggagacgggggaaacgcgagacaaccaaacgcagagggagacggagggaacgcaagacaaccgaaugccgagggagauggcgggaacgcaagacagccaaacgcagaaggagacggcggaaacgcaagacaacccaacgcagaaggggacggagcaaacgcgcgacagccacaagccgagggcggaggaggaaacgcacgacaaggcggaaacgaaggaaacaaacaagccgggaaagggcaaggacaaaacaaccaaggagcaaacgcgccaaacgaaaaaguaguaaacgacuacuugcagaaaauaagaagcucgguaacaacagaauggacacccugcagcgugacauguggaaacggaguaagaauacgcaggagagcgcacgcggacaagaagaaagcagaagacuuaacaauggacgaucucgaaguagaggccugcguaauggacaaaugcgcgggaauauucaacguaguaagcaacagccuaggauuaguaauacuauugguacuagcacuauucaacuag

SEQ ID NO: 5961 - RNA, 1179 nt, Artificial Sequence
  derived and/or modified CDS sequence (opt11) from Pk(UM001C7)__AHF20637.1__CSP
augaaaaacuucauacugcuagcagucagcaguauacugcuagucgaccuccugccgacacacuucgaacacaacguagacuuaagcagggcaauaaacguaaacggaguaagcuucaacaacgucgacacaagcagccucggagcagcgcaaguaagacaaagcgcaagcagaggaagagggcugggggagaaaccaaaagaaggagcggacaaggaaaaaaaaaaagaaaaaggaaaagaaaaagaagaagaaccaaaaaaacccaacgaaaacaaacuaaaacaaccaaacgaaggacagccgcaagcgcaaggagacggggcaaacgcggggcaaccgcaagcgcaaggggacggagcgaacgcagggcaaccacaagcacaaggagacggggcgaacgcaggacaaccgcaagcacaaggagacggggcaaacgcagggcaaccacaagcgcaaggggacggagccaacgccggacaaccacaagcacaaggggacggggcaaacgcgggacaaccacaagcacaaggggacggagccaacgcagggcaaccgcaagcacaaggagacggagccaacggagauggagcaaacgcgggacagccacaagcacaaggagauggggcgaacgcgggacagccacaggcacaaggagacggagcaaacgcaggacaaccacaggcacaaggagacggcgcgaacgcaggccagccacaagcacaaggagacggagcaaacgcaggacagccacaagcccaaggagacagagcaaacgcgggacaaccacaagcacaaggcgacggagcgaacguaccaagacaagggagaaacggcggaggagcgccagcgggaggaaacgaaggaaacaaacaagcaggaaaaggacaagggcaaaacaaccagggggcaaacgcaccaaaugaaaaaguagucaacgacuaccuacauaaaaucaggaguucagucacaacagaauggacgcccugcagcguaacaugcggaaacggaguaagaauaagaagaaaagcacacgcgggaaauaaaaaagcagaagacuugacaauggacgaucucgagguagaagcauguguaauggacaagugcgcaggaauauucaacgucguaagcaacagccuaggacuagucauacuacuagugcuagcccuauucaacuag

SEQ ID NO: 5962 - RNA, 1140 nt, Artificial Sequence
  derived and/or modified CDS sequence (opt11) from Pk(SGEHIWM4-Y09-15)__AFD97227.1__CSP
augaaaaacuucauacugcuggcaguaagcagcauacuguuaguggaccugcugccgacguacuucgaacacaacguagaccuaagcagggcagugaauguaaauggagugagcuucaauagcguagacacaaguagucuaggagcagcacaagugagacaaagugcaagucgaggaaggggacugggggaaaaaccaaaagaaggagcagacaaagagaagaagaaagagaaagagaaagaggaggaaccaaagaaaccaaacgagaacaaacuaaaacagccgcaagggaacggaggggcaggacaagcgcaaccagaaggaaacggaggagcagggcaagcgcagccagaagggaacgggggagcaggacaggcgcagccagaagggaacggcggagcaggacaggcgcaaccggaagggaacgggggagcaggacaggcacagccggaggggaauggaggcgcgggacaagcgcagccagaaggaaacggaggagcaggacaggcgcagccggagggaaacggaggagcagggcaggcgcagccacaggggaacggaggggcaggacaagcacagccacagggaaacggaggggcagggcaggcacagccgcagggaaacggaggggccgggcaagcgcagccacaggggaacgggggagcaggacaagcgcagccagaaggaaacgggggagcgggacaagcacagccacagggaaacggaggagcagggcaggcacagccggaaggaaacagagaagcgccagcgcagccacaaggaaauggaggagcagggcaggcacaaccacagaaaaacgaaggaggaaacgcaggggcaaggaaagggcagggacaaaacagucaaggagcgaacgcaccgaacgaaaaaguggugaaugacuaccuacagaaaauaaggagcagugucacgacggaauggacaccaugcagcguaacguguggaaacggaguaaggauaagaaggagggcgcacgcagacaaaaagaaagcgggagaccuaacaauggacgaccuagaaguagaagcaugcguaauggacaaaugcgcgggaauauucaacgcagugucaaacagccuggggcuaguaauacuguugguacuggcacuauucaacuag

SEQ ID NO: 5963 - RNA, 1140 nt, Artificial Sequence
  derived and/or modified CDS sequence (opt11) from Pk(UM002C3)__AHF20638.1__CSP
augaagaacuucauacugcuggcggugagcagcauacugcugguggaccuacuaccgacauacuucgaacacaauguagacuuaagcagagcaauaaacgugaacggggugagcuuuaacaacguagacacgaguagccugggagcggcgcaagugagacagagcgcaaguagggggagaggacugggagagaaaccaaaagaaggagcagacaaagaaaagaaaaaggaaaaagaaaaggaaaaggaagaggaaccgaaaaagccaaacgaaaauaaacugaaacagccagaaggaaacggaggggcaggaccagcgcaacccgaaggaaacggaggggcagggccggcacaaccggagggaaacggaggggcagggcccgcgcaaccggaagggaacggaggggcggggccggcgcaaccggaggggaacggaggggcggggccugcacaaccagaaggaaacgggggagcaggaccagcacaaccggaggggaacggaggagcaggaccggcacaaccagaaggaaacgggggagcaggaccggcacagccggaggggaacggaggggcgggaccagcacagccgggaggacaaguacagcacaacaggaaggagaugggagggcagguacagcacaacaggaaggaaaugggagggcaagugcaacacaaccacaaagaaaugggagggcaagugcaacacaaucacaaggagaugggaggggcagggccggcgcagccacaagggaacgggggagcgggaccggcacagccacaaggaaacggaggagcagggcaggcgcaaccgcagaagaacgaaggagggaacgcaggggcgagaaaggggcagggacagaacaaucaaggggcaaacgcgccgaacgagaaaguaguaaacgacuaccuacagaaaauaaggagcagcgugacaacggaauggacaccgugcucaguaacgugcggagacgggguaagaauaaaaagaagggcacacgcggacaaaaagaaagcggaggacuugacaauggaugaccuagaaguagaagcgugcgugauggacaaaugcgcaggaauauucaacgugguaaguaacagccuagggcuaguaauacuccuagugcuagcacuguuuaacuaa

SEQ ID NO: 5964 - RNA, 1128 nt, Artificial Sequence
  derived and/or modified CDS sequence (opt11) from Pk(UM0021C6)__AHF20666.1__CSP
augaggaacuucauacucuuagcaguaagcagcauacuacucguagacuuauucccaacacacuucgaacacaacguagaccuaucgagagcaauaaacguaaauggagugagcuucaacaacguagauacaagcagcuugggagcggcccaggucagacaaucagccagccgcggacgcggacucggagaaaaaccaaaagaaggagcggauaaggaaaagaagaaagaaaaaggaaaagaaaaagaagaagaaccaaagaaaccaaacgaaaacaaacuaaaacaaccaaacgaaggacaaccacaagcccaaggagacggagcaaacgcgggacaaccacaagcacagggagacggagccaacgcgggacaaccccaagcccaaggcgacggagcaaacgcaggacaaccacaagcacagggagacggagcaaacgcaggccaaccacaagcacaaggcgacggagcaaacgcaggccaaccacaggcccaaggagacggagcgaacgcaggccaaccacaagcacaaggagauggagcaaacgcaggacagccacaggcacaaggcgacggcgcaaacgcggggcaaccacaagcccaaggcgacggcgcaaacgcaggacagccacaagcccagggagacggggcaaacacgggccagccccaagcgcaaggcgacggagcaaacgcaggacaaccccaagcacagggagacagagcaaacgcaggccagccacaagcacaaggagacggcgcaaacguaccaagacaaggaagaaacgggggaggagcaccagcaggcggaaacgaaggcaacaaacaagcaggaaaaggacaaggacaaaacaaccagggcgcaaacgcgccaaacgaaaaaguaguaaacgacuacuuacacaaaauaagaagcagcguaacaacagaauggacaccauguagcguaacgugcggaaacggcguaagaauaagaaggaaagcacacgcaggcaacaagaaagccgaagaccugacaauggacgaccuagaagucgaagccugcguaauggacaaaugcgcaggaauauucaacgugguaagcaacagcuuagggcuaguaauacugcugguccuagcacuauucaacuaa

SEQ ID NO: 5965 - RNA, 1128 nt, Artificial Sequence
  derived and/or modified CDS sequence (opt11) from Pk(UM0050C2)__AHF20664.1__CSP
augaaaaacuucauacuccuggccguaagcucgauacuacucguagacuuacuaccgacccacuucgaacacaacgucgaccuaucaagagcaauaaacguaaacggcguaagcuuuaacaacgucgacaccucaagccugggcgcggcacaaguaaggcaaagcgcaucacgcggacgcggacuaggggaaaaaccaaaagaaggggccgacaaagaaaaaaaaaaagaaaaagggaaagagaaagaagaagaacccaaaaaaccaaacgaaaacaaacucaaacaaccaaacgagggccagccacaggcacaaggcgauggcgcaaacgcaggacaaccccaagcacaaggcgacggagcgaacgcaggacagccacaagcacaaggcgauggcgcaaacgcaggccagccacaggcccaaggagacggcgcaaacgcgggccaaccccaagcccaaggcgacggagcgaacgcaggccaaccccaagcacaaggagacggcgcaaacgcgggacaaccccaagcccagggcgacggagcaaacgcgggccagccccaagcacaaggcgauggagcgaacgcaggccaaccccaagcacaaggcgacggagcgaacgcaggccaaccccaagcccaaggagacggagcaaacgcagggcaaccccaagcacaaggcgacggagcaaacgcgggacaaccccaagcacaaggagaccgcgcgaacgcaggacaaccacaagcacaaggagacggcgcgaacguaccgaggcaaggacgaaacggagggggagcacccgcaggggggaacgaaggaaacaaacaggcaggaaaaggacaaggacaaaacaaccaaggagcgaacgcacccaacgaaaaaguagugaacgacuaucuacacaagauaagaagcucagucaccaccgaauggacacccuguagcguaaccugcggcaacggcguacgcauacgaaggaaagcgcacgcaggaaacaaaaaagccgaggacuuaaccauggacgaucuagagguagaagccugcgucauggacaaaugcgcaggcauauucaacgucguaagcaauagccuaggacuagugauacugcugguccuagcacuguucaacuaa

SEQ ID NO: 5966 - RNA, 1128 nt, Artificial Sequence
  derived and/or modified CDS sequence (opt11) from Pk(UMMK569C20)__AHF20669.1__CSP
augaaaaacuucauacuccuagcaguaagcucaauacuccuaguagaccuacuaccaacacacuucgaacacaacgucgaccuaagcagagcaauaaaugugaauggagugagcuucaacaacguagacaccagcagcuuaggagcagcacaaguaaggcaaucagcaagucgaggacgaggacuaggagaaaaaccaaaagaaggagcagacaaagaaaagaagaaagaaaaaggaaaagagaaagaggaggaaccaaagaaaccaaacgaaaacaaacuaaaacaaccgaacgaaggccaaccccaggcacaaggcgacggcgcgaacgcgggccaaccacaagcacaaggagacggagcgaacgcaggacagccccaagcacaaggagacggagcaaacgcgggacagccccaggcacaaggggacggcgcaaacgcaggccaaccacaagcgagaggagacggagcgaacgcaggacaaccacaagcacaaggagauggagcgaacgcagggcaaccccaagcacaaggcgacggagcgaacgcgggacaaccacaagcacaaggagacggggcaaacgcgggacaaccccaagcacagggagacggagcaaacgcaggacagccacaagcacaaggggacggagcaaacgcaggccaaccgcaagcccaaggagacggagcaaacgcaggacaaccacaagcacaaggcgacagagcgaacgcgggacaaccacaggcgcaaggagacggagcaaacguacccaggcaaggaagaaacggaggaggcgcgccagcagggggaaacgaaggaaacaaacaagcaggaaaaggacaaggacaaaacaaccaaggagcaaacgcaccaaacgaaaaagucguaaacgacuacuugcacaaaaucaggagcagcgucacgaccgaauggacacccugcagcguaaccugcggcaacggaguacgcauacgaagaaaggcgcacgcaggaaacaagaaagcagaagaccuaacaauggacgaccuagaaguagaagccugcguaauggacaaaugcgcaggcauauucaacguaguaagcaauagcuuaggccuagugauacuccuaguauuagcccuguucaacuaa

SEQ ID NO: 5967 - RNA, 1116 nt, Artificial Sequence
  derived and/or modified CDS sequence (opt11) from Pk(KH433)__ADN94489.1__CSP
augcgaaacuucauacuacuagcaguaagcucaauacuacuaguagacuuacucccaacccacuucgaacacaacgucgaccuaagcagagcaaucaacgucaacggcguaagcuucaacaacgucgacacaucaagccugggcgcagcacaggucagacaaucagccucgcgcggacgcgggcuaggagaaaaacgaaaggaaggggccgacaaagaaaaaaaaaaagaaaaagaggaagaaccgaaaaaaccaaacgagaacaaacuaaaacaaccaaacccaggccaaccacaagcgcaaggcgacggcgcgaacgcaggccaaccacaagcccaaggagacggcgcaaacgcaggccaaccccaagcacaaggagacggagcaaacgcgggccaaccacaggcacaaggcgacggcgcgaacgcagggcaaccacaagcacaaggcgacggggcgaacgcaggccaaccccaagcacaaggcgauggcgcgaacgcgggccaaccacaggcacaaggcgacggagcgaacgcaggccaaccgcaggcacaaggcgacggagcaaacgcgggacaaccacaagcacagggcgacggcgcaaacgcaggacaaccacaagcacaaggagacggagcgaacgcgggccaaccacaagcacaaggggacggcgcaaacgcaggccaaccccaagcacaaggagaccgcgcgaacgcgggccagccccaggcacaaggagauggagcaaacguacccaggcaaggaagaaacggaggaggcgcaccagcaggaggaaacgaaggaaacaaacaagccggaaaagggcagggacaaaacaaccaaggagcaaacgcacccaacgaaaaaguagugaacgauuaccuacacaaaaucagaagcucgguaacaaccgaauggacgcccugcagcguaaccugugggaacggcgugcgaauaagaagaaaagcacacgcaggcaauaaaaaagcagaagaccuaacaauggacgaccuggaagucgaagcaugcguaauggacaaaugcgcaggcauauucaacgucgugagcaacagccuaggccuaguaauacuauuaguacuggcacuguucaacuga

SEQ ID NO: 5968 - RNA, 1116 nt, Artificial Sequence
  derived and/or modified CDS sequence (opt11) from Pk(UM0034C10)__AHF20658.1__CSP
augcgaaauuucauacuccuagccguaagcucaauccuacucguagaccuccucccaacacacuucgaacacaacgucgaccuaucaagagcaaucaaugucaacggagugagcuucaacaacguggacaccucaagccugggcgccgcacaaguaagacagucggccucacgcggaagaggacuaggggaaaaacgaaaggaaggagccgacaaagaaaaaaaaaaagaaaaagaagaagaaccaaaaaaaccaaacgaaaacaaacucaaacagccaaacccagaccaaccccaggcccaaggagauggagcaaacgcgggccaaccacaagcacagggagacggcgcaaacgcgggacaaccacaagcacaaggcgacggggcgaacgcaggacaaccacaagcacaaggcgacggcgcaaacgcaggccaaccacaggcacaaggagacggagcgaacgcgggccaaccccaagcccaaggagacggcgcaaacgcaggccaaccccaagcgcaaggagacggagcaaacgcaggccaaccccaggcucaaggcgacggcgcaaacgcaggacaaccccaagcgcaaggagacggcgcaaacgcaggccaaccgcaagcacaaggcgacggagccaacgcaggccagccccaagcgcaaggagacggcgcgaacgcaggccaaccacaggcccaaggagaccgcgcaaacgcgggccaaccacaggcacaaggagacggagcaaacguacccagacaaggacgcaauggcggaggagcacccgcgggcggaaacgaaggaaacaaacaagcaggaaaaggacaaggacaaaacaaccaaggcgcaaacgcacccaaugaaaaggucgugaacgacuaccuacacaaaauaagaagcucgguaacgacagaguggacgcccugcagcguaaccugcggcaacggaguacgaauacgaagacgccagaacgcaggaaacaaaaaagccgaagaccuaaccauggacgaccuagaagcagaagccuguguaauggacaaaugcgcaggaauauucaacgucguaagcaauagccuaggccuagucauacuucugguauuagcacuguucaacuaa

SEQ ID NO: 5969 - RNA, 1116 nt, Artificial Sequence
  derived and/or modified CDS sequence (opt11) from Pk(UM0034C6)__AHF20656.1__CSP
augagaaacuucauacucuuggcagugagcagcauacugcucguagacuuauuaccaacccacuucgaacacaacguagaccucucgagagcaauaaacguaaacggaguaagcuucaacaacguagacacaucaagccuaggagcagcacaagucagacaaagugccaguagagggagggggcuaggagaaaaaagaaaggaaggagccgacaaagaaaaaaaaaaagaaaaagaagaagaaccaaaaaagccaaacgaaaacaaacugaaacaaccaaacccagaccaaccgcaagcacaaggagacggcgcgaacgcgggacaaccacaggcacaaggggacggagcgaacgcgggccaaccacaagcacaaggggacggcgcaaacgcaggacagccacaggcacaaggagacggcgcaaacgcagggcaaccacaagcacagggagacggagcgaacgcaggccaaccacaagcacagggggacggagcgaacgcaggacagccacaggcccaaggagacggagcaaacgcaggccaaccacaagcgcagggagacggggcaaacgcaggacagccccaagcacaaggagacggagcgaacgcaggacaaccccaagcacaaggagacggagcaaacgcgggacaaccacaagcccaaggcgacggagcaaacgcaggacaaccccaggcccaaggagacagagcaaacgcaggacaaccacaagcacaaggagacggggcaaacguaccaagacaaggaagaaauggcgggggagcaccagcaggcggaaacgaaggaaauaaacaggcaggaaaaggacaaggacaaaacaaccaaggagcaaacgcacccaacgaaaagguagugaacgacuaccugcacaaaauaaggagcagcguaacgacagaguggacaccaugcagcguaacauguggaaacggaguacgaauacgcagaaaagcacacgcgggcaauaaaaaagccgaagaccugacaauggacgaccuagaagucgaagcaugcguaauggacaaaugcgcaggcauauucaacguaguaagcaacagccugggccuagugauacuacuaguacuagcacuauucaacuag

SEQ ID NO: 5970 - RNA, 1107 nt, Artificial Sequence
  derived and/or modified CDS sequence (opt11) from Pk(SGEHIWM16-Y09-85)__AFD97232.1__CSP
augaaaaacuucauacugcuagcaguaagcagcauauuacugguggaccuacuaccaacguacuuugaacacaacguagaccuaagcagggcaauaaacgugaacggggugagcuucaacagcguagacacgaguagccuaggggcagcgcaagugaggcagagcgcaaguagaggcaggggcuugggagaaaaaccgaaagagggagcggacaaagagaagaagaaggaaaaggaaaaggaagaggaaccaaagaaaccaaacgaaaacaaacugaagcaaccgcaagggaacggaggggcagggcaagcgcaaccggaagggaacgggggagcagggcaggcacaaccagagggaaacggaggggcaggacaagcgcaaccggagggaaacgggggagcaggacaggcacagccggaagggaacggaggagcgggacaggcacagccggaagggaacgggggagcgggacaggcacagccagagggaaacgggggagcgggacaagcgcaaccagaaggaaacggaggggcggggcaagcgcagccggaaggaaacggaggggcggggcaggcacaaccggaagggaacggaggggcggggcaggcacagccacaagggaauggaggggcagggcaagcgcaaccgcaggggaacggaggagcaggacaggcacagccacagggaaauggaggggcagggcaagcgcagccggaagggaacagggaggcgccagcgcagccgcagggaaauggaggagcagggcaggcacagccacagaaaaacgaagggggaaacgcaggggcaaggaaagggcagggacaaaacaaccagggggcgaaugcgccaaacgaaaaggucgugaacgacuaccuacaaaagauaagaaguaguguaacaacagaguggacgccgugcagcguaacgugcgggaacggggugagaauaagaaggcgagcacacgcggacaaaaagaaggcagaggaccugacaauggacgaccuggagguagaggcgugcguaauggacaaaugcgcaggaauauucaacguaguaagcaacagucuggggcugguaauacuacuggugcuagcauuguucaacuaa

SEQ ID NO: 5971 - RNA, 1107 nt, Artificial Sequence
  derived and/or modified CDS sequence (opt11) from Pk(SGEHIWM4-Y09-13)__AFD97225.1__CSP
augaaaaacuucauacuacuggcaguaagcagcauacugcuaguagaccuccuaccaacguacuuugaacacaacguggaccugagcagagcaauaaacguaaauggggugagcuucaacagcguagauacgagcagccugggggcagcacaaguaaggcaaagcgcaagcagagggaggggacuaggagaaaaaccaaaagagggagcggacaaggaaaagaaaaaggagaaggaaaaagaggaggagccgaaaaagccaaaugagaacaaacugaaacaaccgcagggaaacggaggggcggggcaagcgcaaccggaaggaaacggaggagcaggacaagcgcagccagaggggaacggaggggcaggacaggcacaaccggaagggaacggaggagcggggcaggcacagccagagggaaacggaggagcaggacaagcgcaaccagaagggaacgggggagcgggacaggcacagccagagggaaacggaggagcggggcaagcgcaaccagaaggcaacggaggggcggggcaagcacagccggagggaaacggcggggcagggcaggcacaaccggaagggaacggaggagcagggcaggcacagccacaggggaacggaggggcgggacaagcgcagccacaagggaacggaggagcggggcaagcgcagccacaagggaacggcggggcagggcaggcgcaaccggaaggaaacagagaagcaccagcacaaccacaaggaaacggcggagcagggcaggcacagccacagaaaaacgaagggggcaacgcgggggcaagaaagggacaaggacaaaacaaccaaggagcgaacgcaccaaacgagaaaguuguaaacgacuaccugcagaagauaaggagcagcguaacgacagaauggacgccaugcagcguaacgugcgggaacggaguaagaauaaggagaagggcgcacgcagacaagaaaaaggcagaagaccuaacaguagacgaccuagaaguagaggcaugcgugauggacaaaugcgcgggaauauucaacguagugagcaacagucugggauuaguaauacugcuaguacuagcacuauucaacuga

SEQ ID NO: 5972 - RNA, 1104 nt, Artificial Sequence
  derived and/or modified CDS sequence (opt11) from Pk(KH58)__ADN94493.1__CSP
augaaaaacuuuauauugcuagcgguaucgagcauacucuuggucgaucuccuaccaacgcacuucgaacacaacguggacuuaagcagggccauaaacauaaacggaguaucauucaauaacguggacacgagcucacucggggcagcgcaaguacgacaaagcgcgagcaggggcagaggcuugggcgagaaaccgaaagagggagcagacaaagaaaagaaaaaggaaaaggaaaaggaagaggaaccgaagaagccuaaugaaaauaaauugaaacagccgaaugcggagggcgacggcgcgaacgcaagacagccaaacgccgagggcgacggagcaaacgcgagacagccaaaugccgaaggcgauggagcaaacgcgagacaaccaaaugcagagggcgacggcgcgaacgcgcgacagccaaacgcugaaggcgacggagcaaacgcgagacagccaaaugcagagggagacggcgcgaacgcgcgccagcccaacgccgaaggcgauggcgcaaacgcgagacagcccaaugcggagggagauggagcaaacgcgcgccaacccaaugcagagggagacggagcgaacgcgcgccagccaaaugcagagggcgauggagcaaacgcgagacagcccaacgccgagggcggaggagcaaacgcgagacagcccaaugcagagggagacggggcgaacgcgcgacagccccaggcccagggagauggagggaacgcaagacagggcggaaacggaggaggggcaccggcaggaggcaacgaagggaacaagcaagcgggaaagggccaaggccagaacaaucaaggggccaaugccccgaacgagaaaguggucaaugacuaucuccagaaaauaagaucgagcguaacaacggaauggacaccgugcucggucacaugcgggaacggggucaggaucaggcgcagggcacaugcugacaaaaagaaggcggaagaucuaacaauggaugaccuagaaguggaagcaugcgugauggauaaaugcgcagggaucuuuaacguaguaucgaacucgcuaggucuagugauauugcuggugcuagcgcuguucaacuag

SEQ ID NO: 5973 - RNA, 1104 nt, Artificial Sequence
  derived and/or modified CDS sequence (opt11) from Pk(UM0029C8)__AHF20651.1__CSP
augaaaaauuucauacuguuagcagugagcaguauacugcugguagaccugcugccgacacauuucgaacauaacguggaucuaaguagagcgauaaauguaaauggggugagcuuuaacaacguggauacaaguagccuaggggcggcacagguaaggcagagcgccagcagagggagaggacuaggagagaagccaaaggaaggggcggacaaagaaaagaaaaaggaaaaagagaaagagaaagaagaagaaccaaagaaaccgaacgagaacaagcuaaagcaaccggaacagccggcggcgggggcaggaggagagcaaccggcggcgggggcgggaggggaacagccggcagcgggagcagggggagagcaaccagcggcgggagcaggaggggaacagccggcagcaggggcaaggggagagcagccggcagcaggggcgggaggggagcagccggcggcgggggcaagaggggaacagccggcagcgggggcgggaggggagcagccggcggcgggagcgggaggagaacagccagcagcaggagcaggaggggaacaaccggcggcaggaggggagcaaccggcagcgggggcgggaggagagcagccagcagcgggagcgaggggagagcaaccggcagcaggagcgggaggggagcagccagcaccagcgccgaggagagaacaaccggcggcaggggcaggaggggaacagccagcgccagcaccaagaagagagcaaccggcaccgggggcgggagcgggagauggagcgagaggaggcaacgcaggagcggggaaagggcaggggcaaaauaaccaaggagcaaacgugccgaaugaaaaaguagugaacgauuaccugcacaagaucaggaguagcguaacgacggaguggacaccauguagcgugacauguggaaacggggugagaauaagaagaaaaggacacgcggggaauaagaaggcagaggaccugacaauggacgaucuagagguggaggcauguguaauggacaagugcgcgggaauauucaauguggugagcaacaguuugggguuggugauucuauugguguuggcauuguucaauuga

SEQ ID NO: 5974 - RNA, 1104 nt, Artificial Sequence
  derived and/or modified CDS sequence (opt11) from Pk(UM0032C8)__AHF20655.1__CSP
augaagaacuuuauccuacucgcgguaucaagcauacuccuagucgaccugcuaccaacacacuuugaacacaacguggaccugagcagagccauaaacgugaacggggucagcuucaacaacguggacacaagcagucucggggccgcacaagugagacagagcgcgagcagaggaagaggccuaggcgaaaaaccgaaagagggcgcggacaaggaaaagaagaaagaaaaagaaaaggaagaggaacccaaaaagccaaacgaaaacaaacugaaacagccaaacgcagagggcgacggcgcaaacgcgcgacagcccaacgcagagggcgacggcgcgaacgcgcgacagccaaacgccgagggagacggcgcgaacgcgagacagcccaacgccgaaggcgacggcgcaaacgcgcgacaaccaaacgccgaaggcgauggagcaaacgcucgccagccaaaugccgagggcgacggcgcgaacgcgcgacagcccaacgccgaaggcaacggcgcgaacgcaagacagcccaaugccgagggagggggagcgaacgcgagacagccaaacgcagagggagacggcgcaaacgcacgccaaccaaacgcagagggagauggcgcgaacgcacgccagccaaacgcggaaggaggcggggcaaacgcgcgccaaccacaggcggagggggacggcgcaaacgcgagacaaccccaagcccaaggagacggcggaaacgcgcgccaaggaggaaacgggggaggagcaccagcaggaggcaacgaaggaaacaaacaagcgggcaagggccaaggccagaacaaucaaggggcaaacgcaccgaacgaaaaagugguaaacgacuaccuacagaaaauccgcagcagcguaaccacggaauggaccccgugcucagucacaugcggaaacggggucaggauaagaaggagagcccacgcagacaaaaagaaagcggaagaccuaacaauggacgaccuggaaguagaagcgugcgugauggacaaaugcgccggaauauuuaacguaguaucaaacucgcuaggauucguaaucuugcuagugcuagcacucuucaacuaa

SEQ ID NO: 5975 - RNA, 1101 nt, Artificial Sequence
  derived and/or modified CDS sequence (opt11) from Pk(LT22)__ADN94538.1__CSP
augaggaacuuuauacugcuagcaguaagcagcauacuacugguggaccuacugccaacgcacuucgaacacaauguggaccugagcagagcgauaaacgugaacggagugaguuucaacaacguagacacgagcagccugggagcagcacaaguaaggcagagcgcaaguagggggagaggacuaggagagaaaagaaaggagggagcggacaaggaaaagaaaaaggaaaaagaagaggagccaaagaagccgaacgaaaacaaacuaaaacaaccgaacgcagagggaggggcaaaugcagggcaaccgaacgcggaagggggagcaaacgcggggcaaccaaacgcggaaggaggggcaaacgcggggcagccgaacgcggaaggaggagcaaacgcgggacagccaaacgcagagggaggggcaaacgcagggcaaccgaacgcggaagggggagcgaacgcaggacagccaaacgcagagggaggggcaaacgcagggcaaccgaacgcagagggaggagcaaacgcgggacagccgaacgcggaaggaggagcaaacgcgggacagccaaacgcagagggaggagcaaacgcaggacagccgaacgcagaagggggagcaaacgccagacaaccgaacgcggaagggggagcaaacgcagggcaaccaaacgcagagggaggggcgaacgcaggacaaccgaacgcagagggaggagcaaacgcgagacaaccgcaagcggaagggggaggggcaaacgcgagacaagggggaaacgaggggaacaaacaggcggggaaaggacaagggcagaacaaccagggagcaaacgcgccgaacgagaaagucguaaacgacuaccuacaaaagauaaggaguaguguaacgacagaguggacaccgugcagugugacaugcggaaacggagugcggauaaggaggagagcgcacgcggauaagaagaaagcagaggaccugacaauggacgaccuagagguagaggcaugcgugauggacaaaugcgcaggaauauucaacguaguaaguaacaguuugggacugguaauacugcuaguguuagcgcuauucaacuga

SEQ ID NO: 5976 - RNA, 1101 nt, Artificial Sequence
  derived and/or modified CDS sequence (opt11) from Pk(LT26)__ADN94539.1__CSP
augagaaacuucauacuguuagcagugagcagcauacugcuggucgaccuauugccaacacacuucgaacacaacguggaccuaagcagggcaauaaacguaaacggggugagcuucaacaacguagacacgagcagccuaggggcagcgcaaguaaggcaaagcgcgagcaggggaaggggacugggagagaaaagaaaagaaggggcagacaaggagaagaaaaaggaaaaagaggaagaaccaaagaaacccaacgaaaacaaacuaaaacagccaaaugcggaaggaggggcaaacgcgggacaaccgaacgcagaagggggagcaaacgcaggacagccaaacgcagagggaggagcaaacgccgggcaaccgaacgcagaaggaggagcaaacgcgggacagccaaacgcagaaggaggagcaaacgcgggacaaccaaacgcagaaggaggagcaaacgcggggcaaccaaacgcggaaggaggggcaaacgcagggcaaccaaacgcagaagggggagcgaacgcaagacagccaaacgcagaaggaggggcaaacgcaggacagccgaacgcggaaggaggagcaaacgcagggcagccaaacgcagaaggaggggcaaaugcggggcaaccaaacgcagaagggggcgcgaacgcggggcagccgaacgcagaagggggagcgaacgcagggcaaccaaacgcggaagggggagcaaacgcaagacagccacaggcggagggaggaggagcaaacgcaaggcagggaggaaacgagggaaacaaacaagcagggaaagggcagggacaaaacaaccaaggggcgaacgcaccaaacgagaaaguaguaaacgacuaccuacaaaagaucaggaguagcguaacaacggaguggacaccgugcagugugacauguggaaacggcgugaggauaagaaggagagcgcacgcggacaagaaaaaggcagaggaccugacaauggacgaccuagagguggaggcaugcguaauggacaagugcgcgggaauauucaacguagugagcaacagccuagggcuggucauacuauuagugcuagcacuauucaacuaa

SEQ ID NO: 5977 - RNA, 1101 nt, Artificial Sequence
  derived and/or modified CDS sequence (opt11) from Pk(TB013)__AFG25472.1__CSP
augaggaacuucauacugcuagcgguaagcagcauacugcuaguagaccuacuaccaacacacuuugagcauaacguggaccuaagcagggcaauaaacguaaacggggugagcuucaauaauguggacacgagcagccuaggagcagcgcaagugaggcaaagugcgggaaggggaagagggcugggggagaaaagaaaagagggagcggacaaggagaaaaagaaagagaaagaagaggaaccgaaaaagccaaacgagaacaaacugaagcaaccgaacgcagaaggaggggcaaacgccggacaaccgaaugcggaagggggagcgaacgcggggcaaccgaacgcggagggaggggcaaacgcagggcaaccgaacgccgaaggaggagcaaacgcggggcagccaaaugcggagggaggggcaaacgcagggcaaccgaacgcagaaggaggggcgaacgcagggcagccgaacgcggagggaggggcaaacgcggggcaaccgaacgcggaaggaggggcgaacgcagggcagccaaacgcggagggaggagcaaacgcagggcaaccgaacgcggaaggaggggcgaacgcgagacagccaaacgcagagggaggggcaaaugcgcggcaaccgaacgcagaaggaggggcaaacgcggggcagccgaacgcggaaggaggggcaaacgcggggcaaccgaacgcggaaggaggggccaacgcgagacagccacaggcagaagggggaggggcaaacgcaagacaaggagggaacgaggggaacaagcaagcagggaaagggcaggggcagaacaaccagggagcaaacgcgccgaacgagaagguagugaacgacuaccugcagaaaauaagaaguaguguaacgacagaguggacaccgugcagcguaacgugcgggaacggagugaggauaagaaggagagcacacgcggacaagaaaaaggcagaggaccugacgauggacgaccuagagguagaggcaugcgugauggacaagugugcgggaauauucaacguagugaguaauagccuagggcuaguaauacuacugguauuagcacuguucaauuga

SEQ ID NO: 5978 - RNA, 1101 nt, Artificial Sequence
  derived and/or modified CDS sequence (opt11) from Pk(TB049)__AFG25474.1__CSP
augaggaacuucauacugcuagcgguaucaagcauacugcugguagaccuacuaccaacgcacuuugaacacaacguggaccuaagcagggcaauaaacgugaacggggugagcuucaacaacguggacacgagcagccuaggggcagcacaaguaagacaaagugcaagcagggggagaggacugggagagaaaagaaaagagggagcagacaaggagaaaaagaaagaaaaggaagaggaaccgaaaaagccaaacgaaaacaaacugaaacagccaaacgcagagggaggggcaaacgcagggcaaccaaacgcggaaggaggggcgaacgcgggacagccgaacgcggaaggcggggcaaacgcagggcaaccaaaugcagaaggaggagcgaacgcggggcagccaaacgcagaaggaggggcgaaugcaggacaaccgaacgcagaaggaggggcgaacgcggggcaaccgaacgcagagggaggagcaaacgcaggacaaccgaacgcagaaggaggcgcaaacgcgagacagccgaacgcagagggaggggcaaacgcaggacaaccgaacgcggaagggggagcgaacgcgggacagccgaacgcggagggaggggcaaaugccaggcaaccaaacgcggaagggggagccaacgcgagacaaccaaacgcagagggaggagccaacgcagggcagccgaacgcggaagggggagcaaacgcgaggcaaccacaggcggagggaggaggagcgaacgcgcgacagggagggaacgaaggaaacaaacaagcaggaaaagggcaggggcaaaacaaccaaggagcgaacgcaccaaaugaaaaaguagugaacgacuacuugcagaagauaaggagcagcgugacaacagaguggacgccgugcagcgugacaugcggaaacggaguacgaauaagaaggagagcgcacgcggacaagaagaaggcggaggaccuaacaauggacgaccuagagguggaggcauguguaauggacaaaugcgcgggaauauucaacguaguaagcaacagccuagggcuaguaauacuacugguauuggcacuguucaacuag

SEQ ID NO: 5979 - RNA, 1101 nt, Artificial Sequence
  derived and/or modified CDS sequence (opt11) from Pk(TN024)__AFG25479.1__CSP
augagaaacuucauacugcuagcaguaagcaguauacugcuaguagaccuacuaccaacgcacuucgaacacaacguggaccuaagcagagcaauaaacguaaacggagugagcuucaacaacguggacacaaguagccugggggcggcccaagugagacaaagugcgagcagagggagaggccugggagaaaggaggaaagaaggagcggacaaagagaaaaagaaagaaaaagaagaggagccgaagaaaccaaaugaaaacaaacugaaacaaccaaacgcggaagggggagcgaacgcagggcaaccaaacgcagaaggaggggcgaacgcagggcaaccgaacgcggagggaggagcaaacgcggggcagccgaacgcggaaggaggagcaaacgcagggcaaccaaacgcggaaggaggggcaaacgcggggcaaccgaacgcagagggaggcgcaaacgcggggcagccaaacgcagagggaggggcaaacgcggggcaaccgaacgcggaaggaggggcaaacgcgagacaaccaaacgcagagggaggggcaaacgcggggcaaccaaacgccgagggaggggcaaacgcaggacaaccaaacgccgagggaggggcaaacgcaagacaaccgaacgcagaaggaggggcaaacgcaaggcagccaaacgcagaagggggagcaaacgcggggcaaccgaacgcggaaggaggagcaaacgcaaggcaaccacaagcagaaggaggaggggcaaacgcaagacagggagggaaugaagggaacaaacaagcgggaaaaggacaaggacaaaacaaccagggagcgaacgcaccaaacgaaaaaguaguaaacgacuaccuacagaaaauaaggagcaguguaacgacggaauggacgccaugcagcguaacaugcggaaacggaguaaggauaagaaggagagcgcacgcggacaaaaagaaagcagaagaccugacgauggacgaccuagaaguggaagcaugcguaauggacaaaugcgcaggaauauucaacgugguaagcaacagccuggggcugguaauacugcuaguacuagcacuauucaacuga

SEQ ID NO: 5980 - RNA, 1095 nt, Artificial Sequence
  derived and/or modified CDS sequence (opt11) from Pk(KH369)__ADN94494.1__CSP
augaaaaacuuuauacucuuggcaguaagcucaauccuacuaguagaccuguucccgacccacuucgaacacaacguggaccuaucaagagcaaucaacgucaacggcgugagcuucaacaacguagacacaucaagccuaggcgcagcccagguaagacaaucggccagccgagggcgcggacucggagaaaaaccaaaagaaggagccgacaaagaaaaaaaaaaagaaaaagaagaaccgaaaaaacccaaugaaaacaaauuaaaacagccccaagcagaaggcgacggagcgaacgcaagacaaccacaagccgaaggcgauggcgcaaacgcgcgccagccacaggccgaaggagacggcgcgaacgcgagacaaccacaggccgaaggcgacggcgcaaacgcaagacaaccccaagcagaaggcgacggagcgaacgcaagacaaccccaagccgaaggcgacggcgcaaacgcgcgacaaccccaagcagaaggggacggagcaaacgcaagacaaccccaagccgagggagacggagcaaacgcgagacaaccccaagcagaaggagacggggcaaacgcaagacaaccacaagcagagggcgacggagcaaacgcacgccaaccccaggccgagggaggaggagcgaacgcgagacaaccccaggcagaaggggauggcgcaaacgcaagacaaccccaagcccaaggcgacggagggaacgcaagacaaggcgggaacggaggaggagcaccggccgggggcaacgaaggaaacaaacaagcaggaaagggccagggccaaaacaaucaaggagcaaacgccccaaacgaaaaaguagucaacgacuaccuacaaaaaauacgcaguagcguaacgacggaauggaccccaugcucggucacgugcggaaacggggucaggaucaggagaagggcacacgcagauaaaaaaaaagcagaagaccugacgauggacgaccuggaaguggaagcgugcguaauggacaaaugcgcaggaauauucaacguaguaucgaacucgcugggacucguaauccugcucguacuggcgcucuucaacuaa

SEQ ID NO: 5981 - RNA, 1095 nt, Artificial Sequence
  derived and/or modified CDS sequence (opt11) from Pk(LT48)__ADN94507.1__CSP
augaagaacuucauacuucuagccguaagcucaauccugcucguagaccugcuaccaacacacuucgaacacaacgucgaccucagcagagcaauaaauaucaacggaguaagcuucaacaacgucgacaccagcagcuugggagcagcccaggugagacaaucagcaucacgcggaagaggacuaggggaaaaacccaaagaaggagccgacaaagaaaaaaaaaaagaaaaagaagaaccaaaaaaacccaacgaaaacaaauuaaaacagccccaagccgaaggcgacggagcgaacgcacgacagccgcaagccgaaggagacggcgcgaacgcgaggcagccccaagccgaaggcgacggagcgaacgcgcgacaaccacaagcggaaggagacggcgcaaacgcacgacaaccccaagcagaaggagacggggcaaacgcacgccagccacaagccgagggcgacggcgcaaacgcacgccaaccacaagcagaaggcgacggagcgaacgcacgacaaccacaagccgaaggagauggcgcaaacgcacgccaaccacaggcagaaggcgacggagcaaacgcaagacaaccacaagccgaaggagacggagcaaacgcaagacaaccacaagcagaaggaggaggcgcaaacgcgcgacaaccccaggccgaaggcgacggagcaaacgcgcggcaaccccaggcacaaggcgacggaggaaacgcacgacaaggcggaaacggaggaggagccccggccgggggcaacgaaggaaacaaacaagcgggcaagggacagggccaaaacaaccaaggagcaaacgccccgaacgaaaaaguagucaacgacuaccuccaaaaaauacgcucaagcgugaccacagaauggacaccgugcucgguaacaugcggaaacggagucagaauaagacgcagagcccacgccgacaaaaaaaaagcagaagaccucacaauggacgaccuagaaguggaagcaugcguaauggacaaaugcgcaggaauauuuaacguaguaucaaacucgcuagggcuaguaaucuuacucguacuagcgcuauucaacuaa

SEQ ID NO: 5982 - RNA, 1092 nt, Artificial Sequence
  derived and/or modified CDS sequence (opt11) from Pk(LT22)__ADN94522.1__CSP
augagaaacuuuauacugcuggcggugagcagcauacuauuaguagaccuacugccaacacacuuugaacacaacguagacuugagcagggcgauaaacgugaacggggugagcuucaacaacguagacacaagcucguuaggggcagcgcagguaagacagagcgcaagcaggggaagaggguuaggggagaagaggaaagagggagcugacaaggaaaagaagaaagaaaaagaagaggaaccgaaaaagccaaacgaaaacaagcugaaacagccagaccaagcggggccgggaggagaacaggcagggccaggaggagagcaggcaggaccgggaggggaacaggcagggccgaggccagggggagagcaagcaggaccgggaggggagcaggccgggccgagaccgggaggagagcaagcgggaccgggaggggagcaagcaggaccgaggccgggaggggaacaggcgggaccgggaggagagcaggcagggccagggggagagcaggcgggaccgagaccagggggagagcaggcggggccagggggagagcaggcggggccgaggccgggaggagaacaagcaggaccagggggagaacaggcaggaccgaggcccggaggagaacaggcgggaccgggaggagaacaaccagcaccaagaccgggaggggagcagccagcgccagcgccaaggagagagcaaccggcgccagcgccgggaggggagcagccggcgccaggggcaggggcaggggauggggcacgaggagggaacccgggggcggggaaggggcaggggcagaacaaccagggggcaaacguaccaaacgagaaaguaguaaacgauuaccugcacaagauacgaagcagcgugacgacggaauggacgccgugcaguguaacgugugggaacggggugaggauaagaagaaggcagaacgccgggaacaagaaagcagaagacuugacgauggacgaccuggaaguggaggcgugcgugauggauaaaugugcagggauauucaacgugguaagcaacagccuagggcuggugauauugcuaguacuagcgcuauucaacuag

SEQ ID NO: 5983 - RNA, 1092 nt, Artificial Sequence
  derived and/or modified CDS sequence (opt11) from Pk(UM0020C1)__AHF20649.1__CSP
augaaaaacuucauacucuuagccguaagcucgauccugcuaguagaccuacuaccgacccacuucgagcacaacgucgaccucucacgcgcaauaaacguaaacggcguaagcuucaacaacguagacaccucgagccuaggcgcgagccaagugagacaaagcgcaucacgcggaagaggacuaggagaaaaacccaaggaaggggccgauaaagaaaaaaaaaaagaaaaagggaaagaaaaagaggaggagccaaaaaaaccaaacgaaaacaaacugaaacaaccaaacgaaggacaaccacaagcccaaggagacggcgcgaacgcaggccaaccccaagcacaaggcgacggagcaaacgcgggccagccacaagcccaaggcgacggagcaaacgcaggccaaccgcaggcccaaggcgacggcgcaaacgcaggccaaccacaagcacagggcgacggagcaaacgcgggccaaccccaagcccaaggcgauggagcaaacgcgggacaaccccaagcacaaggagacggcgcaaacgcgggacaaccccaggcacagggcgacggcgcgaacgcaggccaaccccaagcacaaggagacggcgcaaacgcaggacaaccacaagcccaaggagauggagcaaacgcgggccaaccacaagcgcagggagaccgcgcgaacgcgggacaaccccaggcccaaggagacggagcaaacguacccagacaaggacgaaauggcggaggcgcgcccgcaggcgggaacgaaggcaacaaacaggcaggaaaaggacaaggacaaaauaaccagggagcgaacgcacccaacgaaaaaguggugaacgacuaccuacacaaaauaagaagcucaguaacgacagaauggacaccaugcagcguaaccugcggaaacggcguacgcauaagaaggagacaaaacgcaggaaauaagaaagccgaagacuugacaauggacgaccuagaagucgaggcaugcgucauggacaaaugcgcaggaauauucaauguagugagcaacagcuuaggacuaguaauacuccugguccuagcccuauucaauuaa

SEQ ID NO: 5984 - RNA, 1092 nt, Artificial Sequence
  derived and/or modified CDS sequence (opt11) from Pk(UM0020C3)__AHF20650.1__CSP
augaaaaacuucauacuuuuagccguaagcucaauccuacuaguagaccugcuaccaacacacuucgaacacaacguagaccuaucaagagcaaucaacgucaacggaguaggcuuuaacaacgucgacaccagcagccugggcgcaagccaagucagacaaucggccagccgcggacgcgggcucggagaaaagcccaaagaaggggcagacaaagagaaaaaaaaagagaaaggaaaagaaaaagaagaagaaccaaaaaaaccgaacgagaacaaacugaaacaaccgaacgaaggacaaccccaagcacaaggcgacggcgcaaacgcaggacaaccacaagcccaaggcgacggagcaaacgcaggccagccacaagcccaaggagacggagcaaacgcaggacaaccccaagcccaaggcgacggcgcaaacgcaggccaaccgcaggcgcagggcgauggcgcgaacgcaggccagccccaagcccaaggcgacggggcaaacgcaggccaaccccaagcccagggcgauggcgcaaacgcaggacaaccccaagcccaaggagacggcgcaaacgcgggccaaccacaagcacaaggcgacggagcaaacgcaggacaaccccaagcacaaggagacggagcaaacgcaggacagccccaggcacaaggagaccgcgcaaacgcaggacagccccaagcccaaggcgacggcgcaaacguacccagacaaggacgcaacggcggaggagcaccagcaggaggaaacgaaggaaacaaacaagcagggaaaggacaaggacaaaacaaccaaggcgcgaacgccccaaaugaaaaaguaguaaacgacuaccuacacaaaaucagaagcucggucacaacagaauggacgccaugcagcguaaccugcgggaacggcguacgcauccgaaggaaagcacacgcaggcaauaaaaaagccgaggaccuaaccauggacgaucucgaaguagaagccugcguaauggacaagugcgcaggcauauucaaugucguaagcaacagccuaggcuuagucauacuccuaguacuagcacuauucaauuaa

SEQ ID NO: 5985 - RNA, 1092 nt, Artificial Sequence
  derived and/or modified CDS sequence (opt11) from Pk(UM0021C19)__AHF20668.1__CSP
augaggaacuucauccuacuggcaguaagcaguauacuacugguagaucuguuuccaacacacuuugaacauaacguggaccugagcagggcaauaaacgugaacggggugagcuucaacaacguggacacaaguagccuaggggcagcgcaagugaggcagagcgcgagcaggggaaggggacugggggagaaaaggaaagaaggagcagacaaggaaaagaaaaaggaaaaggaagaggagccgaaaaagccaaacgaaaacaaauuaaaacagccagaucaagcggggccgggaggggagcaggcgggaccaggaggagagcaagcggggccaggaggggaacaggcggggccagggggagagcaagcgggaccgagaccgggaggagagcaggcagggccgggaggggagcaggcgggaccgaggccgggaggggaacaggcggggccgaggccgggaggggagcaggcagggccgagaccgggaggagaacaggcagggccaggaggagagcaagcggggccgggaggggaacaggcagggccagggggagagcaggcggggccgaggccaggaggggaacaggcggggccaggaggggaacaggcgggaccuaggccgggaggggaacaggcgggaccagggggagagcaaccggcaccgagaccgggaggggaacagccagcgccagcgccgaggagggagcaaccagcgccagggccaggaggggaacaaccagcgccgggggcaggagcaggggacggggcaaggggcggaaacccaggagcagggaagggacagggacagaacaaucaaggggcgaauguaccgaacgagaaagugguaaaugacuaucuacauaaaauaaggaguagcgugacaacagaauggacaccgugcagcguaacaugcgggaacgggguaaggauaagaaggagacagaaugcagggaacaagaaagcggaagaucuaacgauggacgacuuagaaguggaagcaugcguaauggacaaaugcgcggggaucuuuaacguaguaagcaacagccuagggcuaguaacacugcuggugcuagcgcuguuuaacuag

SEQ ID NO: 5986 - RNA, 1092 nt, Artificial Sequence
  derived and/or modified CDS sequence (opt11) from Pk(UMGAC7)__AHF20617.1__CSP
augaaaaacuucauacuccuagccguaagcucaauacuacucguagaccuacucccaacacacuucgaacacaacguagaccuuucaagagcaaucaaugucaacggaguaagcuucaacaacguagacaccagcagccucggcgcagcacaagucagacaaagcgccucacgaggacgcggacuaggagaaaaaccaaaagaaggagccgacaaagaaaaaaaaaaagaaaaaggaaaagagaaagaagaagaaccaaagaaaccaaacgaaaacaaacuaaaacagccaaacgagggccagccccaggcccaaggcgacggagcgaacgcaggacaaccccaagcacaaggagacggagcaaacgcagggcaaccccaagcgcagggcgauggagcgaacgcaggccaaccacaagcacaaggggacggcgcaaacgcaggccaaccccaagcccaaggcgacggcgcaaacgcaggacagccacaagcccaaggcgacggcgcaaacgcaggacaaccccaagcccaaggagacggagcaaacgcgggccaaccccaagcacagggcgacggagcaaacgcaggccaaccacaagcccaaggagacggagcaaacgcaggccaaccacaagcccaaggcgacggcgcgaacgcgggacaaccacaagcccaaggcgaccgagcaaacgcaggacaaccacaagcccaaggcgauggcgcaaacguaccaagacaaggaagaaacggaggaggagcccccgcuggcggaaacgaaggcaauaaacaagccggaaaaggacaaggacaaaacaaccaaggagcaaacgcgcccaacgaaaaagucgugaacgacuaccuacacaaaauacggagcucaguaacgacagaauggacgccauguagcguaaccugcgggaauggagugcgcauacgcaggaaagcacacgcaggaaacaaaaaggcagaagaccuaacaauggacgaccuagaagucgaagccugcguaauggacaaaugcgcaggaauauucaauguaguaagcaacagccucggccuagucauacuccuaguacccgcccucuucaacuaa

SEQ ID NO: 5987 - RNA, 1092 nt, Artificial Sequence
  derived and/or modified CDS sequence (opt11) from Pk(UMMK566C6)__AHF20670.1__CSP
augaaaaacuucauacugcuagcaguaagcagcauacugcuaguggaccuacuaccaacacacuucgaacacaacgucgaccucagcagggcaaucaacgugaacggaguaucauucaacaacguagacaccagcagcuuaggagcggcccaagucagacaaagcgcaucaaggggaagaggacugggagaaaaaccaaaggaaggagccgacaaagagaaaaagaaagaaaaaggaaaagaaaaagaaggcgaacccaaaaagccgaacgaaaacaaacucaaacaaccaaacgaaggccaaccgcaggcacaaggagacggagcaaacgcaggacaaccacaagcacagggagacggagcaaacgcgggacaaccccaagcgcaaggagacggagcgaacgcaggccaaccccaagcacaaggcgacggggcgaacgcaggacaaccacaagcccagggagacggagcaaacgcaggacaaccacaggcacaaggagacggagcaaacgcagggcaaccacaagcccaaggagacggagcgaacgcaggccaaccacaagcacaaggggacggcgcaaacgcaggccaaccacaagcacagggagacggagccaacgcaggccaaccacaagcccaaggagacggagcaaacgcaggacagccacaagcacaaggagacagagcaaacgcaggacaaccacaggcacagggcgacggggcaaacgugccaaggcaagggagaaacggaggaggagcgcccgcaggaggaaacgaaggaaacaaacaagcaggaaaaggacaaggacaaaacaaccagggcgcaaacgcaccgaacgaaaaaguagugaacgacuaccuacacaaaauaagaagcagcgucacaacagaauggacgccaugcagcguaacaugcggaaacggaguaagaauaagaagaaaagcacacgcagggaacaaaaaggcagaagaccuaaccauggacgaccuagaaguagaagcaugcguaauggacaaaugcgcaggcauauucaacguaguaagcaacagccuagggcuagucauacuacugguccuggcauuauucaacuaa

SEQ ID NO: 5988 - RNA, 1089 nt, Artificial Sequence
  derived and/or modified CDS sequence (opt11) from Pk(UMGAC1)__AHF20615.1__CSP
augaaaaacuucauacuacuggcaguaagcagcauacuacuaguagaccuacuaccgacacacuuugaacacaacguagaccuaagcagggcaauaaacguaaacggggucagcuucaacaacguagacacaagcagccucggggcagcacaaguacggcaaagcgcgagcaggggcagaggccuaggagaaaaaccaaaagaaggcgcagacaaagagaaaaaaaaagaaaaaggaaaagaaaaagaagaaccaaagaaaccaaacgaaaacaagcuaaaacaaccaaacgaaggacagccccaggcacaaggagacggagcaaacgcaggacaaccacaggcgcaaggcgacggggcaaacgcaggacaaccacaagcacaaggcgacggagcaaacgcaggacaaccacaagcccaaggcgacggagcaaacgccggccaaccacaagcacaaggagacggagcgaacgcgggccagcccagggcacaaggagacggcgcaaacgcaggacagccccaagcacaaggcgacggagcaaacgcaggccaaccccaagcacaaggagacggagcaaacgcaggacagccacaagcccaaggagacggcgcaaacgcaggacaaccccaagcacaaggagacggagcaaacgcaggacaaccacaggcacaaggagaccgagcgaacgcgggacaaccgcaagcacaaggagacggcgcaaacguaccaagacaaggaagaaacggagggggagcacccgcgggaggaaacgaaggcaacaaacaggcagggaaaggacaagggcaaaauaaccagggagcaaacgcgccaaacgaaaaagucguaaacgacuaccuacacaaaauaagaagcucaguaacgacagaauggacaccgugcagcgugacaugcgggaauggggugagaauaaggagaaaagcgcacgcaggaaacaaaaaagcagaagaccugacaauggacgaccucgaaguagaagcaugcgucauggacaaaugcgcaggaauauucaacguaguaagcaacagccuaggacuaguaauacuacuaguacuagcccuauucaacuga

SEQ ID NO: 5989 - RNA, 1086 nt, Artificial Sequence
  derived and/or modified CDS sequence (opt11) from Pk(NB032)__AFG25470.1__CSP
augaaaaauuucauacuguuagcagugagcagcauacuacucguggaccuguucccgacacacuucgaacacaacguagaccuaagcagggcgauaaacguaaacggagugagcuucaacaacguagacacgagcagccugggagcggcacagguaagacaaagcgcaucacgaggaagaggacugggagagaagccaaaggaaggagccgacaaagagaaaaagaaagagaaagagaaagagaaagagaaagaagaggaaccaaagaaaccgaacgagaacaagcuaaaacaaccggaaggaaaccaggacggaagggcacaaccagagggaaaccaggacgggagagcgcagccagaagggaaccaagacgggagagcacaaccggaaggaaaccaggacgggagagcgcaaccggaagggaaccaggacggacgagcgcaaccggaagggaaccaagacgggcgagcgcaaccggaagggaaccaggacggaagggcacaaccagaagggaaccaagacgggagagcacagccagaaggaaaccaggacgggagagcgcaaccggagggaaacagagaagcaccagcgcaaccgcaaggcaacgggggagcaggacaggcacagcccgagggcaacagagaggcgccggcacaaccacagggaaacggaggggccgggcaagcacaaccagaaggaaaccgggaagcaccagcacaaccgcaagggaacggaggcgcaggccaggcacagccgcagaaaaacgaaggagggaacgcaggagccagaaaagggcaaggacaaaacaaccagggggcaaacgcaccaaacgaaaaggugguaaacgacuaccugcacaaaaucagaagcagcguaacaacagaguggacaccgugcagcgugaccugcggaaacggagugcggauaagaagaaaagcgcacgcagacaaaaagaaagcagaggaccuaacaauggacgaccucgaagucgaggccugcgucauggacaaaugcgccggaauauucaacguaguaagcaacagcuuagggcuaguaauacuacugguccuagcacuguucaacuaa

SEQ ID NO: 5990 - RNA, 1083 nt, Artificial Sequence
  derived and/or modified CDS sequence (opt11) from Pk(UM002C4)__AHF20639.1__CSP
augaaaaacuucauacugcuagcggugagcaguauauuauuaguagaccugcugccgacauauuucgagcauaacguggaccuaagcagagcaauaaacguaaacggagugagcuucaauaauguagacacaaguagccuaggagcggcgcaaguaagacaaagcgcaagcagaggaagaggccuaggagagaagccaaaggaaggggcagacaaggaaaagaagaaagaaaaagaaaaagaaaaagaggaggaaccgaaaaagccaaacgaaaacaaguugaaacaaccagaggggaacggaggagcaggaccagcacagccagagggaaacggaggagcaggaccagcgcagccagaaggaaacggaggagcaggaccggcacagccagagggaaacggaggggcgggaccggcgcaaccagaaggaaacggaggagcagggccggcgcagccggaaggaaacggaggggcagggccagcgcagccggaggggaacggaggggcaggaccggcacagccggaagggaacggaggggcgggaccggcacagccagaaggaaacgggggagcggggccggcgcagccagaaggaaacggaggagcggggccggcacaaccgcaagggaacggaggggcagggccggcacagccacaagggaacggaggggcagggccagcgcagccgcagggaaacggaggagcgggaccggcacaaccgcagggaaacggaggggcagggcaagcacaaccgcagaaaaacgaaggaggaaacgcaggggcaagaaaagggcaagggcaaaacaaccaaggggcgaaugcgccgaacgaaaaaguaguaaacgacuaccuacaaaagauaaggagcagcguaacaacagaauggacgccgugcucaguaacaugcggaaacgggguaaggauaaagcggagagcgcaugcggacaaaaagaaggcagaggaccuaacgauggacgaccuagaaguggaagcaugcguaauggacaaaugcgcgggaauauucaacgugguaaguaacagccuagggcuagugauacuacugguacuggcguuauucaacuaa

SEQ ID NO: 5991 - RNA, 1080 nt, Artificial Sequence
  derived and/or modified CDS sequence (opt11) from Pk(CDK162)__ADN94495.1__CSP
augcgaaacuucauacuacuagcaguaagcucaauccuacuaguggaccuacucccgacacacuucgaacacaacgucgaucugucaagagcaauaaacguaaacggcguaagcuucaacaacguagacaccagcagccugggcgcggcacaaguaaggcaaucggccagccgcggacgaggacucggggaaaaaagaaaagaaggagccgacaaagaaaaaaaaaaagaaaaagaagaagaacccaaaaaaccaaacgaaaacaaacucaagcaaccaaacccggaccaaccccaagcccaaggagacggcgcaaacgcgggacaaccccaggcccaaggagacggcgcaaacgcaggccaaccacaagcacaaggagacggcgcaaacgcaggccagccccaagcacaaggagacggcgcgaacgcaggccaaccacaggcccaaggagacggcgcaaacgcaggccaaccccaagcccaaggagacggcgcaaacgcaggccagccacaagcccaaggagacggcgcaaacgcaggccagccccaagcccaaggagacggagcgaacgcaggccagccccaagcacagggagacggagcaaacgcaggacaaccacaagcccaaggagacggcgccaacgcgggacaaccacaagcacaaggcgacagagcgaacgcaggacagccacaagcccaaggugacggcgcaaacguacccagacaaggaagaaacggagggggagcacccgcaggcgggaacgaaggcaacaagcaagcaggaaaaggacaaggacaaaacaaccagggcgcaaacgcaccgaacgaaaaagucguaaacgacuaccuacacaaaaucaggagcucaguaacaacagaauggacgccgugcagcgugacaugcggcaacggggugcgcauacgcagaagacaaaacgcaggaaacaaaaaagcagaggaccugaccauggacgaccuagaagucgaagcaugcgucauggacaaaugcgcaggaauauucaacgucgugagcaacagccuaggacuaguaauccuacuaguccucgcccuauucaacuga

SEQ ID NO: 5992 - RNA, 1080 nt, Artificial Sequence
  derived and/or modified CDS sequence (opt11) from Pk(KN010)__AFG25463.1__CSP
augagaaacuucauacuccuggccguaagcagcauacuacucguagaccuacuaccaacacacuucgaacacaacgucgaccuaagccgagcgauaaacguaaacggagugagcuucaacaauguagacaccucaagccuaggagcggcccaagucagacagucagccagccgcggaagagggcuaggggaaaaacgaaaagaaggagccgacaaagaaaaaaaaaaagaaaaagaagaagaaccaaaaaaaccaaacgaaaacaaacucaaacaaccaaacccggaccaaccccaagcacaaggagacggagccaacgcaggacaaccccaagcccagggagacggcgcaaacgcaggccaaccccaagcgcaaggcgacggagcgaacgcgggacaaccacaggcgcaaggagacggagcgaacgcaggacagccacaagcccaaggcgacggcgcgaacacgggccaaccacaagcacaaggcgacggagcaaacgcaggacaaccccaagcccaaggagacggagcaaacgcgggacagccccaagcacagggagacggcgcaaacgcaggacaaccccaagcccaaggagacggcgcaaacgcaggacagccacaggcacaaggcgacggagcgaacgcaggccaaccccaagcacaaggcgacagagcaaaugcaggacaaccacaagcacaaggagacggcgcgaacguaccaagacaaggacgcaacggaggaggagcgcccgcaggaggaaacgagggaaacaaacaagccgggaaaggacaaggacaaaacaaccagggagcaaacgcgcccaacgaaaaaguagugaacgacuaccuacacaagaucagaagcucagugacggcagaauggacaccgugcagcguaaccugcggaaacggcguacggauaagaagaaaagcacacgcagggaacaaaaaagcagaggaccucacgauggacgaccuggaagucgaggccugcgucauggacaaaugcgcaggaauauucaacgucguaagcaacagcuuaggccuagucauacuacuaguccuagcacuauucaacuaa

SEQ ID NO: 5993 - RNA, 1080 nt, Artificial Sequence
  derived and/or modified CDS sequence (opt11) from Pk(KN013)__AFG25464.1__CSP
augagaaacuucauacuccuagcaguaagcagcauccuacucguggaccuacuaccaacccacuucgaacauaacgucgaccuaucgcgcgcaauaaacgucaauggagucagcuucaacaacguagacacaucaagccugggcgcagcacagguaagacaaucggcaucacgagggcgcggacuaggagagaaaaggaaagaaggcgcagacaaagagaaaaagaaagaaaaagaagaagaacccaagaaaccaaacgaaaacaaacucaaacaaccaaacccaggacaaccccaagcacaaggcgacggagccaacgcaggccaaccccaagcccagggagacggcgcaaacgcaggacaaccccaggcacaaggcgacggagcaaacgcaggacagccacaggcacagggcgacggcgcaaacgcagggcaaccacaagcacaaggcgauggagcaaacgcaggacaaccccaagcacaaggcgacggcgcaaacgcaggccaaccacaagcacaaggcgacggcgcaaacgcaggccagccacaagcccaaggcgacggcgccaacgcaggccaaccacaagcacaaggagacggcgcgaacgcaggacagccacaagcccaaggcgacggcgcgaacgcaggacaaccccaagcacaaggagaccgcgcgaacgcgggacaaccacaagcacaaggcgauggcgcgaacgugccccgacaaggacgaaacggagggggcgcaccagcgggaggaaacggaggaaacaaacaggccggaaaggggcaaggacaaaacaaccaaggcgcaaacgcaccaaacgaaaaaguaguaaacgacuaccuacacaaaaucagaagcucaguaacaaccgaauggacacccugcagcguaacaugcggaaacggcguacgaauacgaagaaaagcgcacgcaggcaacaaaaaggccgaagaccugacaauggacgaccucgaagucgaggccugcgucauggacaaaugcgcaggcauauucaauguagugagcaacagccuaggccuagucauacuacugguccuggcacuguucaacuga

SEQ ID NO: 5994 - RNA, 1080 nt, Artificial Sequence
  derived and/or modified CDS sequence (opt11) from Pk(LT57)__ADN94508.1__CSP
augaaaaauuucauacuacuagccgugaguagcauccugcuaguggaccuguucccaacacacuucgagcacaacguggaccuaucgagggcgauaaacguaaacggagugagcuuuaacaacgucgacacaagcagccugggagcggcacagguaaggcaaucggcaucaagagggcgaggacugggagaaaagccgaaggaaggggccgacaaagagaaaaagaaagagaaagagaaagagaaagaggaggaaccaaagaaaccaaacgagaacaagcuaaagcaaccggaagggaaccaggacggacgcgcgcaaccggaggggaaccaagacgggagagcgcaaccagaaggaaaccaggacgggagagcgcaaccagaagggaaccaagacgggagagcgcaaccggaaggaaaccaggacgggagagcgcaaccagaagggaaccaggacggacgggcgcaaccagaggggaaccaggacgggagagcgcaaccagaagggaaccaggacgggagagcacaaccggaagggaaccaggacgggagagcgcaaccagaggggaacagggaagcaccagcgcaaccgcaagggaacgggggcgcgggacaggcacagcccgaaggaaacagagaggccccggcacagccacagggcaauggaggagcagggcaagcgcaaccggaagggaacagggaagcgccagcgcaaccacaagggaacgggggagcgggacaggcccagccacagaaaaaugaagggggaaacgcgggagcaaggaaagggcaaggacagaacaaccaaggcgcaaacgcgccaaacgaaaagguagugaacgacuaccuacacaaaauaagaagcagcgugacaacagaguggacgccauguagcgugacgugcggaaacggggugagaauaagaaggaaagcacacgcggacaagaaaaaggcagaggaccugacaauggacgaccuagagguagaagcaugcguaauggacaagugcgcgggcauauucaacgucguaagcaacagccugggauuggucauccuauuaguacuagcacuguucaacuga

SEQ ID NO: 5995 - RNA, 1080 nt, Artificial Sequence
  derived and/or modified CDS sequence (opt11) from Pk(NB046)__AFG25471.1__CSP
augagaaacuucauacuacuagcaguaagcucaauauuacuaguagaccuccuaccgacacacuucgaacacaacgucgaccuaucaagagcaauaaauguaaacggcgugagcuucaacaacguagacacaaguagccuaggcgcggcccagguaagacaaagcgcaagccgcgggcgcggacucggagaaaaacgaaaagaaggagcagacaaagaaaaaaaaaaagaaaaggaggaagaacccaaaaaaccaaacgaaaacaaacuaaagcaaccaaacccagaccaaccacaagcgcaaggagacggagcaaacgcaggacagccccaagcacaaggagacggcgcaaacgcaggacaaccacaagcccaaggagacggagcaaacgcgggacagccccaagcacaaggcgacggcgcgaacgcaggccaaccacaagcgcagggcgacggcgcaaacgcaggacaaccacaagcccaaggcgacggagcgaacgcaggacagccacaagcccaaggagacggagcaaacgcagggcaaccacaagcccaaggcgacggcgcaaacgcaggacaaccccaagcccaaggagacggagcaaacgcaggacaaccccaagcacagggagacggagccaacgcaggacaaccccaagcccaaggagaccgcgccaacgcaggccaaccacaagcacagggagacggagcaaacgugcccagacaaggacgcaacggaggaggggcacccgcaggaggaaacgaaggcaacaaacaagccggaaaaggacaaggacaaaacaaccaaggagccaacgcaccaaacgagaaagucgugaacgacuaccuacacaaaaucagaagcagcguaacaacagaauggacgcccugcagcguaaccugcggaaacggaguacgcauaagaagaaaagcacacgcgggaaacaaaaaagcagaagaccugaccauggacgaccucgaggucgaagcaugcgucauggacaaaugcgcaggaauauucaacgucguaagcaacagccugggccuagucauacuacuaguccuagcgcuguucaacuga

SEQ ID NO: 5996 - RNA, 1080 nt, Artificial Sequence
  derived and/or modified CDS sequence (opt11) from Pk(TN023)__AFG25478.1__CSP
augcgcaacuucauacuacuagcaguaagcagcauacuacuaguagaccuacugccaacacacuucgaacacaacguagaccuaagcagagcaaucaacgucaacggaguaagcuucaacaacguagacauaucaagcuuaggcgcagcccaagucaggcaaagcgccagcagaggaagaggacucggagaaaaaagaaaagaaggagcagacaaagaaaaaaaaaaagaaaaagaagaagagcccaaaaagccaaacgaaaacaaacuaaaacaaccgaacccagaccagccacaagcccagggagacggagcaaacgccggccaaccacaagcccagggagacggcgcaaacgcaggacaaccccaggcccagggagacggcgcaaacgcaggacaaccacaagcacaaggcgacggcgcaaacgcaggacaaccacaagcacagggggacggagcaaacgcgggacagccacaagcccaaggcgacggcgcaaacgcaggacaaccacaggcccaaggcgacggcgcaaacgcaggacaaccacaagcacaaggcgacggagcaaacgcaggccaaccacaagcacagggcgacggagcaaacgcaggccaaccacaagcacaaggggacggagcaaacgcaggccaaccacaggcacaaggagaccgagcgaacgcaggacaaccccaagcacaaggagacggcgcaaacguaccgcgacaaggacgcaacggcggaggcgcacccgcaggcggaaacgaaggaaacaaacaagcaggaaaaggccaaggacaaaacaaccaaggagcaaacgcaccaaacgaaaaaguaguaaacgacuaccuacacaagaucaggucaucagugacaacagaauggacacccugcagcguaacgugcggaaacggaguaagaauaagaagaaaagcgcacgcaggaaacaaaaaagccgaagaccuaacaauggacgaccuagaaguagaagcaugcgugauggacaaaugcgcaggcauauucaacgucguaagcaauagccuaggacuaguaauacuacuaguacuggcacuauucaacuaa

SEQ ID NO: 5997 - RNA, 1080 nt, Artificial Sequence
  derived and/or modified CDS sequence (opt11) from Pk(UM0016C2)__AHF20663.1__CSP
augaaaaacuucauacuccuggccguaagcucaauacuauuaguggacuuauuaccgacacacuucgaacacaacgucgaccucagcagagcaauaaacgucaacggagugagcuucaacaacguagacaccucaagccuaggcgcggcgcaggucagacaaucggccagccgcggaagaggacuaggagaaaagcccaaggaaggggccgacaaagagaaaaagaaagagaaagaaaaagagaaagaggaggaacccaagaaaccgaacgagaacaagcuaaagcaaccggaaggaaaccaggacgggagagcacaaccggaagggaaccaagacgggcgcgcgcaaccggaagggaaccaggacgggagagcgcaaccggaaggaaaccaggacgggagagcacaaccggaagggaaccaggacggacgcgcgcaaccggaagggaaccaggacgggcgagcacaaccggaagggaaccaggacgggagagcgcaaccggaagggaaccaggacggacgagcgcaaccggaagggaaccaggacgggcgcgcgcaaccagaaggaaacagggaagcaccagcgcaaccacaaggaaacgggggcgcgggacaggcacagccagagggcaacagagaagcaccggcccaaccccaaggaaacggaggagcaggacaagcacaaccggaagggaacagggaagcgcccgcgcaaccgcaaggcaacgggggagcgggccaggcacagccacagaaaaacgaagggggaaacgcaggggccaggaaagggcaagggcaaaacaaccagggcgcgaacgcacccaaugaaaagguaguaaacgauuacuugcaaaagauaagaaguucggucacaacagaguggacgccaugcagcguaaccugcggaaacggagugcggauaagaaggagagcacacgcagacaagaaaaaggcagaggaccugacgauggacgaccuagaagucgaggccugcguaauggacaaaugcgcgggcauauucaacgucgugagcaacagccugggacuggucauacuucuaguacuggcacuuuucaacuaa

SEQ ID NO: 5998 - RNA, 1077 nt, Artificial Sequence
  derived and/or modified CDS sequence (opt11) from Pk(LT48)__ADN94519.1__CSP
augagaaacuucauacuccuagccguaagcucaauccuacuaguagaccuacuaccgacccacuucgagcacaacguagaccucagucgcgcaaucaacgucaacggcguaagcuucaacaacguagacaccucaagccugggcgcagcacaagucagacagagcgccucaagaggacgcggacuaggagaaaagagaaaagaaggagccgacaaagaaaaaaaaaaagaaaaagaagaagagcccaaaaaaccaaacgaaaacaaacucaaacaaccgaacccggaccaaccacaagcccaaggcgacggagccaacgcgggacaaccacaagcacaaggagauggcgcaaacgcagggcaaccacaagcccaaggcgacggagcaaacgcgggccagccacaagcccaaggagacggcgcaaacgcaggccaaccccaagcccaaggagacggcgcgaacgcgggccaaccccaagcccaaggagacggcgcaaacgcaggacaaccacaagcacaaggagacggagcaaacgcaggccaaccacaggcacagggcgacggcgccaacgcaggacaaccgcaggcacaaggagacggagcaaacgcaggacaaccacaggcacaaggagacggcgcaaacgcaggccaaccacaggcacagggagacagaggaaugcaagauaaccacaaacacaaagaaaugggccaaauguaucacgacaaagaagaaacaggcgaaguccaccaacaagaagagaugcgaggcauaaacaaacaagaaaaagcacgagacaaaacgaucagaguagaaugcccaaaagagaaaguaguaaacgacuaccuacacaaaauaagaagcagcguaacaacagaauggaccccaugcagcgucacaugcggaaacggaguaaggaucagacgaaaagcacacgcaggaaacaagaaagcagaggaccuaacgauggacgaccuggaaguggaagcgugcgugauggacaaaugcgcaggaauauucaacgugguaucaaacucccugggacuaguaauacuacucguacucgcacucuucaacuaa

SEQ ID NO: 5999 - RNA, 1077 nt, Artificial Sequence
  derived and/or modified CDS sequence (opt11) from Pk(SGEHIWM4-Y09-9)__AFD97223.1__CSP
augaagaacuucauacugcuggcgguaagcagcauacugcugguagaccugcuaccgacauacuucgaacauaacguagaccugaguagggcgauaaacgugaacggggugagcuucaacagcguggacacgaguaguuugggggcggcgcaagugagacagagugcgagcagggggaggggacuaggagagaagccgaaggagggagcggacaaggagaagaagaaggaaaaggagaaggaagaggagccgaagaagccaaacgagaauaagcuaaaacagccacaggggaacggaggggcagggcaggcacagccggaggggaacggaggggcgggacaagcgcagccagaagggaacggaggggcggggcaggcacagccggagggaaacggaggggcagggcaggcgcagccagaggggaacggaggggcggggcaagcacagccagaggggaaugggggagcgggacaggcgcagccagaggggaacggcggagcggggcaagcgcagccggagggaaauggaggggcggggcaggcacagccggaggggaauggaggggcggggcaggcgcagccggaggggaacggaggggcagggcaggcgcagccggagggaaacgggggagcggggcaggcgcagccagaggggaacggaggagcggggcaggcgcagccggagggaaacggaggggcggggcaagcacagccacaagggaacggaggggcggggcaggcgcagccgcagaaaaacgagggagggaacgccggggcgagaaaggggcaagggcaaaacaaccagggggcaaaugcgccgaacgagaagguagugaaugauuaccuacaaaagauaagaucaagcgugacgacggaguggacgccgugcagcguaacaugcgggaacggggugagaauaaggagaagggcgcacgcagacaagaaaaaggcagaggacuuaacgauggacgaccuagaaguagaggcaugcguaauggacaagugcgcggggauauucaacguaguaagcaacagccugggacuggugauccugcuggugcuagcgcuauucaacuga

SEQ ID NO: 6000 - RNA, 1071 nt, Artificial Sequence
  derived and/or modified CDS sequence (opt11) from Pk(LT15)__ADN94525.1__CSP
augagaaacuuuauacuacuggcgguaagcagcauauugcuaguggaccuacugccgacacacuucgaacacaacguagaucugagcagagcaauaaacguaaacggagugagcuuuaacaacguagacacaagcagcuuaggagcagcacaaguaagacaaagugcaagcagaggaagaggacugggagagaaaaggaaagaaggagcagacaaggaaaagaagaaagaaaaagaagaggagccgaaaaagccaaacgagaacaaacugaaacagccagaacaagcggcaccaggagcgggaggagaacagccagcaccaggagcaggaggagaacagccggcaccaggggccggaggagaacagccagcgccaggagcaggaggagaaaggccggcgccgggagcaggaggggagcagccggcacccggagcagggggagaacaaccagcaccaggggcaggaggggaaaggccagcaccaggggcaggaggggagcaaccagcaccaggggcaggaggggaacagccggcgccgggggcaggaggggaacagccagcgccaggggcaggaggagaacagccagcgccgggagcgggaggagagagaccggcaccaggagcaggaggagaaagacccgcgccaggagcaggaggggagcagccggcaccaggggcgggaggggaacagccagcgccagcaccaagaagggaacaaccagcaccaggaccaggggcgggggacggagcaagaggaggaaacgcgggagcgggaaagggacaagggcaaaacaaccaaggggcaaacguaccgaacgagaaaguaguaaacgacuaccuacacaagauaaggagcaguguaacgacagaguggacgccaugcagcguaacgugcgggaacggagugaggauaaggagaagacaaaacgcaggaaacaagaaagcagaagaccuaacgauggacgaccuagaaguagaggcgugcguaauggacaaaugcgcgggaauauucaacgugguaagcaauucacuaggauuggugauacuacugguacuggcacuauucaacuga

SEQ ID NO: 6001 - RNA, 1071 nt, Artificial Sequence
  derived and/or modified CDS sequence (opt11) from Pk(LT57)__ADN94503.1__CSP
augaagaacuucauauugcuagcgguaucgagcauacuccugguagaccuauuucccacgcacuucgaacacaacguggaccuaagcagggccauaaacgugaacgggguaucguucaacaacguggacacaagcagucucggagccgcacaagugagacaaagcgcgagcagaggaagggggcugggagagaaaccaaaagagggcgcggacaaagaaaagaaaaaggaaaaggaaaaagaggagccaaagaaaccgaacgaaaacaagcuaaaacaaccagaagggaaccaggacgggcgagcgcaaccggaagggaaccaggacgggagagcgcaaccggaaggaaaccaggacgggagagcacagccggaaggaaaccaggacgggcgagcgcaaccggaaggaaaccaagacgggagagcgcaaccggaagggaaccaagacgggcgagcgcaaccggaagggaaccaggacgggagagcgcaaccggaagggaaccaggacgggcgcgcgcaaccagaagggaaccaggacggacgagcacaaccggaaggaaacagggaagcgccagcgcaaccgcaaggaaacgggggagcgggacaggcacagccagagggaaauagagaggcaccggcccagccacagggaaacggaggggccggacaagcacaaccggaaggaaaccgggaggcacccgcgcaaccgcaagggaacggaggcgcaggacaggcccaaccccagaaaaacgaagggggaaacgccggggcaaggaaagggcaagggcaaaacaaccagggagcaaacgcacccaacgaaaagguagugaacgacuauuugcagaaaauaaggaguucagugacgaccgaguggacgcccugcagcguaacaugcggaaacggagugagaauaagaaggcgcgcgcacgcagacaagaaaaaggcugaggaccugacaauggacgaccuagaggucgaagcaugugucauggacaagugcgcgggaauauucaacgccgugaguaacagccugggauugguaauacuacugguccuggcgcuguucaacuaa

SEQ ID NO: 6002 - RNA, 1068 nt, Artificial Sequence
  derived and/or modified CDS sequence (opt11) from Pk(UMHIC2)__AHF20634.1__CSP
augaaaaacuucauacuacucgcgguaagcagcauacugcuaguggaccuacuaccgacacacuuugaacacaacguagaccuaagccgagcgauaaacguaaacggagugagcuucaauaacguagacacaagcagccuaggagcggcacaaguacggcaaagcgcaagcagaggaagaggacuaggggaaaaaccaaaggaaggagcagacaaagagaaaaagaaagaaaaagaaaaagaagaagaaccgaaaaagccaaacgaaaacaaacuaaaacaaccggaagggaacagagaagcaccggggcaaccagaagggaacagagaagcaccaggacaaccggaagggaaucgggaagcaccagggcaaccagaagggaacagagaagcaccaggacaaccagaaggaaacagagaagcaccaggacagccagaaggaaacagggaagcaccgggacaaccagaaggaaacagagaagcacccggacaaccagaaggaaaccgggaagccccgggacaaccagaaggaaacagagaagcgccaggacaaccagagggaaacagggaagcaccgggacaaccagaaggaaacagggaagcgccagcacaaccagaaggaaaccgggaagcgccggggcaaccagaaggaaacagggaagcaccagcacaaccagagggaaacagagaggcgccagcgcaaccacaaggaaacggaggggcgggacaagcacaaccacagaaaaacgaaggcggcaacgcaggagcaaggaaaggacaaggacaaaacaaccaaggagcgaacgcaccaaacgagaaaguagugaacgacuaccuacagaaaauacgaagcagcguaacaaccgaauggacaccaugcagcgucacgugcggaaacggaguaaggauaaaacgaaaagcgcacgcagacaaaaagaaagcagaagaccuaacaauggacgaccuggagguggaagcaugcguaauggacaaaugcgcaggaauauucaacgugguaaguaacagccugggacugguaauacugcugguacuagcacuauucaacuaa

SEQ ID NO: 6003 - RNA, 1068 nt, Artificial Sequence
  derived and/or modified CDS sequence (opt11) from Pk(UMHIC6)__AHF20635.1__CSP
augaaaaacuucauacuacuagcagucagcagcauacuacuugucgaccuacuaccaacacacuucgaacacaacgucgaccuaagcagagcgauaaacguaaacggagucagcuucaacaacguagacacaagcagccugggagccgcacaaguaagacaaagcgcaagcagaggaagaggccugggcgaaaaaccaaaagaaggagcggacaaagaaaagaagaaagaaaaagaaaaagaagaagaaccaaagaaacccaacgagaacaaacuaaaacaaccggaaggaaaccgagaagcaccaggacaaccggaaggaaacagagaagcaccaggacaaccagaaggaaaccgagaagccccgggccaaccagaaggaaacagagaagcaccaggacaaccagagggaaacagagaagcucccggacaacccgaaggcaaccgcgaagcgccgggacaaccagaagggaacagagaagcaccgggacaaccagaagggaacagagaagcaccaggacaaccagaaggaaacagagaagcaccaggccaaccagaaggaaacagagaagcaccaggacaaccagaaggaaacagagaagcgccgggacaaccggaaggaaaccgagaagcgccgggacaacccgaaggcaaccgagaagccccggcccaaccagaaggaaaccgagaagcgccagcacaaccccaaggcaacggcggagcagggcaagcacagccacagaaaaacgaaggaggaaacgcaggcgcacgaaaaggacaaggacaaaacaaccaaggcgccaacgcaccaaacgaaaaaguaguaaacgacuaccuacagaaaauaagaagcagcguaacgacagaauggacaccaugcagcgugaccugcggaaacggaguaagaaucaaaagaaaagcacacgcagacaaaaagaaagcagaagaccucacaauggacgaccuagaaguagaagcgugcguaauggacaaaugcgccggaaucuucaacguaguaucaaacagccuggggcuaguaauacugcuagugcuagcacuauucaacuaa

SEQ ID NO: 6004 - RNA, 1068 nt, Artificial Sequence
  derived and/or modified CDS sequence (opt11) from Pk(UMJUC1)__AHF20630.1__CSP
augaaaaacuucauacuauuagcaguaagcucaauacugcuaguggaucugcucccgacacacuucgagcacaacguagaccucagcagagcgauaaacguaaauggagugagccuaaacaacguggacacgagcagccugggagcagcgcaggucaggcaaagcgcaagcagagggagagggcuaggagaaaagccaaaggagggagcagauaaagagaagaagaaagaaaaagaaaaagaggaggagccaaagaaaccgaacgagaacaagcuaaagcagccggaagggaacagggaagcgccagggcaaccggaaggaaacagggaagcaccgggacaaccagaagggaaccgggaagcaccagggcaaccggaaggaaacagagaagcaccagggcaaccggaagggaacagagaagcgccagggcaaccggaaggaaacagagaagcaccagggcaaccagaaggaaacagggaagcgccagggcaaccggaagggaacagagaagcgccagggcaaccggaagggaacagggaagcgccgggacaaccggaaggaaacagggaagcgccagggcaaccggaaggagacagggaagcgccggcgcaaccggaagggaaccgggaagcgccagggcagccggagggaaacagggaagugccagcacaaccggaagggaaccgggaagcgccagcgcaaccacaaggaaacgggggagcaggacaggcgcagccacagaaaaacgaaggaggaaaugcaggggcaaggaaaggacaaggacaaaauaaccaaggggcgaacgcgccgaacgaaaagguaguaaacgauuaccugcagaaaauaaggagcagugugacaacggaauggacgccaugcagcgugacguguggaaacggaguaaggauaaaaaggaaagcgcacgcggacaaaaagaaagcagaggaccugacaauggacgaccuagagguagaggcgugcgugauggacaaaugcgcagggauauucaacguaguaaguaacagccugggacugguaauacuccuaguacuggcacuauucaacuaa

SEQ ID NO: 6005 - RNA, 1062 nt, Artificial Sequence
  derived and/or modified CDS sequence (opt11) from Pk(TN026)__AFG25480.1__CSP
augaagaauuucauacugcuagcggugaguagcauacuguuaguagacuuacugccgacgcauuucgagcacaauguggaccugucgcgggcaauaaaugugaauggggugagcuuuaacaaugucgauacgagcaguuugggggcggcacaggugagacagagugcgagcagagggaggggguugggggagaagccgaaggagggggcagauaaggagaagaagaaagagaaggagaaggagaaggagaaggaggaggagccgaagaagccgaacgagaacaagcugaagcagccggaacagccggcggcgggggcagggggagagcagccagcggcgggggcagggggagagcagccagcggcgggagcgggaggggaacaaccagcagcgggggcagggggagaacagccggcggcgggggcaggaggggagcagccggcagcgggggcgggaggggagcagccggcggcgggggcaagaggggagcaaccagcggcgggggcgggaggggagcaaccggcggcaggggcgggaggggagcagccggcggcgggggcgagaggggagcagccggcggcaggggcgggaggggagcagccggcggcgggggcaagaggggagcagccggcagcgggggcaggaggggagcagccagcagcgggggcagggggagagcaaccggcgccggcgccaaggagggagcaaccggcgccgggagcaggggcgggggacggagcgaggggagggaacgcaggggcagggaaggggcaagggcaaaauaaccagggggcgaaugugccaaaugagaaggugguaaacgacuaccugcacaaaauaagaagcagcgugacgacagaauggacaccauguagugugacgugugggaauggggugaggauaagggggaagggacacgcagggaauaaaaaggcggaggaucugacgauggacgaucuagaaguagaggcaugugugauggauaagugcgcggggauuuucaacguagugagcaauaguuugggguuggugauacuguuggucuuggcguuauucaauuaa

SEQ ID NO: 6006 - RNA, 1056 nt, Artificial Sequence
  derived and/or modified CDS sequence (opt11) from Pk(F08B49-1)__AHH02601.1__CSP
augaaaaauuucauacucuuggcggugagcaguauauugcugguggacuuacuaccgacacauuucgagcacaacguggaucugaguagggcgauaaaugugaacggagugagcuucaacaauguagacacaaguagccugggagcggcacagguaaggcagagcgcgagcagagggagaggacugggagaaaagccaaaggaaggggcggacaaggagaaaaagaaagagaaggagaaagagaaagaggaagaaccaaagaagccaaacgagaacaaguugaagcaaccggaacagccggcggcaggggcagggggagagcagccagcggcgggggcgggaggggaacagccggcggcaggggcagggggagagcagccggcagcaggcgcgagaggggaacagccggcggcaggagcagggggagagcaaccggcggcaggagcgggaggggagcaaccagcggcaggggcaggaggggagcagccggcagcgggagcgggaggggaacagccggcggcaggggcgggaggagagcagccggcagcgggggcgaggggagaacagccggcagcaggagcgggaggggaacagccggcagcaggggcaggaggggaacagccagcggcgggggcgagaggggagcagccggcggcaggggcgggaggggagcagccagcgccagcgccaaggagggagcagccggcgccgggggcgggggcgggggauggggcgaggggagggaacgcaggggcggggaaagggcaagggcaaaacaaccagggggcgaacguaccgaaugagaaaguagugaacgauuacuugcacaagauaaggaguaguguaacgacagaguggacgccauguagcgugacgugcggaaauggaguaaggauacgaaggaaagggcacgcgggaaacaaaaaggcggaggaccugacaauggacgaccuagaaguggaagcaugcguaauggacaagugcgcgggaauauucaacguagugagcaacagcuuaggauugguaauacuacugguauuagcguuguucaauuga

SEQ ID NO: 6007 - RNA, 1056 nt, Artificial Sequence
  derived and/or modified CDS sequence (opt11) from Pk(F08B69-1)__AHH02602.1__CSP
augaaaaauuucauacuacuggcagugagcucgauauugcugguggacuuacuaccaacacauuucgagcacaacguggaccugagucgagcgauaaauguaaacggagugaguuuuaacaauguggauacaaguagcuugggagcggcacaggugagacagagugcgagucgagggagaggacuaggggagaagccaaaggaaggggcagauaaagagaagaagaaagagaaagagaaggagaaagaggaggaaccaaagaaaccaaacgagaacaagcuaaagcaaccagagcagccggcggcgggggcagggggagaacaaccggcagcaggagcgggaggggaacagccagcagcaggagcagggggagagcaaccggcagcgggggcgaggggagagcaaccagcagcaggggcgggaggggaacaaccggcagcgggggcgggaggggagcagccagcagcgggggcagggggagaacaaccagcagcaggggcaggaggggaacagccagcggcaggggccgggggagagcaaccagcggcgggggcgagaggggaacagccagcggcgggggcagggggagaacagccggcggcgggagcgggaggggaacagccagcagccggggcgagaggggaacagccggcagcgggggcgggaggagaacagccagcgccagcgccaaggagggagcaaccggcaccgggagcgggagcgggggauggagcgagaggagggaacgcgggggcaggaaaagggcaagggcaaaauaaccaaggggcgaacgugccaaaugaaaagguggugaacgauuacuugcacaagauaagaagcaguguaacgacagaguggacgccauguagcgugacaugcggaaauggagugaggauaaggaggaaaggacacgcagggaauaaaaaggcagaggacuugacaauggacgaccuggauguggaggcauguguaauggacaagugcgcagggauauucaauguggugagcaauagcuugggguuggucauacuacugguauuggcacuguucaauuga

SEQ ID NO: 6008 - RNA, 1056 nt, Artificial Sequence
  derived and/or modified CDS sequence (opt11) from Pk(LT51)__ADN94540.1__CSP
augaagaauuucauacugcuggcgguaagcaguauacugcuaguagaccugcuaccgacacacuucgagcacaacguagaccuaagcagagcgauaaacgugaacggagugagcuuuaacaauguggacacaagcagccuaggagcagcacaggugaggcaaagcgcaagcagagggagaggacugggggaaaagccaaaggaaggggcggacaaagagaaaaagaaggaaaaagaaaaagaaaaggaggaggaaccgaagaaaccgaacgaaaacaaacuaaaacagccagaacagccagcggcaggggcagggggagagcagccagcggcaggggcgggaggagaacagccagcggcgggggcaggaggggaacaaccagcagcgggagcaggaggggaacagccagcagcaggggcgggcggggagcagccagcagcaggggcagggggagaacagccagcagcaggagcaaggggagagcagccggcagcgggcgcaggaggagaacagccggcggcgggagcaggaggagaacaaccggcagcgggagcaagaggagaacaaccagcggcaggggcagggggagagcagccagcagcgggagcaggaggggaacagccggcaccagcgccgagaagagagcaaccggcagcaggagcagggggagaacaaccagcgccggcgccaaggagagaacaaccagcgccgggggcgggagcgggagauggagcgagaggaggaaacgcaggggcagggaaaggacaagggcagaacaaccagggggcgaacgugccgaaugagaagguaguaaacgacuaccugcacaagauaaggagcagcguaacgacagaguggacgccaugcagcgugacaugugggaacgggguaaggauaaggaggaaaggacacgcaggaaacaaaaaggcggaggaccuaacaauggacgacuuagagguagaagccugcguaauggacaagugcgcgggaauauucaacguggugagcaacagcuuggggcuaguaauacuguugguacuggcgcuauucaacuga

SEQ ID NO: 6009 - RNA, 1056 nt, Artificial Sequence
  derived and/or modified CDS sequence (opt11) from Pk(UM0029C9)__AHF20652.1__CSP
augaaaaauuuuauacugcuggcggugagcaguauauugcugguggacuugcugccgacacacuucgagcacaauguggaccugagcagggcgauaaacguaaacggggugaguuuuaacaacguagacacgagcagccuaggggcggcacaggugaggcagagcgcgagccgggggagaggacugggggagaagccaaaagagggggcggacaaggagaaaaagaaagaaaaggagaaggagaaggaggaggaaccaaagaaaccaaacgagaacaagcugaagcagccagagcagccggcggcaggggcagggggagagcagccggcggcgggggcgggaggggaacagccagcggcgggggcgggaggggagcagccggcggcaggggcaggaggggaacagccagcggcaggggcgagaggggagcagccggcagcgggggcaggaggggagcagccggcagcgggggcaaggggagaacaaccagcagcgggggcgggaggggaacagccagcggcgggggcagggggagagcagccggcggcgggagcgggaggggagcagccggcggcaggggcgagaggggaacagccagcagcgggggcgggcggagaacagccagcgccggcgccgaggagggagcaaccagcggcgggagcgggaggagagcagccggcgccggcgccgaggagagaacagccagcaccgggagcaggggcaggggauggggcgagagaggggaaugcaggagcgggaaagggacaagggcagaacaaucagggagcgaacgugccaaacgagaaaguagugaacgacuaccugcacaaaauaagaagcagcgugacgacggaguggacgccguguagcgugacgugcgggaacggggugcggauaaggagaaaggggcacgcagggaauaagaaggcggaagaccugacaauggaugaucuggagguggaggcguguguaauggacaagugugcagggaucuucaauguggugaguaacagccugggacuggugauauuguuagugcuggcacuguucaauuga

SEQ ID NO: 6010 - RNA, 1056 nt, Artificial Sequence
  derived and/or modified CDS sequence (opt11) from Pk(UM0050C7)__AHF20665.1__CSP
augaaaaacuucauacuauuagcggugagcagcauauuguuaguggaccugcuaccgacacacuucgagcacaauguagaucugaguagagcaauaaaugugaauggggugagcuuuaacaauguagacacaaguagcccgggagcggcacagguaagacaaagugcaagcagagggaggggacuaggggagaagccgaaggaaggggcggauaaagagaaaaagaaagaaaaagagaaggagaaggaagaggaaccgaagaaaccgaaugagaacaagcugaagcagccagagcagccagcggcaggggcaggaggggagcagccagccgcgggagcaggaggggaacagccagcggcaggggcaggaggagagcaaccggcagcgggagcgggaggggaacagccagcagcaggagcgagaggagagcagccggcagcgggagcagggggagaacagccggcugcaggggcaagaggggagcaaccggcagcgggagcagggggagaacagccagcggcgggagcagggggagagcaaccggcggcaggagcgggaggggaacagccagcggcgggggccggaggggagcagccggcagcaggggcaggcggggaacaaccggcaccggcgccgagaagagagcagccagcagcgggagcgggaggggaacaaccagcgccagcgccgagaagagagcagccagcaccgggagcgggggcaggagauggagcgaggggagggaaugcaggggcagggaaggggcaaggacagaacaaccaaggggcgaacgugccaaacgaaaaaguagugaacgacuaccucaggaagauaaggagcaguguaacgacggaauggacgccgugcagcgugacauguggaaacggggugagaauaagaaggaaggggcacgcgggaaacaagaaagcggaagaccuaacaauggacgaucuagagguagaggcauguguaauggacaaaugcgcgggaauauucaacgugguaagcaacagccuagggcuagucauacuguuaguacuggcguuauucaauuaa

SEQ ID NO: 6011 - RNA, 1056 nt, Artificial Sequence
  derived and/or modified CDS sequence (opt11) from Pk(UMHEC1)__AHF20620.1__CSP
augaaaaauuucauacugcuggcaguaagcagcaucuugcuaguggaccuacugccaacacauuuugagcacaauguggaccugagccgagcaauaaacguaaauggagugagcuuuaacaauguggauacaagcagcuugggagcggcacaggugagacagagugcaagcagaggaaggggacugggagaaaagccaaaggaaggggcagauaaagagaagaagaaagagaaggagaaagaaaaagaggaggaaccgaagaaaccgaacgagaacaagcugaagcagccggagcagccagcggcaggggcgggaggggagcaaccagcggcgggggcgggaggagaacagccggcggcaggggcaggaggggaacaaccggcggcgggggcgggaggggaacagccagcggcaggggcaggaggggagcagccagcagcgggagcgaggggagagcagccagcggcgggggcgggaggggagcaaccagcggcgggggcaggaggggaacaaccggcggcgggggcaggaggggaacaaccggcagcgggggcgagaggggaacagccugcagcaggagcaggaggggagcagccggcagcaggggcgggaggggagcagccagcgccagcgccgagaagagagcagccggcagcaggggcgggaggagaacagccagcgccagcgccgaggagagagcagccggcgccaggagcgggggcgggggauggggcgagagggggaaaugcaggagcggggaaaggacagggacagaauaaccagggagcaaacguaccgaaugaaaagguaguaaaugacuaccugcacaaaauaaggagcagugugacgacagaguggacgccaugcagcgugacaugcgggaacggagugaggauaaggaggaagggacacgcgggaaauaaaaaggcggaggacuuaacaauggacgaccuggagguagaagcgugcguaauggacaagugcgcgggaauauucaauguagugagcaacagccugggacugguaauacugcugguauuggcauuauucaacuaa

SEQ ID NO: 6012 - RNA, 1056 nt, Artificial Sequence
  derived and/or modified CDS sequence (opt11) from Pk(UMMAC4)__AHF20621.1__CSP
augaaaaauuucauacugcuggcagugagcaguauacugcugguggaccuacugccgacgcacuucgagcacaauguggaucuaagcagggcgauaaauguaaauggagugaguuuuaacaacguagauacaaguagcuuaggggcggcacagguaaggcagagugccagcagggggagaggacuaggggaaaagccaaaagaaggggcggauaaagagaagaagaaagggaaagagaaagaaaaagaggaggaaccgaagaaaccgaacgagaacaaacuaaagcagccggaacagccggcggcaggggcaggaggggagcagccggcggcgggggcgggaggggaacagccagcggcaggggcgggaggggagcaaccggcggcgggggcgggaggggaacaaccagcggcaggggcagggggagagcagccggcagcaggagcgagaggggaacaaccggcagcaggggcagggggagaacagccggcggcgggagcgggaggggaacagccagcggcgggggcaggaggggagcagccggcagcgggagcaaggggagaacagccggcagcaggggcaggaggggagcaaccggcagcgggggcgggaggggaacagccagcgccagcgccaaggagagagcagccggcagcgggggcgggaggggaacaaccagcgccagcgccgaggagagaacagccagcgccgggggcgggggcgggggauggggcgagagggggaaaugcaggggcagggaaagggcaaggacagaacaaccagggggcgaacgugccgaaugaaaagguggugaacgauuacuugcauaagauaaggagcaguguaacgacggaguggacaccauguagcgugacauguggaaauggggugagaauacggagaaaaggacacgcgggaaauaagaaggcagaggauuugacaauggacgaccuagagguagaggcaugcguaauggacaaaugcgcgggaauauucaauguggugagcaauagcuuggggcugguaauacuauugguauuggcacuauucaauuga

SEQ ID NO: 6013 - RNA, 1056 nt, Artificial Sequence
  derived and/or modified CDS sequence (opt11) from Pk(UMMEC8)__AHF20623.1__CSP
augaaaaauuucauacuacuggcggugagcagcauacugcuaguggacuugcugccaacgcauuucgagcacaacguggacuugagcagagcgauaaaugugaacggggugagcuuuaacaauguggacacaagcagucugggggcagcacaggugaggcagagcgcgaguagggggagagggcugggagagaagccaaaggagggagcggacaaggaaaagaagaaggagaaggagaaggagaaggaggaggagccgaagaagccgaacgagaacaagcugaagcaaccggagcagccggcggcgggggcgggaggagagcagccagcggcgggagcgggaggggagcagccagcggcaggggcaggaggggaacagccggcggcgggggcagggggagagcaaccggcggcaggggcgggaggagaacagccagcagcaggggcgagaggggagcagccagcggcgggggcgggaggggagcagccggcagcgggagcgggaggggagcagccggcggcaggggcgggaggggagcagccagcagcaggggcaaggggagagcagccggcggcgggggcaggaggggagcagccagcagcgggggcgggaggggagcagccggcaccggcaccaaggagggagcagccggcagccggggcgggaggggagcagccggcgccggcgccaaggagggaacaaccggcaccgggggcuggggcgggggauggggcaagaggagggaaugcgggggcggggaaggggcaagggcagaauaaccagggagcgaacgugccgaacgagaaaguagugaaugauuacuuacacaagacgagaagcagcgugacaacagaguggacaccguguagcgugacgugcgggaaugggguacggauaagaaggaaggggcacgcggggaauaagaaggcggaggaccugacgauggacgaccuggagguagaggcgugugugauggacaagugcgcgggaauauucaaugugguaaguaauagcuuagggcuagugauacuguuggugcuggcguuguuuaacuga

SEQ ID NO: 6014 - RNA, 1050 nt, Artificial Sequence
  derived and/or modified CDS sequence (opt11) from Pk(MPG45)__ACD86467.1__CSP
augaaaaacuucauacuccuagccguaagcagcauccuccuaguagaccuacuaccaacacauuucgaacacaacgucgaccuaagccgcgcaaucaaccugaacggagucagcuucaacaacguagacaccagcagccuaggcgcagcccaaguacgacaaucagccucacgcggacgcggccucggagaaaaacccaaagaaggggcagacaaagagaaaaagaaagaaaaagacaaagaagaagaacccaagaaaccaaacgaaaacaaacucaaacaaccaaacgcaggacaaccccaagcacaaggcgacggagcgaacgcaggacaaccccaagcacaaggcgacggagcaaacgcaggccaaccccaagcccagggagacggcgcaaacgccggacaaccccaggcacaaggagacggcgcaaacgcaggccaaccccaagcacaaggcgacggcgcaaacgcaggccaaccacaagcccaaggagacggcgcaaacgcaggacagccacaagcccaaggagacggcgcaaacgcaggacagccacaagcccaaggagacggcgcgaacgcaggccaaccccaagcccaaggcgacggggcgaacgcaggacaaccccaagcccaaggagaccgggcaaacgcaggccaaccacaagcacaaggcgacggcgcgaacguacccaggcaaggacgaaacggcggaggcgcaccggcgggagggaacgaaggcaacaaacaagccggaaaaggacagggacaaaacaaccaaggcgcaaacgcaccaaacgaaaaaguaguaaacgacuaccuacagaaaaucagaagcucagucacaaccgaauggacgcccugcagcgugaccugcggcaacggaguaagaaucagaagacgagcacacgcagacaagaagaaagccgaggaccuaacaauggacgaccuagaaguagaagccugcgucauggacaaaugcgcaggcauauucaacgugguaagcaauagccuaggccuaguaauccuucuaguacuagcccuauucaacuaa

SEQ ID NO: 6015 - RNA, 1044 nt, Artificial Sequence
  derived and/or modified CDS sequence (opt11) from Pk(KH462)__ADN94491.1__CSP
augagaaacuucauccuauuggcagugagcagcauauugcuaguggaccugcucccaacacauuucgagcacaauguagaucugucgagagcgaucaauguaaauggaguaaguuuuaacaauguagauacaagcagucugggagcagcacaaguaaggcaaagugcaagcagagggagggggcuaggagagaaaaggaaagaaggggcagacaaagagaaaaagaaagagaaagaggaagaaccgaaaaagccaaacgagaacaaacuaaagcaaccagaacaagcggcgccaggggcagggggagagcagccggcaccaggagcaggaggggaaaggccggcgcccggggcagggggagagcaaccggcaccgggagcgggaggagaacagccggcgccgggggcagggggagaacaaccagcaccgggggcaggaggagaacagccggcaccaggggcagggggagagagaccggcgccgggagcgggaggggaacaaccagcgccaggggcagggggagagaggccggcgccgggggcgggaggggaacagccagcgccaggggcagggggagagagaccagcaccaggagcgggaggagaacagccggcgccaggggcagggggagagcagccggcgccgggagcgggaggagaacagccagcgccagcgccaaggagagaacaaccggcaccggcgccgggggcgggggauggagcgagaggaggaaaugcaggggcaggaaaagggcaaggacaaaauaaccaaggggcgaacgugcccaacgaaaagguagugaacgacuaccuacacaagaucagaagcaguguaacgacagaauggacgccauguagcguaacaugcggaaauggggugaggauaaggaggaaagcacacgcggacaagaaaaaggcagaggaccugacaauggacgaucuagagguagaggcgugcguaauggacaagugcgcgggaauauucaacguaguaagcaauagcuugggacugguaauacuauuaguguuggcguuguucaauuaa

SEQ ID NO: 6016 - RNA, 1044 nt, Artificial Sequence
  derived and/or modified CDS sequence (opt11) from Pk(LT3)__ADN94521.1__CSP
augagaaacuucauacugcuggcaguaaguagcauacugcuaguggaccuacuaccgacacacuucgaacacaacguagaccuaagcagggcaauaaacguaaacggggugagcuucaacaacguagacacaagcucauuaggagcagcacaaguaaggcaaagcgcaagcaggggaaggggacugggagagaaaaggaaagaaggagcggauaaagagaaaaagaaagaaaaagaagaagaaccaaagaagccaaacgaaaacaaacugaaacagccggagcaagcagcaccgggggcaggaggagaacaaccggccccgggggcaggaggggaacaaccagcaccaggagcagggggagaaagaccagcaccaggggcgggaggagagcaaccggcaccgggggcgggaggggaacagccggcgccaggggcgggaggggaaagaccggcaccaggagcgggaggagaacagccagcgccgggagcgggaggagagcaaccggcgccaggagcaggaggagaacaaccagcgccaggagcagggggagaacaaccagcgccgggagcgggaggagagcuaccagcgccaggggcagggggagagagaccggcaccaggagcaggaggagaacagccggcgccaggagcagggggagaacaaccggcgccggcgccaagaagggaacaaccggcgccaggcccaggagcaggagauggggcaagaggagggaacgcaggggcggggaaggggcaggggcaaaacaaccaaggagcgaacgugccaaacgaaaaaguaguaaacgacuaccuacacaaaaucagaaguagugugacaacagaauggacaccgugcagcguaaccugcggaaacggaguaagaaucagaagaaggcagaaugcaggaaacaagaaggcagaagaucuaacaauggacgaccuggaaguggaagcaugcgugauggacaaaugcgcaggcauauucaaugugguaagcaacagccuaggacugguaauacugcuggugcucgcgcuauucaacuag

SEQ ID NO: 6017 - RNA, 1044 nt, Artificial Sequence
  derived and/or modified CDS sequence (opt11) from Pk(LT33)__ADN94529.1__CSP
augaggaacuucauacuacuggcaguaagcaguauacugcuaguagacuuacuaccaacccacuucgaacacaacguggaucuaagcagggcaauaaacguaaacggagugagcuucaacaacguagacacaagcagccugggggcggcgcaagugaggcagagcgcgagcagaggaagagggcuaggagagaaaagaaaggaaggagcagacaaagaaaagaaaaaggaaaaagaagaagaaccaaagaaaccaaacgaaaacaaacuaaaacagccagaacaagcagcgccaggagcgggcggagaacaaccagcaccaggggcaggaggggagaggccagcgccaggagcaggaggggagcagccagcaccaggggcgggaggagaacaaccagcaccaggagcaggaggggaacaaccagcaccaggagcggguggagaacaaccagcaccaggggcaggaggggaaagaccagcaccgggagcaggaggagaacaaccagcaccaggagcaggaggggaacaaccagcaccaggggcaggaggggaacaacccgcaccgggggcagggggagaaagaccagcaccaggagcaggcggagaacaaccagcgccaggagcaggaggggagagaccagcaccgggggcgggaggagaacaaccggcgccggcaccaaggagagaacaaccagcgccagggccgggagcaggagacggagcgaggggaggaaacgcgggagcgggaaaaggacaagggcaaaacaaccaaggagcgaacgugccaaacgaaaaggucguaaaugacuaccuacacaaaauaagaaguagcguaacaacagaauggacgccauguagcguaacaugcggaaauggggugagaauaagaaggagacagaacgcaggaaacaaaaaggcagaagaccuaacaauggacgaccuagaaguagaagcgugcguaauggacaaaugcgcaggaauauucaacguagugagcaacagccuggggcuaguaauacugcuggugcuagcacuguucaacuaa

SEQ ID NO: 6018 - RNA, 1044 nt, Artificial Sequence
  derived and/or modified CDS sequence (opt11) from Pk(LT33)__ADN94527.1__CSP
augaagaacuucaucuugcuagcaguaagcagcauacuacugguagacuuacuaccaacgcacuucgagcacaauguggaccugaguagggcaauaaacgugaacggggugagcuucaauaauguggacacgagcagcuuaggagcagcgcagguaagacagagcgcgaguagaggaaggggauugggagagaaaaggaaagaaggagcggacaaggaaaagaaaaaggaaaaggaggaggaaccgaaaaagccaaaugagaacaaauugaagcagccagagcaagcggcaccgggggcgggaggggagcagccggcgccaggggcaggaggagagaggccagcaccgggagcgggaggggaacagccagcgccaggggcagggggcgaacaaccggcgccgggggcgggaggggaacagccagcaccgggggcagggggagagcagccggcaccgggagcaggaggggaaagaccagcgccaggggcagggggagagcaaccggcgccgggagcgggaggagaacagccagcaccaggagcaggaggggagcaaccagcaccgggggcgggaggggagaggccagcaccgggagcaggaggggaacaaccggcgccaggggcgggaggggaaaggccagcgccgggggcaggaggggagcaaccggcgccggcaccgaggagggagcagccagcaccagggccaggggcaggggauggagcgaggggagggaaugcgggggcgggaaaggggcaggggcagaacaaucaaggggcaaacgugccgaacgagaaagugguaaacgauuaccuacacaagauaaggagcagcgugacaacagaauggacgccgugcagugugacgugcggaaacggggugaggauaagaaggaggcaaaacgcagggaauaagaaagcggaagaccuaacaauggacgacuuggaaguagaggcgugcgugauggacaaaugcgcgggaauauucaacguaguaaguaacagccuagggcuaguaauacuacugguacuagcacucuucaacuag

SEQ ID NO: 6019 - RNA, 1044 nt, Artificial Sequence
  derived and/or modified CDS sequence (opt11) from Pk(TN029)__AFG25482.1__CSP
augagaaacuuuauacugcuagcgguaagcagcauacuacugguagacuuguugccaacgcacuucgaacacaacguggaccugaguagggcaauaaacgugaacggggugagcuucaacaacguagacacgagcagcuugggagcagcgcagguaagacagagcgcgucaagaggaaggggacugggagagaaaaggaaagaaggggcggacaaggagaagaaaaaggaaaaggaggaggaaccgaaaaagccaaaugaaaauaaacugaagcagccagaacaagcggcaccgggggcgggaggggaacagccagcgccaggagcgggaggagaacaaccggcgccgggggcgggaggggaaaggccggcgccaggggcagggggagagcagccggcgccgggagcgggaggggaacagccagcgccgggggcgggaggagagagaccagcaccgggggcaggaggggaacagccagcaccaggggcagggggagagcagccggcaccgggagcaggaggagagcagccagcaccaggggcagggggagagcaaccggcgccgggagcgggaggagaaagaccagcgccaggggcgggaggggagaggccggcaccgggagcgggaggggagcagccagcgccgggggcgggaggagagcaaccggcgccggcgccgagaagagaacaaccggcgccagggccgggggcaggggacggagcacgaggagggaacgcgggggcgggaaagggacagggacaaaacaaccagggggcaaacgugccgaacgagaaaguggugaacgacuaccuacauaaaauaagaaguagcgugacaacggaauggacaccaugcagcgugacaugcggaaaugggguaagaauaaggagaaggcaaaaugcggggaacaagaaagcggaagauuuaacaauggaugacuuggaaguggaagcgugcgugauggacaaaugugcagggauauucaacguagugaguaacagucuagggcuaguaauauugcuagugcuggcgcuauucaacuag

SEQ ID NO: 6020 - RNA, 1041 nt, Artificial Sequence
  derived and/or modified CDS sequence (opt11) from Pk(LT53)__ADN94501.1__CSP
augaaaaacuucauacuacuggcagugucaagcauacugcuaguagaccuacuacccacacacuucgaacacaacguggaccuaagcagagccauaaacgugaacggaguaaguuucaacaacguagacacaagcagccuaggagccgcacaaguaagacaaagcgcaagcagaggaagagggcugggggaaaaaccgaaagaaggagacgacaaagaaaagaaaaaggaaaaagaaaaagaagaagaaccgaaaaaccugaacgaaaauaaaccaaagcagccaaacgcagaaggagacggggcaaaaccaaagcaaccgaacgcagaaggagacggagcgaaacugaaacaaccgaacgcagaaggagacggagcaaagcuaaaacagccaaacgcggagggagacggaggaaacgcaagacaaccaaacgcagaaggagauggagggaacgcgagacaaccgaacgcagaaggggacggagggaacgcacgacaaccaaacgcagagggggacggaggaaacgcaagacaaccgaacgcagaaggagacggagggaacgcgagacaaccaaacgccgaaggggacggagggaacgcaagacaaccaaacgcagagggggacggagggaacgcaagacaaccaaacgcagaaggagacggggcaaacgcaagacagccgcaagcagaagggggaggaggaaacgcaagacagggaggaaacgaaggaaacaaacaggcggggaaaggacaaggacaaaacaaccaaggcgcaaacgcaccaaacgaaaaaguaguaaacgacuaccuacagaaaauaagaagcagcgugacaacagaauggacaccauguagcguaacauguggaaacggagugaggauaagaaggagagcgcacgcggacaaaaagaaagcagaagacuuaacaauggacgaucucgaaguagaagcaugcgugauggacaaaugcgcgggaauauucaacguaguaagcaacagccuagggcuaguaauacuauuaguccuagcgcuguucaacuag

SEQ ID NO: 6021 - RNA, 1041 nt, Artificial Sequence
  derived and/or modified CDS sequence (opt11) from Pk(UMOTC3)__AHF20624.1__CSP
augaaaaauuucauacuacuagcaguaagcucgauacugcuaguggaccuacugccgacgcacuucgagcacaacguagacuugagcagagcaauaaacguaaacggagugagcuucaacaacguagacaccagcagccugggagcagcacagguaagacaaagcgcaagcagagggagagggcucggagaaaaaccaaaggaaggggcagacaaagagaaaaagaaagagaaagagaaagaggaggaaccgaagaaaccgaacgagaacaagcucaagcaaccagaaggaaacagggaagcgccagggcaaccagaagggaacagggaagcgcccggacaaccggaaggaaacagagaagcgccggggcaaccggaagggaacagggaagcaccaggacaaccggaagggaacagagaggcgcccgggcaaccagaaggaaacagagaagcaccaggacaaccggaagggaacagagaagcgccagggcaaccggaagggaacagagaagcgccagggcaaccggaagggaacagggaagcgccagcgcaaccggaagggaacagagaagcaccagggcaaccagaagggaauagggaagcgccagcacagccgcaagggaacgggggcgcaggacaggcacagccagaggaaaaccgggaggcaccggcacagccacagggcaacggaggagcagggcaagcgcagccgcagaaaaaugagggcgggaacgcgggagcgagaaagggacaaggacagaacaaccaaggagcaaacguaccaaacgagaaagugguaaacgacuaccuacacaaaaucagaagcagcgugacaacagaauggacaccgugcucgguaacaugcgggaacggaguaaggaucaggagaaagggacacgcagggaacaagaaagcagaagaccuaacgauggacgaccuggaaguggaagcgugugugauggacaaaugcgccgggauauucaacguggucagcaacucgcucggccuagugauacugcuagugccagcgcuauucaacuaa

SEQ ID NO: 6022 - RNA, 1038 nt, Artificial Sequence
  derived and/or modified CDS sequence (opt11) from Pk(UMSY2C2)__AHF20625.1__CSP
augaaaaacuucauacuacuagcgguaagcagcauacugcuaguagaccuacuaccaacacacuuugagcacaacguagaccuaagccgagccauaaacguaaacggaguaucauucaacaacguggacacaaguagccuaggagccgcacaaguaagacaaagcgcaagcagaggacggggacuaggagaaaaaccaaaagaaggcgcagacaaagagaaaaagaaagaaaaagaaaaagaagaagaaccgaagaaacccaacgaaaacaaacuaaaacaaccagaaggaaacagagaagccccaggccaaccagaaggaaacagagaagcaccaggacaaccagaaggaaaccgagaggccccaggccaaccagaaggaaacagagaggcaccaggccaaccagaaggaaacagagaagccccaggccaaccagaaggaaaccgagaagcaccaggccagccagagggaaaccgagaagcaccaggccaaccagaaggaaacagagaagcgccaggacaaccagagggaaaccgcgaagcgccaggacaacccgaaggaaauagagaagccccagcacaaccagaaggcaacagggaggcaccaggacaacccgagggaaacagggaagcaccagcacaaccagaaggaaacagagaagcgccagcacaaccacaaggaaacggaggagcaggacaagcacaaccacagaaaaacgaagggggaaacgcaggagcacgcaaaggacaaggacaaaacaaccaaggagcaaacgcgccaaacgagaaaguaguaaacgacuaccuacagaaaauaagaucgagcgugaccacagaguggacaccaugcucaguaacaugcggaaacggaguaagaaucaaaagaaaagcccacgccgacaaaaagaaagcagaagaccucacaauggacgaccuagaaguggaagcaugcguaauggacaaaugcgcaggaauauucaacguagucucaaacagccuagggcuaguaauauuacugguacuagcacuauucaacuga

SEQ ID NO: 6023 - RNA, 1029 nt, Artificial Sequence
  derived and/or modified CDS sequence (opt11) from Pk(KN045)__AFG25467.1__CSP
augaagaacuucauauuacuagcggugaguagcauacugcugguagauuugcuaccaacgcacuuugaacauaacguagacuugagcagggcaauaaacgugaaugggguaaguuucaacaacguggacacgagcagccugggagcagcacaagugaggcagagugcaagcaggggaagggggcuaggggagaaaccaaaagagggggcagacaaggaaaagaagaaagaaaaggaaaaggaaaaggaagaggaaccgaaaaagccaaacgaaaauaaacugaaacaaccagaacaaccggcagcgggagcgggaggggaacagccagcggcaggggcagggggagagcaaccggccgcaggagcgggaggagagcagccagcggcaggagcaggaggagagcaaccagcggcaggagcgggaggggaacaaccagcggcgggggcaaggggagagcaaccagcagcaggggcgggaggagaacagccggcagcgggggcgggaggggagcaaccggcggcgggggcgagaggggaacagccagcggccggggcagggggagagcagccggcggcaggggcagggggagaacagccagcgccagcgccaagaagagagcaaccggcggcgggagcaggaggggaacagccagcaccggcaccaagaagagagcagccagcaccaggagcaggggcgggagauggagcaagagggggaaacgcaggggcgggaaaaggacaaggacaaaauaaucagggagcaaacgugccaaacgagaagguagugaacgacuaccugcacaagauaaggagcagcguaacgacagaguggacgccguguagcgugacauguggaaauggggugaggauuaggaggaaaggacacgcgggaaauaagaaagcagaggaccugacgauggaugaucuggagguagaggcaugcgugauggacaagugcgcgggaauauuuaacguagugagcaacagcuuggggcuagugauacuauuggugcuggcacuauucaacuga

SEQ ID NO: 6024 - RNA, 1029 nt, Artificial Sequence
  derived and/or modified CDS sequence (opt11) from Pk(LT48)__ADN94515.1__CSP
augaagaacuuuauacugcuagcgguaagcagcauauuacugguagaccuguugccgacgcacuuugaacacaacguagacuugagcagggcaauaaacgugaacggggugagcuucaacaacguggacacgagcagucuaggggcggcgcaagugcgacagagcgcaagcaggggaagaggacugggagagaaacccaaagagggagcggacaaggaaaagaagaaagaaaaagaaaaggaaaaggaagaggaaccgaaaaagccaaacgaaaauaaacugaaacagccagaacaaccggcggcgggagcgggaggagaacagccagcggcaggggcagggggagagcaaccagcagcaggagcagggggagaacagcccgcggcgggggcagggggagagcaaccggcagcgggagcagggggagaacagccggcggcaggggcaggaggggagcagccggcagcaggcgcaggaggggaacagccagcggcaggggccgggggagagcaaccggcagcgggagcaagaggagaacagccagcggcaggagcaggcggggagcagccggcagcgggagcgggaggggaacagccagcaccggcaccgaggagggagcagccggcagcaggcgcgggaggggaacagccagcgccagcgccacgaagagagcaaccggcaccgggagcgggagcgggagauggagcaagagggggaaaugcaggggcaggaaaggggcaagggcaaaauaaccagggagcaaacgugccaaaugagaagguaguaaaugacuaccuacacaagauaaggagcucgguaacgacagaguggacgccauguagcgugacgugcgggaauggagugaggauaagaaggaaagggcacgcgggaaauaaaaaggcagaagacuugacaauggacgaucuagagguggaggcauguguaauggacaagugcgcagggauauucaacguagugaguaacagccuaggguuggugauacuacugguacuggcauuguuuaauuga

SEQ ID NO: 6025 - RNA, 1029 nt, Artificial Sequence
  derived and/or modified CDS sequence (opt11) from Pk(TB073)__AFG25476.1__CSP
augaggaacuucuucuuccuagcgguaagcagcauacugcuaguggaccuacuaccaacccacuucgaacacaacguagaccuaagcagagcaauaaacguaaacggagugagcuucaacaacguagauacgagcagucuaggggcggcacaaguaagacagucagcaaguagggggagaggacuaggggagaaaagaaaagagggagcggacaaagaaaagaagaaagaaaaagaagaggaaccaaagaaaccgaacgaaaacaaacuaaaacaaccugaacaggcaagggcaggaggagaacagccggcggcagggggagaacagccggcggcgggaggagaacagccggcagcgggaggggaacaaccggcagcaggaggggaacaaccagcagcgggaggagaacagccggcagcgggaggagaacaaccggcagcaggaggagagcagccggcagcgggaggagaacagccggcagcaggaggggaaagaccagcagcagggggagaacagccagcagcaggaggagaaagaccggcggcaggaggagagcaaccggcggcaggaggagaacagccagcaccggcaccaaggagggaacaaccggcagcaggaggggagcaaccagcaccggcaccaagaagagaacagccagcggcaggaggggaacaaccggcaccgggagcaggagcaggggacggagcaagagggggaaacgcaggagcaggaaaaggacaggggcaaaacaaccaaggagcaaacguaccaaacgaaaaaguagugaacgacuaccuacauaaaacaagaagcaguguaacaacagaguggacgccaugcagcguaacaugcgggaacggagugaggauaagaagaaaggcacacgcagacaagaagaaagcagaaaaccuaacaauggacgaccuagaaguagaagcaugcguaauggacaaaugcgcggggauauucaacguaguaaguaacagccuagggcuaguaauacugcuaguacuagcacuauucaacuga

SEQ ID NO: 6026 - RNA, 1026 nt, Artificial Sequence
  derived and/or modified CDS sequence (opt11) from Pk(SGEHIWM26-Y09-60)__AFD97238.1__CSP
augaaaaacuucauacuguuggcagugagcagcauacugcuaguggaccuauuaccgacacacuucgagcacaacguggaccuaaguagagcgauaaacguaaacggagugagcuucaacaacguggacaccucgagccuaggggcagcaagaguaaggcaaagcgcaagcagaggaagaggacugggggaaaaaccaaaagaaggagcggacaaagagaagaagaaggaaaaagaaaaagagaaagaggaaccgaagaaaccaaaugagaacaagcugaagcaaccggagcagccggcagcgggggcagggggagagcagccagcagcaggggcgggaggagagcaaccggcagcgggggcagggggagaacagccagcggcgggagcaggaggggagcagccggcggcgggagcaggcggggaacagccagcggcaggggcagggggagagcaaccggcagcaggagcaggaggggaacagccagcggcaggggcaggaggagaacagccggcggcaggggcgggaggggagcaaccagcggcaggagcaggaggggaacagccggcagcgggggcagggggagagcagccagcgccggcgccgaggagggaacagccggcggcgggggcaggaggggagcaacccgcgccagcaccgaggagggagcagccggcaccaggggcgggggcgggggacggggcgaggggagggaacgcaggggcagggaaaggacagggacaaaacaaccagggggcgaacguaccaaacgaaaagguaguaaacgacuacuuacacaaaauaaggagcagcgugacgacagaauggacaccgugcagcgugacgugcggaaacggagugaggauaaggaggagacagaacgcgggaaacaagaaggcagaagaccuaacaauggacgaucuagagguagaagcgugcguaauggacaaaugcgcagggauauucaacguaguaagcaacagccuagggcuagugauauuguuggugcuggcacuauucaacuaa

SEQ ID NO: 6027 - RNA, 1026 nt, Artificial Sequence
  derived and/or modified CDS sequence (opt11) from Pk(SGEHIWM35-Y09-74)__AFD97243.1__CSP
augaaaaacuucauacuauuggcggugagcagcauacugcugguggacuuacuaccaacgcauuucgagcacaauguagaucuaaguagggcaauaaaugugaauggggugagcuuuaauaauguagacacaaguagucuaggggcggcgcaaguaaggcaaagugcgaguagagggcgagggcugggggaaaagccaaaagagggggcagauaaggagaagaagaaagagaaggagaaggagaaggaggaaccgaagaagccgaaugagaauaaacugaagcagccggagcagccggcggcgggggcgggaggggagcagccggcggcgggagcaggaggggagcagccggcggcgggggcaggaggggagcagccagcggcaggggcagggggagagcagccggcggcgggggcgggaggggagcagccggcagcgggggcgggaggggagcagccggcggcgggggcaggaggggagcagccggcggcgggggcgggaggggagcagccggcggcgggggcaggaggggagcagccggcggcaggggcgggaggggaacagccggcagcgggggcgggaggggagcagccagcaccggcaccaagaagggagcagccggcggcgggggcaggaggggaacagccggcgccggcgccgaggcgggagcagccggcgccaggggcaggggcgggggacggggcgagaggagggaacgcgggggcggggaaagggcaagggcagaauaaccagggggcgaacgugccaaacgaaaagguagugaacgauuaccuacacaagauaaggagcagcgugacgacagaauggacgccguguagcgugacaugcgggaacgggguaaggauaaggagaaggcagaacgcagggaacaagaaggcagaagaccugacgauggacgaucuagagguagaggcgugugugauggacaagugcgcggggaucuucaauguaguaagcaauagcuuggggcuagugauacugcuggugcuggcgcuguucaacuga

SEQ ID NO: 6028 - RNA, 1023 nt, Artificial Sequence
  derived and/or modified CDS sequence (opt11) from Pk(UM0014C4)__AHF20645.1__CSP
augaaaaacuucauacuacuagcaguaagcagcauacugcuaguagaccuacuaccaacgcacuucgaacacaauguagaccuaagcagagcaauaaacgugaauggaguaaguuucaacaacguggacacaagcagucucggagcagcacaagugaggcaaagcgcaagcagagggaggggacuaggcgaaaaaccaaaagaaggggcagauaaagaaaaaaaaaaagaaaaggaaaaagaagaagaaccgaaaaaaccaaacgaaaacaaacugaaacaaccagaacaagcacgaccgggggcagggggagaacaaccagcaccaggggcaggaggggagcaaccagcgccaggggcgggaggggaacaaccggcgcccggggcgggaggagaacagccggcgccaggagcgggaggagaacaaccggcgccgggggcagggggagaacagccagcgccgggagcaggaggagaacaaccggcaccaggagcaggaggagaacaaccggcaccaggagcagggggaggacaaccagcaccaggagcggggggcgaacaaccggcaccaggggcaggaggggagcaaccggcaccagcaccaagaagagaacaaccggcaccgggaccgggaggagagcaaccagcaccagcaccaagaagagaacaaccagcgccgggggcaggagcaggggacggagcaagggggggaaacgcaggagcagggaaaggacaaggccaaaacaaccaaggagccaauguaccgaacgaaaaaguaguaaacgacuaccuacacaagauaagaagcagcguaacaacggaauggacgccaugcagcgugacgugcggaaacggggugagaauaagaaggaaaggacacgcaggaaacaaaaaagcagaagacuuaacaauggaugaccuggaagucgaagcaugcguaauggacaaaugcgcagggauauucaacguaguaagcaacagccuaggacuagugauacuacuaguacuagcacuauucaacuga

SEQ ID NO: 6029 - RNA, 1020 nt, Artificial Sequence
  derived and/or modified CDS sequence (opt11) from Pk(LT57)__ADN94510.1__CSP
augaaaaacuucauacuacuagcggugagcagcauacuacugguagaucuacugccaacacacuucgaacacaacguagacuugaguagagcaauaaaugugaacggaguaucguucaacaacguggacacgagcagccugggagcagcgcaaguaagacagagcgcgagcagggggcggggacugggagaaaagaggaaagagggggcggacaaggaaaagaaaaaggagaaggaggaaccgaagaaaccgaacgagaacaaacuaaagcaaccagaacaggcaagggcagggggagagcaaccggcggcgggaggagaacagccagcggcagggggagagcaaccggcggcagggggagaacagccagcggcgggaggagagcaaccggcggcgggaggagaacagccggcggcaggaggagagcagccggcagcgggaggagaacagccagcagcaggaggggaaagaccggcagcgggaggagagcagccagcagcagggggagagcagccagccgcgggaggggaacagccggcggcaggaggagagagaccggcagccggaggggaaaggccggcagcagggggagagcagccagcggcgggaggggaacagccagcgccagcgccaaggagagagcaaccggcggcgggaggggaacaaccagcaccaggggcaggggcgggggacggggcgaggggagggaacgcaggggcggggaagggacagggacagaacaaccaaggggcaaacgugccgaacgagaaaguaguaaaugacuaccugcacaaaauaaggagcagcguaacaacggaauggacaccgugcaguguaacgugcggaaacggagugagaauaagaagaaaggcgcaugcggacaaaaagaaagcagagaauuuaacgauggaugaccuggaaguggaggcgugcgugauggacaaaugugcagggauauucaacguaguaaguaacagucuagggcugguaauauuguuggugcuggcgcuauuuaacuaa

SEQ ID NO: 6030 - RNA, 1020 nt, Artificial Sequence
  derived and/or modified CDS sequence (opt11) from Pk(SGEHIWM17-Y09-4)__AFD97233.1__CSP
augaaaaacuucauacugcuagcgguaagcagcauacugcuaguggaccugcuaccaacacacuucgaacacaacguagaccuaagcagggcaauaaacgugaacggagucagcuucaacaacgcagacacaucaagccugggggcagcacaaguaaggcaaagcgccagcagaggacgaggacuaggagaaaaaccgaaagagggagcggacaaagaaaaaaaaaaagaaaaagaagaagaaccaaaaaaaccgaacgaaaauaaacucaaacaaccagacgcaguaccaggaggagaggaaccagcaccaggcagagagcaaccagcaccaggaagggaagaaccggcaccgggaagagaacaaccagcacccggaagagaggaaccagcaccaggaagagaacaaccagcacccggaagagaagaaccggcaccaggaagggaacaaccagcacccggaagagaacaaccagcacccggacgagaagaaccagcaccaggaagggaacaaccagcaccaggaagagaagaaccagcaccgggaagagaacaaccagcaccaggaagagaacaacccgcgccaggaagagaacaaccagcgccagggggagaacaaccagcgccagggagagaacaaccggcaccgggaggagagcagccagcgccagcccccggcgccggagcgggagacggagcaagagggggcaacgcaggagcaggaaaaggacaaggacaaaacaaccaaggggcaaacgugccaaaugaaaaaguggucaacgacuaccuacacaaaaucagaagcagcguaacgacggaauggacaccgugcagcguaacaugcgggaacgggguaaggauaagaagaaaaggacacgcagggaacaaaaaagcagaagaccuaacaauggacgaccucgaaguagaagcaugcguaauggacaaaugcgcaggaauauucaacgugguaaguaacagccuaggacuaguaauacugcuaguacucgcgcuguucaacuga

SEQ ID NO: 6031 - RNA, 1020 nt, Artificial Sequence
  derived and/or modified CDS sequence (opt11) from Pk(SGEHIWM26-Y09-123)__AFD97240.1__CSP
augaaaaacuucauacuccuagcaguaagcucaauacugcuaguagaccuacuaccgacgcacuucgaacacaacguagaccuaagccgagcaauaaacguaaacggagugagcuucaacaacguggacacaucaagccuaggagcagcccaggugaggcaaagcgcaagcagaggaagagggcugggagaaaagccaaaagaaggggccgacaaagagaaaaagaaagaaaaagaagaagaacccaagaaaccaaacgaaaacaaacuaaaacaaccagacgcgguaccaggaggagaagaaccagcacccggacgagaacaaccggcaccaggaagggaagaaccagcaccagggagagaacaaccggccccgggaagagaagaaccagcgccagggagagaacaacccgcccccggacgggaagaaccagcacccggaagagaacaaccagcaccaggaagggaacaaccagcacccggaagagaagaaccggcacccggaagggaacaaccagcgccaggaagagaagaaccagccccagggagggaacaaccagcaccaggaagagaacaaccagcaccgggacgagaacaaccagcaccaggaggcgaacaaccagcgccaggaagggaacagcccgcacccggaggcgaacaaccagcaccagcaccaggagcaggcgcaggagacggagcaagaggaggcaacgccggagcagggaaaggacaaggacaaaacaaccaaggagcaaacguaccaaacgaaaaagucguaaacgacuaccuacacaaaaucagaagcagcguaacaacagaauggacaccaugcagcguaacaugcggaaacggaguaagaauacgaagaaaaggacacgcaggcaacaagaaagcagaggaccugacaauggacgaccucgaaguagaagccugcguaauggacaaaugcgccggaauauucaacguaguaagcaacagccuagggcuaguaauacuacugguacuagcacucuucaacuaa

SEQ ID NO: 6032 - RNA, 1020 nt, Artificial Sequence
  derived and/or modified CDS sequence (opt11) from Pk(TN003)__AFG25477.1__CSP
augaaaaacuucauacuacuagccguaagcagcauacuacuaguagaccuauucccgacacacuucgaacacaacguggaccugagccgggcaauaaacguaaacggaguaagcuucaacaacgucgacacaagcagucuaggagcagcacaagugagacaaagcgcaaguaggggaagggggcuaggagaaaaaccgaaagagggagcagacaaagaaaaaaaaaaagaaaaagaggaaaagccaaaaaagccaaacgaaaacaaacuaaaacaaccagcagcagggggagagcagccggcagcaggaggagaacagccagcagcaggaggggaacaaccggcagcaggaggggaacaaccagcagcagggggagaacagccagcggcaggaggagaacaaccagcagcggggggagaaaggccggcggcaggaggggaacagccggcagccgggggggaacaaccggcggcgggaggagaaaggccggcggcaggaggagagcagccggcagcggggggggaaagaccagcagcagggggagagcaaccagcagccggaggagaacagccagcagcaggaggagaacaaccagcgccagcgccgagaagagaacaaccgguagcgggaggagaacaaccagcgccagcaccaaggagagaacaaccagcaccaggagcaggagcgggggacggagcacggggaggaaacgcaggagcaggaaaagggcaggggcaaaacaaccagggagcgaacguaccgaacgaaaaaguagugaaugacuaccuacacaaaauaagaagcaguguaacaacggaauggacaccgugcagcguaacauguggaaacgggguaaggauaagaagaagacaaaaugcaggaaacaaaaaagcagaagaucugacaauggacgaccuagaaguagaagcauguguaauggacaaaugcgcaggaauauucaacguaguaagcaauagcuuagggcugguaauauuacugguacuggcgcuguucaauuga

SEQ ID NO: 6033 - RNA, 1017 nt, Artificial Sequence
  derived and/or modified CDS sequence (opt11) from Pk(LT53)__ADN94524.1__CSP
augagaaacuucauacuccucgcagucucaagcauacugcuaguagaccuccuacccacacacuucgaacacaacguagaccuaagcagggcaauaaacguaaacggagucagcuucaacaacguagacacaagcagccuaggagccgcgcaaguaagacaaagcgcaagcagaggaagagggcugggagagaaaagaaaagaaggagcggacaaagagaaaaagaaagaaaaagaagaagaaccgaaaaagccgaacgaaaacaaacuuaaacaaccggaacaagaaagaccaggcggcgaacaaccagcaccaggaccaggaggagagcaaccagcaccaggaccaggaggggaacaaccagcaccaagaccaggaggagaacaaccagcaccaggcccaggaggagaacaaccagcaccaggcccagggggcgaacagccagccccagggccgggcggagagcaaccagcaccaagacccggaggcgaacagccagcgccaggaccgggaggagaacagccagcaccaaggccagggggagaacaaccagcaccaggaccaggaggagaacaaccagcacccagacccggaggagaacaaccggcaccaggaccaggaggggaacaaccagcgccagcgccaagaagagaacaaccagcaccagcaccaggagcaggagccggagacggggcaagaggcggaaacgcaggcgcaggaaaaggacaagggcaaaacaaccaaggagcaaacguaccaaaugaaaaaguaguaaacgacuaccuacacaaaauaagaaguaguguaacaacagaguggacaccaugcaguguaacaugcggaaacggaguacgaauaagaagaagacaaaacgcaggcaacaagaaggcagaagaccugaccauggacgaccuagaggucgaagcaugcguaauggauaagugcgcagggauauucaacguaguaagcaacagucuagggcuaguaauacuccuaguacuagcccuauucaacuga

SEQ ID NO: 6034 - RNA, 1014 nt, Artificial Sequence
  derived and/or modified CDS sequence (opt11) from Pk(KH229)__ADN94485.1__CSP
augaggaauuuuauacugcuagcaguaagcagcauacuauuaguagacuugcuaccaacacacuucgaacacaacguagaccuaagcagagcgauaaaugugaacggggugagcuucaacaacguagacacgagcagucugggagcggcacaggugaggcagagugcgagcagaggaagaggacugggggagaagccgaaagaaggggcagacaaggagaagaagaaagagaaagaagagaagccaaagaagccgaacgaaaacaaacugaaacaaccaggaggggagcaaccagcggcgggaggggagcaaccggcggcaggaggggagcaaccggcggcaggaggggagcagccagcagcagggggagaaaggccggcggcgggaggggaacaaccggcggcaggaggggaacaaccggcagcgggaggggaacagccggcggcagggggagaacagccagcggcaggaggggagagaccagcggcaggaggggagcagccggcagcgggaggagagcagccggcagcaggaggggagcagccggcggcagggggagaaaggccggcggcagggggagagcagccggcgccagcgccaagaagagagcaaccggcggcagggggagagcagccggcgccagcaccaaggagggagcagccggcgccaggggcaggggcaggggacggggcgagaggagggaacgcgggggcggggaaggggcaggggcagaauaaccagggggcgaacgugccaaacgaaaagguaguaaacgacuaccugcacaaaauaaggagcagcguaacaacggaauggacaccaugcagcgugacgugcgggaauggggugaggauaaggaggaggcagaacgcaggaaacaagaaggcggaagaccugacgauggacgaccuagagguggaggcaugcguaauggacaaaugcgcgggaauauucaauguggugagcaacagucuggggcuggugauacugcuagugcuggcacuguucaacuga

SEQ ID NO: 6035 - RNA, 1014 nt, Artificial Sequence
  derived and/or modified CDS sequence (opt11) from Pk(KH468)__ADN94487.1__CSP
augaaaaacuuuauacuguuagcggugagcagcauacuacugguggacuuguucccgacgcacuuugagcauaacguagaucugaguagggcgauaaacgugaacggagugagcuucaauaacguagacacgagcagccugggagcagcgcaaguaagacagagcgcgagcagaggaaggggacuaggggagaaaccgaaggagggggcggacaaagagaagaaaaaggaaaaagaggagaagccgaagaaaccaaacgaaaacaaacugaagcagccagggggagagcaaccggcagcgggaggagaacagccggcggcagggggagagcaaccggcagcgggaggagagcaaccggcagcagggggagagaggccggcagcgggaggggaacaaccagcggcaggaggggagcaaccagcggcgggaggagaacaaccagcagcagggggagagcaaccggcagcgggaggggagaggccggcagcaggaggggagcaaccggcagcgggaggggaacagccagcggcagggggagagagaccggcggcgggcggagaacagccggcggcagggggagagcaaccggcgccggcaccgaggagagaacaaccggcggcaggaggggagcaaccagcaccggcgccgaggagagagcagccagcgccaggggcgggggcaggggacggggcaaggggagggaacccgggagcgggaaagggacagggacagaacaaucaaggggcaaacguaccgaacgagaaagugguaaaugacuaucuacacaaaauaagaagcagugugacaacggaauggacgccguguagugugacgugcggaaacggaguaaggauaaggagaaggcagaacgcaggaaacaagaaagcggaagaccuaacgauggacgacuuggaaguggaagcaugcgugauggacaagugcgcggggauauuuaacgugguaaguaacagucuagggcuggugauacuacuggugcuggcgcuauuuaacuag

SEQ ID NO: 6036 - RNA, 1014 nt, Artificial Sequence
  derived and/or modified CDS sequence (opt11) from Pk(LT33)__ADN94523.1__CSP
augagaaacuucauacugcuggcgguaaguagcauacugcuaguggaccugcuaccgacacacuucgaacacaacguagaccuaagcagagcgauaaacgugaauggcgugagcuucaacaacguagacacaagcagcuuaggggcagcgcagguaaggcaaagcgcaagcagaggaagaggacuaggggaaaagagaaaagaaggggcagauaaagagaaaaagaaagaaaaagaggaggaaccaaagaaaccaaacgagaacaaacuaaaacaaccgggaggagaacaaccagcggcaggaggggaacaaccggcggcaggaggagaacagccagcggcagggggagagcaaccggcggcaggcggagagaggccagcagcaggaggagagcaaccggcagcgggaggggaacagccagcagcagggggagagcaaccggcggcagggggagaacagccagcggcgggaggagagagaccggcagcgggaggagaacagccugcggcgggaggagagcaaccggcagcaggaggggaaagaccagcggcgggaggggagcagccggcggcaggaggggaacagccagcgccagcgccgagacgagagcaaccggcagcaggaggggaacagccagcaccagcgccaagaagagagcagccggcaccgggggcgggggcaggagacggagcgagagggggaaacccaggggcagggaagggacaagggcaaaacaaccaaggagcaaacguaccaaacgaaaaaguagugaacgauuacuugcacaaaauaaggagcagcguaacgacagaguggacaccaugcagcguaacaugugggaacggaguaaggauaagacggaggcagaacgcgggaaauaaaaaggcagaggaccugacaauggacgaccuagagguagaggcaugcgugauggacaagugcgcgggaauauuuaacguagugagcaacagcuugggauugguaauacuacugguacuggcauuguucaacuga

SEQ ID NO: 6037 - RNA, 1014 nt, Artificial Sequence
  derived and/or modified CDS sequence (opt11) from Pk(LT64)__ADN94520.1__CSP
augaaaaacuucauacuacuggcaguaagcaguauacugcuaguggaccuguucccaacgcacuucgagcacaauguagaccuaaguagagcaauaaauguaaauggagugagcuuuaacaauguagacacaaguaguuuaggagcagcacaggugagacagagcgcaagcagagggagaggacuaggagaaaagccaaaggagggggcagauaaagagaaaaagaaagaaaaagaggaaaagccgaagaaaccgaacgagaacaagcugaagcaaccgggaggagaacagccagcggcagggggagaacaaccggcagcgggaggagaacagccggcggcagggggagaacaaccggccgcagggggagagcagccagcggcgggaggggaacagccggcagcgggaggggaaaggccagcggcgggaggggagcaaccggcagcgggaggggaacagccagcggcaggaggggagcgaccggcggcaggaggggaacagccagcggcaggaggggagagaccggcggcgggaggggaacagccagcagcaggaggggagcaaccagcagcaggcggggaacagccagcgcccgcgccaaggagagagcaaccggcagcaggaggggaacagccagcgccagcgccaaggagagagcaaccagcgccaggggcgggggcaggggauggagcgaggggaggaaaugcaggagcagggaaagggcaaggacaaaauaaccagggagcgaacgugccaaacgaaaagguagugaacgacuacuugcacaagauaaggagcagugugacgacggaguggacgccaugcagcguaacaugcggaaacggaguaagaauaagaaggaggcagaacgcggggaacaaaaaggcagaggaccuaacaauggacgaccuggagguggaagcgugcguaauggacaaaugcgcaggaauauucaauguggugagcaauagucuagggcuaguaauacuacugguacuagcacuauucaacuga

SEQ ID NO: 6038 - RNA, 1014 nt, Artificial Sequence
  derived and/or modified CDS sequence (opt11) from Pk(TB016)__AFG25473.1__CSP
augaaaaacuucauacuauuagcagugagcagcauacugcuaguggacuuguucccgacacauuucgagcacaacguagaucuaagcagagcgauaaauguaaauggagugagcuuuaacaauguagauacaaguagucugggggcggcacagguaaggcaaagcgcaucaagagggagggggcuaggggaaaagccgaaggaaggggcagacaaagagaagaagaaagagaaagaggaaaagccaaagaaaccaaacgagaacaagcuaaagcaaccaggaggggaacagccggcggcagggggagaacagccggcggcaggaggggagcaaccagcggcagggggagaacaaccggcggcgggaggagaaaggccagcggcagggggagagcaaccagcggcgggaggggaacagccggcggcgggaggggaacaaccggcagcgggaggggaacagccagcggccggaggggagagaccggcagcaggaggggaacagccagcggcaggaggggagcaaccggcagcagggggagagagaccggcggcgggaggggaacaaccggcagcaggaggggaacagccagcaccggcgccaagaagagaacaaccggcagcgggaggggaacagccggcaccggcaccaagaagagagcagccggcgccaggggcgggggcaggagauggagcacggggagggaacgcaggggcagggaagggacaagggcaaaauaaccagggagcaaaugugccaaaugaaaaaguagugaacgacuaccugcacaagauaaggagcaguguaacgacggaguggacgccauguagcguaacaugugggaacggagugagaauaaggaggagacagaacgcgggaaacaagaaagcagaggaccugaccauggacgaucuagagguagaggcguguguaauggacaaaugcgcgggaauauucaauguagugagcaauagucuggggcugguaauacuauugguauuggcauuguucaauuga

SEQ ID NO: 6039 - RNA, 1014 nt, Artificial Sequence
  derived and/or modified CDS sequence (opt11) from Pk(UM0021C10)__AHF20667.1__CSP
augaagaauuucauacucuuagcagugaguagcauauugcuaguagacuuguucccaacgcacuucgagcauaauguagaccuaaguagagcgauaaauguaaauggagugagcuuuaacaacguagauacgagcagccugggggcagcacaggugaggcaaagugcaaguagagggagagggcuaggggaaaaaccaaaggaaggggcggauaaagagaaaaagaaagaaaaagaggaaaagccaaagaagccgaacgaaaacaagcuaaaacagccagggggagaacagagcgcggcgggaggggagcagccggcagcggguggggagcagccggcggcgggaggggaacaaccggcggcagggggagaacagccggcggcagggggagagcagccggcagcgggaggagagaggccggcagcaggaggggagcagccggcagcgggaggggaacagccggcggcgggaggggagagaccagcggcgggaggggagcagccggcggcgggaggagaaagaccggcggcagggggagaacagccggcagcagggggagagcagccggcagcgggaggagaacagccggcgccggcgccgaggagggagcaaccagcggcgggcggggagcagccagcgccggcaccgaggagggaacagccggcgccaggggcgggggcgggggacggggcgaggggagggaacgcaggggcggggaaagggcaggggcagaacaaccagggggcaaacgugccgaaugaaaaaguggugaacgacuaccugcacaagauaagaaguagugugacgacagaguggacgccgugcagcgugacgugugggaacggggugagaauaagaaggaggcagaacgcggggaacaaaaaggcagaggaccugacgauggacgaccuggagguagaggcgugcguaauggacaagugcgcagggauauucaacgugguaagcaauagccuaggacugguaauacugcugguguuggcgcuguucaacuga

SEQ ID NO: 6040 - RNA, 1011 nt, Artificial Sequence
  derived and/or modified CDS sequence (opt11) from Pk(UMRAC2)__AHF20618.1__CSP
augaaaaacuucauacuacucgcaguaagcagcauacuccuaguagaccuccuaccaacacacuucgaacacaacguagaccugagcagggccauaaacguaaacggagugagcuucaacaacguagacacaagcagccucggggcagcgcaaguaagacaaagcgcaagcagaggaagaggacuaggcgaaaaaccaaaagaaggggcagacaaagagaaaaagaaagaaaaagaaaaagaagaggaaccaaagaaacccaacgaaaacaaacugaaacaaccagagggaaaccgagaagcaccagggcaacccgaaggcaacagagaagccccaggccaaccagaaggaaacagagaggccccgggacaaccagaaggaaaccgagaagccccgggccaaccagaaggcaaccgagaggccccaggacaaccagaaggaaaccgagaagcaccaggacaaccagaaggaaacagggaggccccaggacaaccagaaggaaacagagaagcaccggcacagccagaaggaaacagagaagcaccaggacaaccggaaggcaaccgagaggccccagcacaaccgcaaggcaacggaggagcgggacaagcgcaaccagaaggaaacagagaagcgccagcgcaaccacagggaaacggaggcgcagggcaagcacaaccacagaaaaacgaaggaggaaacgcaggagcaagaaaaggacaagggcaaaacaaccaaggagcaaacgugcccaacgaaaaagucgugaacgacuaccuacacaaaauaaggagcagcgucacaacagaauggacacccugcagcguaacaugcggaaacggaguaagaaucagaagaaaaggacacgcaggaaauaagaaagcagaagaccuaacaauggacgaccucgagguagaagcaugcgucauggacaaaugcgcgggcauauucaacgucguaagcaacagucuaggacugguaauccugcuaguacuagcacuauucaacuaa

SEQ ID NO: 6041 - RNA, 1008 nt, Artificial Sequence
  derived and/or modified CDS sequence (opt11) from Pk(UMANC1)__AHF20619.1__CSP
augaaaaacuucauauuacuagcaguaagcagcauacugcuaguagaccuacuaccaacacacuucgagcacaacguagacuuaagccgggcgauaaacguaaacggagugagcuucaacaacguagacacaagcagccuaggagccgcacaaguaaggcaaagcgcaagcagaggacgaggacucggagaaaagccaaaggaaggagcagacaaggagaaaaagaaagagaaagaaaaagaagaggaaccaaagaaaccgaacgagaacaagcuaaaacaaccggaaggaaacagagaagcgccagggcaaccggaagggaacagggaggcgccagggcaaccggagggaaaccgggaagcacccggccaaccagaagggaacagggaagcaccagggcaaccggaaggaaacagagaagcgcccggacaaccagaagggaacagagaagcaccaggccaaccagaaggaaacagagaggcgcccgggcaaccagaaggaaacagagaagcacccggacaaccggaaggaaacagagaagcaccaggacaaccggaaggaaacagagaagcaccaggacagccagaagggaacagagaagcgccagcacagccggaaggaaacagagaggccccagcacaaccacagggaaacggaggagcaggccaagcccagccgcagaaaaacgaaggaggcaacgccggggccagaaaaggacaagggcaaaacaaccaaggagcaaacgcgccaaacgaaaagguaguaaacgacuaccuacaaaagauaaggagcaguguaacgacagaauggaccccgugcagcguaacaugcggaaacggaguacggauaaaaagaaaagcgcacgcggacaagaagaaagcagaggaccuaacaauggacgaucuagagguagaggccugcguaauggacaaaugcgcaggaauauucaacguaguaagcaacagccuaggacugguaauccugcuaguacuagcacuauucaacuga

SEQ ID NO: 6042 - RNA, 1002 nt, Artificial Sequence
  derived and/or modified CDS sequence (opt11) from Pk(LT48)__ADN94505.1__CSP
augagaaacuuuauacuacuggcagugagcagcauauugcugguagaccugcuaccaacacacuucgagcacaauguagaccugagcagggcgauaaauguaaacggcgugagcuucaacaacguagacacaaguagccuaggagcggcacaaguaaggcagagugcaagcagagggagggggcuaggggagaagaggaaggagggggcggacaaagagaagaagaaagagaaagaggaggagcccaaaaagccgaacgagaacaagcugaagcagccgaacgcagaagggggagcaaacgcaggacagccgaacgcagagggaggagcaaacgcagggcaaccgaacgcggaaggaggggcgaacgcagggcagccaaacgcagagggaggggcaaacgcagggcagccgaacgcagaagggggagcgaacgcaggacagccaaacgcagagggaggggcgaacgcagggcaaccgaacgcagaagggggagcaaacgcgggacagccgaacgcagagggaggggcgaaugcagggcaaccaaacgcggaagggggagcgaacgcaggacaaccaaacgcagaaggaggggcaaacgcaggacaaccaaacgcggaaggaggagcaaacgcgagacagccacaggcggagggagggggagcgaacgcgagacagggagggaacgaggggaacaaacaggcggggaagggacaagggcagaacaaccagggggcgaacgcaccaaacgaaaaaguagugaacgacuaccuacagaaaauaaggagcaguguaacaacagaguggacgccaugcagcgugacaugcgggaacggcgugaggauaagaaggagagcgcacgcagacaagaaaaaggcagaggaccuaacgauggacgaccuagaaguagaggcaugcguaauggacaagugcgcgggaauauucaacguagugagcaauagccuagggcuaguaauacugcuaguacuagcauuguucaacuaa

SEQ ID NO: 6043 - RNA, 993 nt, Artificial Sequence
  derived and/or modified CDS sequence (opt11) from Pk(KH176)__ADN94486.1__CSP
augaagaauuucauauugcuagcggugagcaguauacuacuaguagaccuauucccgacgcacuucgaacauaacguagaccugagcagagcaauaaacgugaacggagugucauucaacaacguggacacaagcagccuaggggcagcgcaaguaagacagagcgcgagcagggggagagggcuaggagagaagccaaaagagggggcagacaaggaaaaaaagaaggagaaggaggagaagccgaaaaagccaaacgaaaacaaacugaaacaaccaggaggagagcagccggcggcggggggggaacaaccagcggcggggggggagcaaccggcggccggaggggaacagccggcggcgggaggggagcagccggcggcgggaggggaaagaccggcggcggggggagaacaaccagcggcggggggagagcagccagcggcagggggagaaaggccggcagcagggggagaacagccagcagcaggaggagagagaccggcagcggggggggaacagccagcggcagggggagagcaaccggcagcaggaggagaacagccggcaccagcgccgaggagagagcagccagcagcgggaggagaacaaccagcgccggcgccgaggagagagcagccagcgccgggagcaggagcgggagacggggcgagagggggaaacgccggggcaggaaaagggcaagggcaaaauaaccagggagcaaacguaccgaacgaaaagguagugaacgacuaucugcacaagauaaggaguagugugacaacagaguggacaccaugcagcguaacaugcgggaacggaguaagaauaagaaggagacagaacgcgggaaacaaaaaagcggaggaccuaacaauggacgaccuggagguagaggcguguguaauggacaagugcgcgggaauauucaacgugguaaguaacagccugggacugguaauacuacuaguacuagcacuguucaacuga

SEQ ID NO: 6044 - RNA, 993 nt, Artificial Sequence
  derived and/or modified CDS sequence (opt11) from Pk(LT36)__ADN94511.1__CSP
augaggaacuucauacugcuagcggugaguaguauacuauugguagaccugcugccgacgcacuuugagcauaacguggacuugagcagagcaauaaacgugaacggggugaguuucaauaacguggacacaagcagcuugggggcggcgcaagugaggcagagugcgagcagaggaaggggacugggggaaaaaaggaaagagggagcggacaaggaaaagaaaaaggaaaaggaagaaaaaccgaaaaagccgaacgagaauaaauuaaaacagccgggaggagaacaaccggcagcgggaggggaacaaccagcggcagggggggagcaaccggcagcgggaggggagcagccggcggcagggggagagcaaccagcggcggggggagaacagccagcggcagggggagagcaaccagcagcgggaggggaacagccagcggcggggggagagcaaccggcagcgggaggggaacagccagcggcagggggagagcaaccggcagcgggaggggaacaaccagcgccugcgccgaggcgagagcaaccggcggcggggggggagcagccagcagcggggggggagcaaccggcaccagcgccgaggagggaacagccagcaccaggaggggagcaaccggcaccaggggcaggggcgggggauggagcgagaggggggaauccaggagcggggaaagggcaaggacaaaauaaccagggagcgaacguaccaaacgaaaagguagugaacgauuaccugcacaagauaaggagcaguguaacgacggaauggacgccauguagcguaacaugugggaauggcgugaggauacggagaaaagcgcacgcggacaaaaagaaggcggagaaccugacaauggacgaccuagagguagaagcaugcguaauggauaaaugcgcgggaauauucaacguagugagcaauagccuaggacugguaauauuacugguauuggcgcuguucaacuga

SEQ ID NO: 6045 - RNA, 993 nt, Artificial Sequence
  derived and/or modified CDS sequence (opt11) from Pk(TB066)__AFG25475.1__CSP
augaagacacuauucuugcuagcaguaaguaguauacugcugguagacuuauucccaacgcacuucgaacacaacguggaccugagcagggcaauaaacguaaacggggugagcuucaacaauguagacacaagcagcuuaggggcagcacaagugagacaaagcgcgagcagagggagaggacugggagaaaagaggaaagagggagcggacaaggaaaagaagaaggagaaggaagagaaaccgaaaaagccaaacgaaaacaagcuaaaacagccaggaggggagcaaccggcagcaggaggggaacagccagcggcagggggagaacaaccggcagcgggaggagaacagccagcggcaggaggagagcaaccggcagcgggaggggagcagccggcggcaggaggagagcaaccggcagcaggaggggaacagccagcagcaggaggagaacaaccggcggcgggaggagaacaaccagcggcaggaggggagcaaccagcggcgggaggggaacagccggcaccggcgccaagaagggagcagccagcagcgggaggggaacagccggcagcaggaggggaacagccagcgccggcaccgcgaagggaacaaccggcggcaggaggggaacaaccagcgccgggggcaggggcgggagauggggcaagaggaggaaacccaggagcagggaaggggcagggacagaacaaccagggagcgaacgugccaaacgaaaaggugguaaacgacuaccugcacaagauaaggagcagcguaacgacggaguggacgccgugcagcgugacaugcggaaacgggguaagaauaagaagaaaagcgcacgcggacaagaagaaagcagagaacuugacaauggacgacuuagaaguagaggcgugcguaauggacaaaugcgcgggaauauucaauguagugagcaacagucugggacuggugauacugcugguacuggcgcuguucaacuga

SEQ ID NO: 6046 - RNA, 993 nt, Artificial Sequence
  derived and/or modified CDS sequence (opt11) from Pk(UM006C6)__AHF20642.1__CSP
augaaaaacuucauacugcuagcaguaagcagcauccuacugguagaccuacuaccaacacacuucgaacacaacguagaccuaagcagagcaauaaacguaaacggaguaaguuucaacaacguagacaccagcagccucggagccgcacaaguaagacaaagcgcaagcagagggagaggacuaggagaaaaaccaaaagaaggagcagacaaagaaaagaaaaaagaaaaagaagaagaaccgaaaaaaccaaacggaaacaaacuaaaacaaccagcaccgggaggagagcaaccggcaccaggcggagaacagccggcgccaggaggggaacagccagcccccggaggagaacaacccgcaccagggggagaacaacccgcaccaggaggcgaacaaccggcaccaggaggagaacaaccagccccaggaggcgaacaaccugcaccaggaggcgaacaaccagcaccaggcggagaacaaccggccccaggaggagaacaacccgcaccagggggagaacaaccagcaccagggggagaacagccggcaccggcaccacgaagagaacaaccagcaccaggcggcgaacaaccggccccaggaggcgaacaaccagcaccaagaagagaacaaccggccccaggcgcaggagcaggagacggcgcaagagggggaaacgcaggagcgggaaaaggccaaggacaaaacaaccaaggagcaagcguaccaaacgaaaaaguagugaacgacuaccuacacaaaauccgaagcagcguaacaacagaauggacaccaugcagcgucacaugcggaaacggcguacgaauaagaagaaaagcacacgcagacaaaaagaaagcggaagacuuaacgauggacgaccucgaaguagaagcaugcguaauggacaaaugcgcaggaaucuucaacguggugagcaacagccugggacuaguaauacuacuaguacuagcacuguucaacuga

SEQ ID NO: 6047 - RNA, 984 nt, Artificial Sequence
  derived and/or modified CDS sequence (opt11) from Pk(UM004C4)__AHF20641.1__CSP
augaaaaacuucauacuacuagccguaagcucgaucuuacuaguagaccugcuaccaacccacuucgaacacaaugucgaccuaagccgagcaaucaacgucaacgggguaagcuucaacaacguagacaccucaagccugggggcagcccaaguaaggcaaucagccagccgcgggcgagggcucggagaaaaacccaaagaaggagccgauaaagagaaaaagaaagaaaaaggaaaagaaaaagaagaagaacccaaaaaaccaaacgaaaacaaacuaaaacaaccaaacgagggccaaccacaagcccagggcgacggagcgaacgcaggacaaccccaggcccaaggcgacggagcaaacgcgggccaaccacaagcccaaggagacggagcaaacgcaggccaaccacaagcccaaggagacggagcaaacgcaggacaaccacaagcccaaggcgacggcgcaaacgcgggccaaccccaagcccagggcgacggagcaaacgccggccaaccccaagcacaaggagacggagcaaacgcaggccaaccccaagcccagggcgaccgagcaaacgcaggccaaccacaggcccaaggagacggcgcgaacgugcccagacaaggacgaaacggcggaggagcgcccgcaggcggcaacgagggcaacaaacaagcaggaaaaggacaaggacaaaauaaccaaggcgcaaacgcgcccaacgaaaaagucguaaacgacuaccuacacaaaaucagaagcucgguaacaaccgaauggacgcccugcagcguaacaugcggcaacggaguaagaauaagaagaaaagcacacgcaggaaacaagaaagcagaagaccuaaccguagacgaccucgaagucgaagcaugcguaauggacaaaugcgcgggcauauucaacguaguaagcaacagccugggcuuagucauacuccuaguacuagcccuuuucaacuga

SEQ ID NO: 6048 - RNA, 978 nt, Artificial Sequence
  derived and/or modified CDS sequence (opt11) from Pk(UMHAC5)__AHF20632.1__CSP
augaaaaacuucauacuacuagcgguaagcagcauacugcuaguggaccuacugccgacacacuucgagcacaauguagaccuaagcagggcgauaaacguaaacggagugagcuucaacaacguagacacaagcagucuaggagcagcacaaguaagacaaagcgcgagcaggggaaggggacuaggggaaaagccaaaggaaggggcagacaaagagaaaaagaaagagaaagagaaagaggaggaaccaaagaaaccgaacgaaaacaagcuaaagcaaccggaagggaacagggaagcgccagggcaaccagaagggaacagggaagcgccagggcaaccggaaggaaacagggaggcaccggggcaaccggaagggaacagggaagcgccagggcaaccagaaggaaacagggaagcgccagggcaaccagaagggaacagggaagcgccagggcaacccgaagggaacagagaggcgccagggcaaccggaaggaaacagagaagcgccagcgcaaccggaagggaacagagaggcgccggggcagccggaaggaaacagagaagcacccgcacagccggaaggaaacagagaaacgcccgcgcaaccgcaggggaacggaggagccggacaagcacagccacaaaagaacgaaggaggaaacgccggagcaaggaaagggcaaggacagaacaaccaaggggcaaacgcaccaaacgaaaagguaguaaacgacuaccugcagaaaauaaggagcagcguaacaacagaauggacaccgugcagcgugaccugcgggaacggagugagaauaaaaaggaaagcacacgcagacaaaaagaaagccgaagaccugacaauggacgaccucgagguagaggcaugcguaauggacaagugcgcaggaauauucaacguagucaguaacagccugggacuggucauacugcuagugcuagcacuguucaacuag

SEQ ID NO: 6049 - RNA, 978 nt, Artificial Sequence
  derived and/or modified CDS sequence (opt11) from Pk(UMSYC3)__AHF20626.1__CSP
augaagaacuucauauuacuggcggugagcagcauacugcuaguagaccuacuaccaacgcacuucgagcacaacguggaccucagcagagcgauaaacguaaacggagugagcuucaacaacguagauacaagcagccugggggcagcacaaguaagacaaagcgcaagcagagggagaggacuaggggaaaaaccaaaggaaggggccgacaaagagaaaaagaaagagaaagagaaagaagaggaaccaaagaaaccaaacgaaaacaaauuaaagcaaccagaaggaaacagagaagcgccagggcaaccggaggggaacagggaagcgccagggcaaccagaaggaaacagggaagcaccagggcagccagaagggaacagagaagcaccaggacaaccggaaggaaaccgggaagcgccggggcagccggaagggaacagagaagcaccggggcagccggaaggaaacagggaagcaccagggcaaccagaagggaacagggaagcgccagcacaaccagaaggcaacagagaagcaccagggcaaccggaagggaacagagaagcaccggcacaaccagaagggaacagggaagcgccagcacagccacaagggaacggaggagcaggacaggcgcaaccacagaaaaacgaaggagggaacgcgggggcgagaaaagggcaagggcaaaacaaccaaggcgcaaacgcgccgaacgaaaagguaguaaacgacuaccuacagaaaauaaggagcagcguaacaacagaguggacgccaugcagugugacgugcggaaacggggugaggauaaaaaggaaagcgcacgcagacaagaagaaagcagaggaccuaacaauggacgaccuagagguggaggcaugcguaauggacaaaugcgcaggaauauucaacguaguaagcaacagucugggacugguaauacugcuagugcuagcacuguucaacuaa

SEQ ID NO: 6050 - RNA, 966 nt, Artificial Sequence
  derived and/or modified CDS sequence (opt11) from Pk(LT33)__ADN94509.1__CSP
augaagaacuucauauugcuagcggugaguagcauacugcuaguagaccuacugccaacgcacuucgaacacaacguagaccugagcagggcgauaaacguaaacggagugagcuucaacaacguagacacgagcagccuaggggcagcgcaagugagacagagcgcaagcagaggaaggggacuaggggagaaaagaaaagaaggagcggacaaggaaaagaaaaaggaaaaggaagaagaaccgaaaaagcccaacgaaaacaaacugaaacagccagagcaagcgagggcgggaggggaacagccagcagcaggaggagagcagccggcggcaggaggggaacagccggcggcagggggagagcagccagcggcaggaggggaacaaccagcggcaggaggagagcaaccggcagcgggaggcgaacagccagcagcaggaggggagcaaccggcagcaggaggagaacagccagcagcagggggagagcaaccagcggcgggaggggaacagccagcaccggcgccaaggagagagcaaccagcggcgggaggggagcagccagcaccagcgccaagaagagagcaaccagcagcggguggggaacagccggcaccaggggcaggggcaggagacggggcgagaggagggaacgcgggagcgggaaaggggcagggacagaacaaccaaggagcaaacguaccaaacgagaaagugguaaacgauuaucuacauaaaauaagaagcagcgugacgacagaauggacgccgugcagcgugacaugugggaacgggguaaggauaaggaggaaggcacacgcagacaagaagaaggcggaaaaccuaacgauggacgaccuggaaguggaggcgugcguaauggacaaaugcgcagggauauucaacguaguaaguaacagccuagggcuaguaauacugcuaguauuagcgcuauucaacuag

SEQ ID NO: 6051 - RNA, 960 nt, Artificial Sequence
  derived and/or modified CDS sequence (opt11) from Pk(UM0032C4)__AHF20653.1__CSP
augaaaaacuucauacuacucgcagucagcagcauacuauuagucgaucuacuacccacacacuucgaacacaacguggaccuaagcagagcaauaaacguaaacggggucagcuucaacaacguagacacgagcagccuaggggcagcacaaguaagacaaagcgcaagcagaggaagaggacuaggagaaaaaccaaaagaaggggcggacaaagagaaaaagaaagaaaaagaaaaagaagaagaaccaaagaaaccaaacgaaaacaaacuaaaacaacccaacgcagagggagacggagcaaacgcaagacaaccaaacgcagaaggagacggagcgaacgcaagacaacccaacgcagagggagacggcgcaaacgcaagacaaccaaacgcagaaggagauggcgcaaacgcaagacaaccaaacgccgaaggagacggggcaaacgcgagacaaccaaacgccgaaggagacggagcgaacgcaagacaacccaacgcagagggaggaggagcgaacgcgagacagccccaagcagagggagacggcgcgaacgcaagacagccccaagcgcagggagacggcgggaacgcaagacagggcggaaacggaggaggagcaccggcaggaggcaacgaagggaacaaacaagcgggaaaaggacaaggacaaaacaaccaaggagcaaacgcaccaaacgaaaaagugguaaaugacuaccuacagaaaauaagaucaagcgugacaacggaauggacaccgugcucaguaauaugcgggaacggagucagaaucagaaggagagcacacgcagacaaaaagaaagcagaagaccuaacaauggacgacuuagaaguggaagcaugcguaauggacaaaugcgcaggaaucuucaacgugguaagcaacucgcuaggauucguaauacugcuagugcuagcacucuucaacuag

SEQ ID NO: 6052 - RNA, 951 nt, Artificial Sequence
  derived and/or modified CDS sequence (opt11) from Pk(SGEHIH1-im-Y09-80)__AFD97207.1__CSP
augaagaacuucauacugcucgcaguaagcucgauacuacugguagaccuacuaccgacgcacuucgaacacaacguagaccugagcagagcaauaaacgugaacggggucucguucaacaacguggacacgagcagucuaggggcggcgcaagugagacaaagugcaagcagaggaagagggcuaggagagaagccgaaagagggagacgacaaggaaaagaagaaagaaaaagaaaaagaagaggaaccgaagaaacuaaacgaaaacaacccgaaaaagccaaaugaagagggggacggagcaaaacugaaacaaccaaacgaagagggagacggggcgaaacugaaacagccaaacgcagaaggaggggcaaacgcagggcagccgaacgcagaagggggagcgaacgcgggacagccgaacgcagagggaggggcaaacgcaagacaaccgaacgcagaaggaggggcgaacgcggggcagccaaacgcggagggaggagcgaacgcggggcaaccaaacgcagaaggaggggcgaacgcaagacagccacaggcagaaggagggggagcgaacgcgagacagccacaggcagagggagggggagcaaacgcgagacagggagggaacgaagggaacaaacaggcagggaaagggcaagggcaaaacaaccagggggcaaacgcaccgaacgagaaaguagugaacgacuaccuacaaaagauaagaagcagcgugacaauagaguggacaccaugcagcguaacaugcggaaacggggugagaauaagaaggagagcgcaugcggacaaaaagaaagcagaggaccugacgauggacgaccuagagguggaggcaugcgugauggacaaaugcgcggggauauucaacguagugagcaacagccuagggcuaguaauacuacugguauuggcacuguucaacuaa

SEQ ID NO: 6053 - RNA, 939 nt, Artificial Sequence
  derived and/or modified CDS sequence (opt11) from Pk(LT33)__ADN94514.1__CSP
augaggaacuuuauacuacuagcaguaagcagcauacuacucguggaccuacugccaacgcacuucgaacacaacguagacuuaagcagagcaauaaacgugaacggagugagcuucaacaacguagacacgagcagccuaggggcagcgcaaguaagacaaagcgcaagcagaggaagaggacugggagagaaaagaaaagaaggggcggacaaagagaaaaagaaagaaaaagaagaagaaccaaagaaacccaacgaaaacaaacugaaacagccagaacaagcggcaccgggagcaggaggagaacagccagcgccgggagcaggaggagaaaggccggcgccaggggcagggggagaacaaccagcgccaggagcaggaggagaacaaccagcaccaggggcaggaggagaacaaccagcaccaggagcaggaggagagcagccagcagcagggggagaacagcccgcagcaggaggagaacaaccagcgccagcaccacgaagagaacaaccagcagcagggggagaacagccagcgccagcgccaagaagagaacaaccggcagcaggaggagaacaaccggcaccgggcgcaggggcaggagacggagcgagagggggaaacgcaggagcaggaaaaggacaggggcaaaacaaccagggagcgaacguaccaaacgaaaaagugguaaacgacuaccuacacaaaauaaggaguagcguaacgacagaauggacaccaugcagcguaacaugcggaaacggaguaagaauaagaaggaaagcacacgccgacaaaaagaaagcagaaaaccugacaauggacgaccuagagguggaggcaugcguaauggacaaaugcgcaggaauauucaacguaguaagcaacagccuagggcuaguaauacuacugguacuggcacuauucaacuaa

SEQ ID NO: 6054 - RNA, 894 nt, Artificial Sequence
  derived and/or modified CDS sequence (opt11) from Pk(SGEHIWM26-Y09-98)__AFD97239.1__CSP
augaaaaacuucauacuccuagcaguaagcucgauccugcuaguggaccuacuaccgacacacuucgagcacaacguggaccucagccgagcaaucaauguaaacggggucagcuucaacaacguagacacaucgagccuaggagcagcccaaguaagacaaucggcaagccgaggcagaggacuaggggaaaaaccaaaagaaggagcagacaaagagaaaaagaaagaaaaagaagaagaaccaaagaaaccgaacgaaaacaaacuaaaacaaccagacacgguaccaggaggggaagaaccagcgccaggaagagagcagccagcaccaggaagagaagaaccagcgccagggagagaacaaccggcaccaggaagagaagaacccgcgcccgggagagaacaaccggccccaggcagagaagaaccagcaccaggaagagaacaaccagcaccaggaagagaacagccagcgcccggacgagaggaaccggccccgggaagagaacagccggcgccagggagagaggagccagcaccggcaccgggagcaggagcaggagacggcgcgagaggagggaacgcaggagcagggaaaggacagggacaaaacaaccaaggcgcaaacguaccaaacgaaaaaguaguaaacgacuaccuacacaagauaaggagcucgguaacgaccgaauggacaccaugcagcgugacaugcggaaauggagugagaauaagaaggaaagggcacgcaggaaacaagaaagcagaagaccugaccauggacgaccuagaaguagaagccugcguaauggacaaaugcgcaggaauauucaacguaguaagcaacagccuaggacugguaauacucuuaguccuagcauuauucaacuaa

SEQ ID NO: 6055 - RNA, 801 nt, Artificial Sequence
  derived and/or modified CDS sequence (opt11) from Pk(KH296)__ADN94490.1__CSP
augaggaacuucauacugcucgcggucucaagcauacuacuggucgaccuccuaccaacgcacuucgaacacaacguagaccugagcagagccauaaacgugaacgggguaucguucaacaacguggacacgagcucgcucggggccgcgcaaguaagacagagcgcgagcaggggcaggggccuaggcgagaaaaggaaagagggcgcggacaaggaaaagaaaaaggaaaaggaagaggaaccgaaaaagccaaacgaaaacaaacuaaaacagccagagcaagcggccccgggcgcaggaggggaacaacccgcaccaggagccgggggcgagcaaccagcgccgggagcgggcggggaacagcccgcgccaggggccggaggagagcaaccggccccaggagcgggaggggaacagcccgcgccagcgcccagaagagagcaaccggcaccagcaccgggagcgggcgacggagcgcgagggggaaacgcaggggccgggaaagggcaagggcaaaacaaccagggagcgaacguaccaaacgaaaagguagugaacgacuaccuacacaagauaagaagcucagucacgaccgaguggacgcccugcagcgugaccugcggaaacggagugagaauaagaagaaaagcacacgcagacaaaaagaaagcagaagaccuaacaauggacgaccuagaggucgaggccugcgucauggacaaaugcgcgggcauauucaacguagugagcaacagccugggacuggucauacugcuaguccuggccuuauucaacuga

SEQ ID NO: 6056 - RNA, 801 nt, Artificial Sequence
  derived and/or modified CDS sequence (opt11) from Pk(LT33)__ADN94528.1__CSP
augagaaacuucauauugcuagcgguaucgagcauacugcuggucgaucuguugccgacgcacuuugaacauaacguggaccuaagcagggcaauaaacgugaacggagugaguuucaauaacguggacacgaguagucuaggggcagcgcaagugagacagagcgcgagcaggggaagaggacugggggagaaaagaaaagagggggcggacaaggaaaagaaaaaggaaaaggaagaggaaccgaaaaagccgaaugaaaacaaauugaaacagccggaacaagcggcaccgggagcgggaggggaacagccagcgccgggggcagggggagagaggccggcgccgggagcgggaggggaacagccagcgccaggggcgggaggggagagaccggcgccaggggcgggaggagagcagccagcgccggcgccaaggagggagcaaccggcgccagggccaggagcgggagauggggcgaggggagggaaugcaggggcagggaaagggcaagggcaaaauaaccaaggggcaaacgugccgaacgaaaagguagugaacgauuacuugcacaagauaaggagcucgguaacgacagaguggacgccauguagcguaacauguggaaauggggugagaauaagaagaaggcagaacgcgggaaauaaaaaggcagaggacuugacaauggacgaucuggagguagaggcauguguaauggacaagugcgcggggauuuucaauguagugagcaauagcuuggggcugguaauacuguuggugcuggcauuguucaauuga

SEQ ID NO: 6057 - RNA, 744 nt, Artificial Sequence
  derived and/or modified CDS sequence (opt11) from Pk(SGEHIWM4-Y09-8)__AFD97222.1__CSP
augaaaaacuucauacuacuagcaguaagcaguauacuacuaguagaccuacucccaacguacuucgaacacaacgucgaccuaagcagggcgauaaacguaaacggagugaguuucaacagcguagacacaagcagccugggagcagcccaaguaagacaaagcgcaagccgaggaagaggacugggagaaaaaccaaaagaaggagccgacaaagaaaaaaaaaaagaaaaagaaaaagaagaagagccaaaaaaaccaaacgaaaacaaacuaaaacaaccacaaggaaacgggggagcagggcaagcacaaccacaaggaaacggaggagccggacaagcacagccagaaggcaacagagaagcaccagcgcaaccacaaggaaacgggggagcaggacaagcacaaccacagaaaaacgaaggaggaaacgcgggagcaagaaaaggacaaggacaaaacaaccagggagcaaacgcaccaaacgaaaaaguaguaaacgacuaccuacaaaagauaagaagcagcguaacaaccgaauggacaccaugcagcguaacaugcggaaacggaguaagaauacgaagacgcgcacacgcggacaaaaaaaaagcagaagaccuaacaauggacgaccuagaaguagaagcaugcguaauggacaaaugcgcaggaauauucaacguaguaagcaacagccugggacuaguaauaagccuaguacuagcacuauucaacuga

SEQ ID NO: 6058 - RNA, 720 nt, Artificial Sequence
  derived and/or modified CDS sequence (opt11) from Pk(PT01)__ADN94512.1__CSP
augcgcaacuucauacuccuggcaguaagcucaauccugcuaguggaccuacucccgacacacuucgaacacaacgucgaccucucacgagcgaucaacguaaacggagugagcuucaacaacgucgacaccucgagccuaggagcggcccaggucaggcaaagcgcaucgagaggacgagggcucggagaaaagcgcaaggaaggggccgacaaagagaaaaagaaagaaaaagaggaagaacccaagaaaccgaacgagaacaaacucaagcaaccggaacaggccgcacccggggccggaggcgagcaaccggccccgggcgcaggcggggaacagcccgcgcccgcgccccggcgcgagcaaccggccccggccccaggcgcaggcgacggcgcacgaggaggcaacgccggggccgggaaagggcaagggcaaaauaaccaaggcgcaaacgugccaaacgaaaagguagugaacgacuaccuacacaaaauaaggagcucggucacaaccgaauggacacccugcaguguaaccugcggaaacggcgugagaauacgcagaaaagcacacgcagacaaaaagaaagccgaggaccuaaccauggacgaccucgaaguagaggcaugcgucauggacaaaugcgcaggcauauucaacgucguaagcaacagcuuaggacugguaauacuccuaguccuggcccuauucaacuga

SEQ ID NO: 6059 - RNA, 717 nt, Artificial Sequence
  derived and/or modified CDS sequence (opt11) from Pk(LT53)__ADN94502.1__CSP
augaaaaacuucauacuacuagcaguaagcagcauacugcuaguagaccuacuaccaacacacuucgaacacaacguagaccuaagcagagcaauaaacguaaacggagucagcuucaacaacguagacacaagcagccuaggggcagcgcaaguaagacaaagcgcgagcaggggaaggggacugggagagaaaccaaaagaaggagacgacaaagagaaaaagaaagaaaaagaaaaagaagaagaaccgaaaaaccuaaacgaaaacaaaccaaaacaaccaaacgcagaaggagacggagcaaaaccgaaacaaccaaacgcagaaggagacggagcaaacgcgagacaaccacaagcagaagggggaggcggaaacgcaagacagggaggaaacgaaggaaacaaacaagcaggaaaaggacaagggcagaacaaccaaggagcaaacgcaccaaacgaaaaagugguaaacgacuaccuacagaaaauaagaagcagcguaacgacagaauggacaccgugcagcguaacaugcggaaacggaguaagaauaagaaggagagcacacgcagacaagaaaaaggcagaagaccugacaauggacgaccuggaaguagaagcaugcguaauggacaaaugcgcgggaauauucaacguaguaagcaacagccuagggcuagugauacuacugguacucgcacuauucaacuaa

SEQ ID NO: 6060 - RNA, 702 nt, Artificial Sequence
  derived and/or modified CDS sequence (opt11) from Pk(SGEHIWM5-Y09-79)__AFD97229.1__CSP
augaaaaacuucauacuccuggccguaagcagcauccuacucguagaccuacuaccaacacacuucgaacacaacgucgaccucagcagagcaauaaacguaaacggaguaagcuucaacaacgucgacaccagcagccuaggagccgcacaaguccgacaaagcgcaagccgaggacgcggacuaggagaaagaccaaaagaaggagcagacaaggaaaaaaaaaaagaaaaagaaaaagaaaaagaagaaccaaaaaaacccaacgaaaacaaacuaaaacaacccgaacaaccagcagcaggagcaggaggagaacaaccagcacccgcacccagaagagaacaaccagcacccggagcaggagcaggcgacggcgcacggggaggaaacgcaggagcgggaaaaggacaaggacaaaacaaccaaggcgcaaacguaccaaacgaaaagguaguaaacgacuaccuccacaaaaucagaagcagcguaacaacagaauggacacccugcagcguaaccugcggcaacggaguacgaauacgcagaagacaaaacgcaggcaacaaaaaagccgaagaccuaacaauggacgaccuagaagucgaagccugcguaauggacaaaugcgcaggcauauucaacguaguaagcaacagccugggacuaguaauacuacucguccuagcacuauucaacuaa

SEQ ID NO: 6061 - RNA, 660 nt, Artificial Sequence
  derived and/or modified CDS sequence (opt11) from Pk(PT01)__ADN94513.1__CSP
augcgcaacuucauacuccuggccguaagcucgauccugcucguggaccugcucccaacccacuucgagcacaacgucgaccucucacgcgcaaucaaugucaacggagugagcuucaacaaugucgacaccucgagccugggcgcggcccaggucaggcaaucggccucgcgcgggcgcgggcuaggggaaaaacgcaaagaaggggccgacaaagagaaaaagaaagagaaagaggaggaacccaagaaaccgaacgagaacaagcucaagcaaccagaacaggccgcgcccaggcgcgagcaaccggccccagccccaggcgcgggcgacggagcacgcgggggcaaugcaggggccgggaaagggcaagggcaaaacaaccaaggcgcaaacgugcccaacgaaaaggucgugaacgacuacuugcacaagaucaggagcucggucacgaccgaguggacgcccugcagcgugaccugcggcaacggcguacgaauacgcaggaaagcgcacgcggacaagaaaaaggccgaagaccugacaauggacgaucucgaggucgaggccugcgucauggacaagugcgcgggaauauucaacguagugagcaacagccugggccuggucauacuccugguccuagcccuguucaacuga

SEQ ID NO: 6062 - RNA, 1290 nt, Artificial Sequence
  derived and/or modified CDS sequence (opt11) from Pm(408/Cameroon)__CAA05623.1__CSP
augaaaaagcucucaguauuagccauaagcucguuccuaauaguggacuuccucuucccaggguaucaccacaacaguaacagcacaaaaagcagaaaccuaucagaacugugcuacaacaacgucgacacaaaacucuucaacgagcuggaaguaagguacucgaccaaccaagaccacuucuacaacuacaacaaaacgauaaggcugcuaaacgaaaacaacaacgagaaagacgguaaugucacgaacgaacgcaagaagaaacccacgaaagcgguagagaacaaacuaaagcaaccacccggggacgacgacggggccgggaaugacgccggaaacgacgcaggaaaugcggccggaaacgcggcaggaaacgcagcagggaacgcggcaggaaacgcagccggaaacgaugcuggaaaugcggcaggaaacgcagccgggaacgcggccggaaacgcggccgggaacgcagcaggaaacgacgcagggaacgcagcagggaacgacgcaggaaacgcggcaggaaacgcggcaggaaacgcggcagggaacgcggcggggaacgcggccggaaacgacgcagggaacgcggcagggaacgcagccggaaacgcagcagggaacgccgccggaaacgcggcagggaacgcagcagggaacgcagcagggaacgcagcaggaaacgcggcaggaaacgcggcaggaaacgacgcaggcaacgcagcaggaaacgcggccgggaacgcggcaggaaacgcagccgggaacgcggcgggaaacgccgcaggaaacgcggcagggaacgcagcaggaaacgcggccggaaaugcggccgggaacgcggccgggaacgcggcagggaacgcggcagggaacgcagcaggaaacgcugccggaaacgcagcagggaacgcggcagggaacgcagccggaaacgagaaagcgaaaaacaaagacaauaaagucgacgcaaacacaaacaagaaagacaaucaggaggaaaacaacgauagcucgaacgggcccucggaggaacacaucaaaaacuaccuagaaucaauaagaaacagcauaacagaagaguggucaccaugcagcgugacaugcggaucgggaauaagaacgagaagaaaaguggaugcgaaaaacaagaaacccgcggaacugguacugagcgaucuugagaccgagauaugcagccuggacaaaugcucgagcauauucaacgucgugagcaauagccuaggaauaguccuagugcuaguacugauauuguuucacuga

SEQ ID NO: 6063 - RNA, 1290 nt, Artificial Sequence
  derived and/or modified CDS sequence (opt11) from Pm(Uganda 1-CDC)__AAA29557.1__CSP
augaagaaacucaguguacuagcaauaaguagcuuccugauaguagacuuccuauucccaggauaccaccacaacagcaacagcacaaaaucaagaaaccuaucggaacugugcuacaacaacguagacaccaaacuauucaacgaacuagaagugagguacucgacaaaccaagaccacuucuacaacuacaacaaaacaauaagacuacuaaacgaaaacaacaacgaaaaagacggaaacguaacaaacgaacgcaaaaagaaaccaacgaaagcaguagaaaacaaacuaaaacagccgccgggggacgaugacggcgccggaaacgacgccggaaacgacgccgggaacgacgcagggaacgcggcaggaaacgcagccggaaacgcagccgggaacgcagccggaaacgcggccgggaacgcagcaggaaacgcggccggaaacgcagcagggaacgcggcggggaacgcggccgggaacgaugcaggcaacgcagccgggaacgcagcaggaaacgcagcaggaaacgcggcagggaacgcagccgggaacgacgcaggaaacgcggccgggaacgcagcaggaaacgcggcaggaaacgcagcagggaacgcggcaggaaacgcggcaggaaaugcagcaggaaacgcagcaggaaacgcagccgggaacgcagccggaaacgacgcagggaacgcagcagggaacgcagcaggaaacgccgccgggaacgcggcaggaaacgcggcagggaacgcagcaggaaacgccgcaggaaacgcggccgggaacgcagcaggaaaugcagcagggaacgcagccggaaacgcggcagggaacgcagcagggaacgcggcuggaaacgcggcagggaacgcggcaggcaacgcagcagggaacgcagcagggaacgcggcggggaacgcagcagggaacgaaaaagcgaaaaacaaagacaacaaagucgacgcaaacacaaacaaaaaggacaaccaagaagaaaacaacgacagcuccaacggacccagcgaggaacacauuaaaaacuacuuggagucaauacggaacagcauaacagaagaguggucaccaugcagcguaaccugcggcagcggaauccgagcaagaagaaaagugggggccaaaaacaaaaagcccgcagaauuaguacugagcgaccuagaaacagaaaucugcagccuggacaaaugcagcagcauauucaauguaguaagcaacagucugggcaucgugcuaguacugguccugauauuauuccacuga

SEQ ID NO: 6064 - RNA, 1170 nt, Artificial Sequence
  derived and/or modified CDS sequence (opt11) from Pm(UG01)__SCN12386.1__CSP
augaaaaagcuaagcguacuagcaauaagcucauucuugauaguagacuuccuauucccaggauaccaccauaauagcaauagcacaaaaucgagaaaccucucggaacugugcuacaacaacguagacacaaagcuauuuaacgaacucgagguaagguacucgaccaaccaggaccacuucuacaacuacaacaaaacaauaaggcuacugaacgagaacaacaacgagaaagacggaaacgugacgaacgagaggaagaagaaacccacgaaagcgguagagaacaaacuaaaacaaccaccaggggaugaugacggggccggcaacgacgcagggaacgaugcagggaacgcggccggaaacgcggcaggaaaugcagcagggaacgcagcagggaacgacgcaggaaacgcagccggaaacgcagccggaaacgcggcagggaacgcggcagggaacgcggcagggaacgcggcaggaaacgcagccgggaacgcagccggcaacgcggcggggaacgcagcagggaacgcagccgggaacgcggccggaaacgcggcagggaacgcagccggaaacgcggcaggaaacgcggcagcgggaaaugccgcaggaaaugcagcgggcaacgcagcaggagcggcaggaaacgcggcagggaacgcggcaggaaacgcagccgggaacgcagcagggaacgccgcagggaacgcagcagggaacgcagccggaaacgcggccggaaacgcggccgggaacgcggcaggcaacgcagccgggaacgcagcagggaacgcggcagggaacgcagcagggaacgagaaagcgaagaacaaagacaacaaaguagacgccaacacaaacaaaaaggacaaccaagaagaaaacaacgacagcucgaacgggccaagcgaggaacacauaaagaacuacuuggaaucgauacgaaacagcauaacggaagaauggucaccaugcagcgugacaugcggaucgggaauacgagcaagaaggaaaguggacgcgaaaaacaagaaaccagcggagcuaguauuaagcgaccucgaaacagaaauaugcagccuggacaaaugcucgagcauauucaacgucgugagcaauucccuaggaauaguauuaguacugguauuaauacuguuccauuaa

SEQ ID NO: 6065 - RNA, 1170 nt, Artificial Sequence
  derived and/or modified CDS sequence (opt11) from Pm()__SCN12386.1__CSP
augaaaaaacuaucaguccuagcaauauccucauuccuaauaguggacuuccucuucccaggauaccaccacaacagcaacagcacaaaaucacgaaaccuaagcgaacuaugcuacaacaacguagacacaaaacuauucaacgaacuagaaguaagauacagcaccaaccaagaccacuucuacaacuacaauaaaacaauaagacuccugaaugaaaacaacaacgaaaaagacggaaacguaacaaacgagagaaagaaaaaaccaacaaaagcgguagagaauaagcucaaacaaccgcccggagacgacgacggagccggaaacgaugcagggaacgaugccgggaacgcagcaggaaacgcagcaggaaacgcagcgggaaacgcagccggaaacgacgcaggaaacgcagccggaaacgcagccggcaacgcagcaggaaacgcagcaggaaacgcggcaggaaacgcagccggcaacgcggccgggaacgcagcaggaaacgcagccggaaacgcagccggaaacgccgcaggaaacgcggccggaaacgcagccgggaacgcggcaggaaacgcagcaggaaacgcggcagcaggcaacgcagcaggaaacgcagcaggaaaugcggccggggcagccggcaacgcggcaggaaacgcagcagggaacgcagccggaaacgcagcugggaacgcagcagggaacgcagcaggaaacgcggcaggaaacgcagcgggcaacgcagcagggaacgcagcaggaaacgcggcaggaaacgcggcagggaacgcagcaggcaacgcagcgggaaacgaaaaagcgaaaaacaaagacaacaaaguagacgccaacacaaacaaaaaagacaaucaagaagaaaacaacgacagcagcaacggaccauccgaagaacacauaaaaaacuaccuagaaaguauaaggaacagcaucacagaagaauggagcccaugcagcguaacaugcggaagcggaauacgcgcacgcagaaaagucgacgcaaaaaacaaaaaaccagcagaacuuguacuaagcgaccucgaaaccgaaauaugcagucuagacaaaugcagcaguauauucaacguagugagcaacagccugggcauaguccuaguacuaguacugauacuauuccacuag

SEQ ID NO: 6066 - RNA, 885 nt, Artificial Sequence
  derived and/or modified CDS sequence (opt11) from Pm(PmlGA01)__SBT79431.1__CSP
augaaaaaacucagcguacuagccaucagcagcuuccuaauagucgacuuccuguucccaggauaccaccacaacucaaacagcacaaaaagcagaaaccuaagcgaacucugcuacaacaacguagacacaaaacuguucaacgagcuggaaguaagauacagcacaaaccaagaccacuucuacaacuacaacaaaacaauacgacuacucaacgaaaacaacaacgcaaaagacgggaacgugacaaacgaaagaaaaaaaaaaccaacaaaagcagucgaaaacaaacugaaacaaccaccaggagacgaagaagacgacgcagagaacggggaaggaaacgaaagaggaaacggagaaggaaacgaacgaggcaacggagaaggaaacgaaagaggaaacggcgaaggaaacgagagagggaacggagccggaaacgaaagaggaaacgacgccggaaacgcagccggcaacgcagccggaaacgacgccggaaacgcagcagggaacgcggcagggaacgcagcgggaaacgcagccggaaaugacgccggaaacgcggcaggaaacgcagcaggaaacgcagcaggaaacggagaaaacaacgacucaagcaacgggcccucagaagaacacauaaaaaacuaccuagagagcaucagaaacagcauaacagaagaguggagcccaugcagcguaacaugcggcaacggaauaagagcacgaagaaaaguggacgcgaaaaacaaaaaaccagcagaacuaguccuaagcgaccucgaaacagaaauaugcagccuagacaaaugcagcucaauauucaacgucguaagcaacagccuaggcauaguacuuguacucguacugauccuauuucacuaa

SEQ ID NO: 6067 - RNA, 1104 nt, Artificial Sequence
  derived and/or modified CDS sequence (opt11) from Poc(contig1754)__SBT00176.1__CSP
augcgaaaccucgcuaucuucgcaguaagcgcauuccuauucgccgacucccgcuaccccguauacgcacacaacggcaacucaaccgaaggccgcaaacucaacgaacuaugcuacaacaacgucgaccucuacaacacacucuucaacgaacucgacgucggaagcucaaccaaccaagcauucuuccuaaacagcaaaaaaacacucagacuccuaaacgaaaaccccaaagaaaacaaaaaaaaacgaaaagacgacaaaaagcccguagaaaacaaacuaaaacaaggcgaacgcgaaaacgacccacccgccccacguggagaaggcaacccccccgcaccccaaggcgaaggcaacccacccgccccacaaggcgaaggaaaccccccagccccacaaggcgagggcaaccccccagcaccacaaggagaaggaaacccacccgccccccgcggcgaaggcaaccccccagccccgcaaggcgaagggaaccccccagcaccccaaggcgaaggaaaccccccagccccgcaaggagaaggaaacccccccgcaccccgcggcgaagguaacccacccgccccacaaggcgaaggaaacccacccgcaccccagggagaaggaaacccccccgccccacaaggagagggcaacccacccgccgcccaaggcgaaggaaacccccccgccgcacaaggaaacggaaacccccccgcagcccaaggcaacggcaauccaccagccgcacagggaaacggaaacccacccgcacccgccggcaaaggcaagaacgaaaaccaaaaagaaaaagaagaaaaaaacgccgcaaacaacccuccaucagaagacgacauaaaaaaauacauagacaaaaucagaaacgacaucacugaaaacuggucccccugcagcguaaccugcggauucggaguaagagugcgccggaaagccggcgcaucagccaaaaaagcccaagaacucacccuaagcgaccucgaaaccgaaaucugcaaaauagaaaacugcucaagcauauucaacgucgucagcaacagccuaggacuaguaaucuuccuauuccuagucuucuuccacuaa

SEQ ID NO: 6068 - RNA, 888 nt, Artificial Sequence
  derived and/or modified CDS sequence (opt11) from Poc(GH01)__SBT84923.1__CSP
augcgcaaccucgcaaucuucgccguaagcgcauuccucuucgcagacucccgauacccagucuacgcccacaacggcaacagcacagaaggccgcaaacucaacgaacugugcuacaacaacgucgaccucuacaacacacucuucaacgaacucgacgucggcucauccaccaaccaagccuucuuccucaacagcaaaaaaacccuccgccuccucaacgaaaaccccaaagagaacaaaaaaaaacgcaaagacgacaaaaaacccgucgagaacaaacuaaaacaaggcgaacgcgaaaacgacccccccgcaccccaaggcgaagggaaccccccagccccccaaggagaaggcaacccaccagccccccaaggagaaggcaaccccccagccccccaaggcgaaggaaacccaccagccccccaaggagaaggcaacccgcccgccgcccaaggcgaaggaaaccccccagccgcccaaggaaacggaaacccaccagccgcccaaggaaacggcaaucccccagcagcacaaggaaacggaaacccccccgcacccgccggcaaaggcaaaaacgaaaaccaaaaagagaaagaagaaaaaaacgcagcaaacaacccacccucagaagacgacaucaaaaaauacaucgacaaaauacgaaacgacaucacagaaaacuggucacccugcuccguaaccugcggcuucggcguccgcguacgccgcaaagcaggcgccagcgcaaaaaaagcccaagaacuaacccuaagcgaucucgaaaccgaaaucugcaaaaucgaaaacugcuccagcaucuucaacgucguaagcaacagccucggccucgucaucuuccuauuccucguauucuuccacuga

SEQ ID NO: 6069 - RNA, 828 nt, Artificial Sequence
  derived and/or modified CDS sequence (opt11) from Poc(contig251)__SBS83173.1__CSP
augcgaaaccucgcaaucuucgccguaagcgccuuccuguucgcggacucacgauaccccgucuacgcacacaacggcaacuccacagaagggcgcaaacucaacgaacugugcuacaacaacgucgaccucuacaacacacucuucaacgaacucgacgucggaagcucaaccaaccaagccuucuuccuaaacagcaaaaaaacacuacgacucuuaaacgaaaaccccaaagaaaacaaaaaaaaacgcaaagacgacaaaaaacccguagaaaacaaacuaaaacaaggcgaacgcgagaacgaccccccagccccccgaggcgaaggcaacccacccgcaccccaaggcgaaggcaaccccccagccccacaaggagaaggcaacccacccgcaccccaaggcgagggcaaccccccagccccacaaggagaaggaaacccacccgccgcccaaggcgaaggcaacccacccgccgcccaaggaaacccccccgcacccgccggcaaaggcaaaaacgaaaaccaaaaagaaaaagaagaaaaaaacgcagccaacaacccacccucagaagacgacauaaaaaaauacaucgacaagauccgaaacgacaucacagaaaacuggucccccugcagcgucaccugcggcuucggaguacgcguacgccgcaaagcaggagcaagcgcaaaaaaagcccaagaacuaacccuauccgaccucgaaaccgaaaucugcaaaaucgaaaacugcucauccauauucaacgucguaagcaacagccucggccuggucaucuuccuauuccuagucuucuuccacuaa

SEQ ID NO: 6070 - RNA, 945 nt, Artificial Sequence
  derived and/or modified CDS sequence (opt11) from Pow(contig93)__SBT35133.1__CSP
augcgcaaccucgccauauucgcagucuccgccuuccuuuucgccgacuccggcuaucccgucuacgcccacaacggcaacuccauggaaggcagaaaacucaacgaacuaugcuacaacaacgucgaccucuacaacacacucuuugacggccucgacgucgaauccuccaccaaccaagccuucuuccucaauagcaaaaaaacacuccgacuccuuaacgaaaaccccaaagaaaacaaaaaaaaacgcaaagacgacaaaauaccuguagaaaacaaacugaaacaaggagaccgcgaaaacgauccccccgcacccgucccacaaggagacccccccgcccccguaccccaaggcgaccccccagcagccgucccccaaggcgacccccccgcucccgucccccaaggcgacccacccgccccccaaggagacccccccgcacccgucccccaaggcgacccccccgcccccgucccacaaggcgacccacccgcacccguaccccaaggcgacccccccgcacccgccccccaaggcgacccacccgcccccgccccccaaggcgacggcaaaccccccgcccccgccccccaaggcgacggcaaccaacccgcccccggcaaaggcaaauccgaaaaccaaaaagaaaaagacgaaaaaaacgcagccaacaacccccccuccgaagacgacaucaaaaaauacaucgacaaaauccgcaaagacaucaccgaaaacuggucccccugcucagucaccugcggccucggugucagaguccgaagaaaagccggagccucggccaaaaaagccaacgaacucacaaucaacgacguugaaaccgaaaucugcaaaaucgaaaacugcuccuccauauucaacgucgucuccaacuccaucggccuaguaaucuuccucuuccucgucuucuuucacuaa

SEQ ID NO: 6071 - RNA, 891 nt, Artificial Sequence
  derived and/or modified CDS sequence (opt11) from Pow(contig72)__SBT34702.1__CSP
augcgcaaccuagccaucuuugccgucuccgccuuccuuuucgccgacuccggcuaccccgucuacgcccauaacggcaacucaauggaaggccgcaaacuaaacgaacuaugcuacaacaacguagaccuauacaacacccucuucgacggacucgacgucgaaucaucaaccaaccaagccuucuuccuaaacuccaaaaaaacccuccgacuccuaaacgaaaaccccaaagaaaacaaaaaaaaacgcaaagacgacaaaauccccguagaaaacaaacucaaacaaggcgaccgcgaaaacgacccccccgcccccgucccacaaggcgaccccccagcccccgucccacaaggcgacccacccgccccagucccccaaggcgacccaccagcacccgucccacaaggcgacccccccgccccacagggcgacccacccgcacccgucccccaaggagacccccccgcccccgccccacaaggcgacccacccgcccccgccccccaaggcgacggcaaaccccccgcucccgccccccagggcgacggcaaccagcccgcccccggaaaaggcaaauccgaaaaccaaaaagaaaaagacgaaaaaaacgccgccaacaaccccccuuccgaagacgacauaaaaaaauacaucgacaaaauccgcaaagacaucaccgaaaacuggucccccugcucugucacauguggccuaggcguccgcguacgacgaaaagccggcgccucagccaaaaaagccaaugaacucacaaucaacgacgucgaaaccgaaaucugcaaaaucgaaaacugcuccucaaucuucaacgucguauccaacuccaucggacucguaaucuuccuauuccucguauucuuccacuaa

SEQ ID NO: 6072 - RNA, 1020 nt, Artificial Sequence
  derived and/or modified CDS sequence (opt11) from Po(PowCR01)__SBT72933.1__CSP
augagaaaccuagcaauauucgcagucuccgccuuccucuucgccgacuccggcuacccaguauacgcccacaacggcaacagcauggaaggccgaaaacucaacgaacuaugcuacaacaacgucgaccuauacaacacucuauucgacggccuagacguagaaucauccacaaaccaagccuucuuccuaaacuccaaaaaaacccuaagacuacucaacgaaaaccccaaagaaaacaaaaaaaaacgcaaagacgacaaaauccccguagaaaacaaacucaaacaaggcgaccgagaaaaugacccccccgccccugucccccaaggcgacccccccgcccccgucccccaaggcgacccccccgcagccgucccacaaggcgaccccccagcccccguaccccaaggcgaucccccagcaccccaaggcgacccacccgcccccgucccccaaggcgaccccccagcccccguaccccaaggcgacccacccgcuccugucccccaaggcaacccuccagcccccgucccacaaggcgacccccccgccccccaaggugacccccccgcccccgucccacaaggcgacccacccgccccagccccccaaggagaccccccagcaccagcaccccaaggcgacggcaaaccccccgcaccagcaccacaaggcgacggaaaccaacccgccccaggaaaaggcaaauccgaaaaccaaaaagaaaaagacgaaaaaaacgccgccaacaaccccccauccgaagacgacauaaaaaaauacaucgacaaaauacgaaaagacaucaccgaaaacuggucccccugcagcgucaccugcggccuaggcguccgaguacgacgcaaagccggugcaucagcaaaaaaagccaacgaacucacaaucaacgacguagaaacagaaaucugcaaaauugaaaacugcucauccaucuucaacgucgucucaaacuccaucggccuagucaucuuccucuuccucgucuuuuuccacuaa

SEQ ID NO: 6073 - RNA, 1164 nt, Artificial Sequence
  derived and/or modified CDS sequence (opt11) from Pv(Pt02.1)__ADB92551.1__CSP
augaaaaacuucauacuacuagcgguaagcagcauauuacuaguagaccuguucccaacacacugcgggcacaacguggaccuaaguaaagcgauaaaccuaaacggagugggauuuaacaacguagacgcgagcagccuaggggcggcacacguaggacaaagcgcaagcagaggaagagggcugggagaaaacccagacgacgaggaaggagaugcgaaaaaaaaaaaggacggcaagaaagcagagccgaaaaacccgagggagaacaaacuaaaacagccggaagacggagcaggagaccagccaggggcaaacggagcaggaaaccagccgggggcaaacggagcaggaaaccaaccgggagcgaacggagcaggaaaccaaccgggagcaaauggagcgggaaaccagccaggggcaaacggggcagggaaccaaccaggggcgaacggggcagggaaccaaccaggggcgaacggggcaggggaccagccaggagcaaacggagcggggaaccaaccaggggccaacggagcaggaaaccaaccgggagcaaacggggcgggagaccagccaggagcgaauggagcaggaaaccaaccaggagcgaacggagcgggggaccaaccgggggcgaacggagcaggaaaccagccaggggcaaacggagcaggaaaucaaccgggggcaaacggggcgggaaaccaaccaggagcaaacggagcaggaaaccaaccgggagcaaacggggcaggaggacaggcggccggaggaaacgcggcgaauaaaaaagcaggagacgcgggagcaggagggcaagcagccgggggaaacgcagcgaacaaaaaggcgggagaugcaggagcgggacaagggcaaaacaacgaaggagcgaacgcaccaaacgaaaagagcguaaaagaauaccuggacaaagugagagcaacgguagggacagaauggacgccgugcagcguaacgugcggagugggaguaagagugagaaggaggguaaacgcggcaaacaaaaaaccagaagaccuaacgcugaacgaccuagaaacagacguauguacaauggacaaaugcgcgggaauauucaacgugguaaguaacagccuuggacugguaauacuacuaguauuggcgcuguucaauuga

SEQ ID NO: 6074 - RNA, 1134 nt, Artificial Sequence
  derived and/or modified CDS sequence (opt11) from Pv(Salvador I (Sal-1))__XP_001613068.1__CSP
augaagaacuucauacugcuagcgguaagcagcauacuacugguggacuuauucccaacgcacugcggacacaacgucgaucugagcaaggcaauaaacuugaacggggugaacuucaacaacguggacgcgagcagccugggagcggcacaugugggacagagugcaagcagaggaaggggacugggagaaaacccggacgacgaagaaggggacgcgaaaaagaagaaggacgggaagaaagcagaaccgaaaaacccaagagaaaacaaacugaaacaaccaggagacagagcagaugggcagccagcgggagacagagcagacggacaaccagcaggggacagggcagacggacagccagcaggggacagggcagaugggcaaccggcaggagacagggcagcaggacagccagcaggagacagggcagacgggcaaccggcgggagacagagcagacggacagccagcgggagacagagcggacgggcaaccagcaggggacagggcagacggacaaccagcaggagacagagcagccggacaaccagcaggggacagggcagcgggacaaccggcgggagaccgagcagacgggcagccggcgggagacagggcggcaggacagccagcgggagacagggccgaugggcagccggcaggagacagagcggcagggcagccggcaggagauagagcggacggacaaccggcaggggacagggcggcgggacagccagcaggggacagggcggcaggacaaccagccggggacagggcagcgggacaagcagcgggagauagagcggcagggcaagcagcaggagggaacgcaggagggcaagggcaaaauaaugagggggcgaacgcaccgaacgagaaaagcguaaaagaauaucuggacaaagugagagcaaccguggggacagaauggacaccgugcaguguaacauguggaguaggaguaaggguacgaagaagagugaacgcggcaaauaagaagccggaagaccuaacgcugaacgacuuggagacggacguaugcacgauggacaaaugcgcagggauauucaacguaguaaguaacagccuaggacuggugauauugcuaguguuggcacuauucaacuag

SEQ ID NO: 6075 - RNA, 1092 nt, Artificial Sequence
  derived and/or modified CDS sequence (opt11) from Pv(P01)__SGX77278.1__CSP
augaagaacuucauacuguuggcagugagcucgauauugcugguggaccuauucccaacacauugcggacacaauguggaucuaaguaaagcaauaaaccugaacggggugaacuucaacaauguggaugcaucgagucugggggcagcgcauguaggacaaucggcgagcagggggagaggguuaggggaaaauccagacgacgaggaaggagacgccaaaaagaagaaagacgggaagaaagcagagccgaaaaacccaagggagaacaaacuaaagcagccggcaggagacagagcggacgggcagccggcgggagacagagcggacgggcaaccggcaggggauagggcagacggacagccagcgggcgacagagcggcggggcagccggcgggagacagggcugacggacagccagcgggggacagagcagcggggcaaccggcaggagacagagcagacgggcagccagcgggagauagagcagcggggcaaccggcaggagacagggcagacgggcagccagcaggagacagagcggcgggacaaccggcaggggacagagcggcggggcagccggcaggagauagagcggacgggcaaccggcgggggacagggcagcagggcaaccggcgggagacagagcagacggacaaccggcaggggacagagccgcagggcagccagcgggagacagggcagcggggcaaccggcgggaaacggagcaggagggcaagcagcaggagggaacgcagggggaaacgcgggagggaacgcgggaggaaacgcgggagggcagggacagaacaacgagggcgcgaacgcaccgaaugaaaagagcgugaaagaauaccuggacaagguaagggcgacgguagggacggaguggacgccguguaguguaacgugugggguaggagugcgaguaagaaggagagugaaugcggcgaauaagaaaccagaggaccuaacguuaaacgauuuggagacggauguaugcacaauggacaagugcgcaggaauauucaacguggugagcaauagccugggauugguaauacuguugguacuagcacuguucaauuga

SEQ ID NO: 6076 - RNA, 1188 nt, Artificial Sequence
  derived and/or modified CDS sequence (opt11) from Pv(Cam22)__AHL69650.1__CSP
augaagaacuucauacuacuagcaguaaguagcauauuacucguagaccuauucccgacacauugcggacacaacguagacuuaagcaaagcaauaaaccucaacggaguaggauucaacaauguagacgcaagcagccuaggagcggcacaugucggacaaagcgcgagcagaggaagaggacuaggagaaaacccagacgacgaagaaggagacgcgaaaaaaaaaaaggacggaaaaaaagcagagcccaaaaacccaagagaaaacaaacuaaaacaaccagaagacggggcaggaaaucaaccaggggcaaacggagcaggaaaccaaccaggagcaaacggagcgggaaaccagccaggggcaaacggagcggggaaccagccgggagcgaacggggcaggaaaccagccgggagcgaacggggcaggaaaccaaccaggcgcaaacggggcgggaaaccaaccgggagcaaacggagcggggaaccagccaggagcgaacggggcagacgaccaaccaggggcaaacggagcaggaaaccaaccgggggcaaacggagcaggaaaccaaccgggggcgaacggagcaggaaaccaaccaggagcaaacggggccggggaccagccgggagcaaacggggcaggaaaccagccgggggcaaacggagcgggagaccaaccgggggcgaacggagcagggaaccaaccaggagccaacggagcagggaaccaaccgggagcaaacggagcagggaaccagcccggagcgaacggggcaggaaaccaaccaggagcaaacggagccggaaaccaaccaggggcaaacggagcaggagggcaagcggcaggaggaaacgcagcgaacaaaaaagcaggagacgcaggggcagggcagggacaaaacaacgaaggggcaaacgcaccaaacgaaaagagcguaaaagaauaccuagacaaaguaagagcaacaguagggacggaauggacgccaugcagcgugacgugcggaguaggaguaagagugagaagaaggguaaacgcagcaaacaaaaaaccagaagacuugacgcuaaacgaccuagaaacggacgugugcacaauggauaaaugcgcaggaauauucaacguagugagcaacucacuaggacuaguaauacuacugguguuagcgcuguuuaacuaa

SEQ ID NO: 6077 - RNA, 1188 nt, Artificial Sequence
  derived and/or modified CDS sequence (opt11) from Pv(Cam29)__AGN05257.1__CSP
augaaaaacuucauacuauuagcaguaagcagcauacuauuagucgauuuauucccaacgcacugcggacauaacguagaccugaguaaagcaauaaaccuaaacggaguaggauucaacaacguagaugcaagcagccugggggcagcacacguggggcaaagcgcgagucgaggaagaggacugggagaaaacccagacgacgaagaaggggacgcgaaaaaaaaaaaagacggaaaaaaagcagaaccaaaaaacccccgagaaaacaaacugaaacaaccggaagacggggaaggaaaccagccaggggcaaacggagcaggaaaccaaccaggagcaaacggagcaggaaaccaaccgggggcaaacggggcagggaaccaaccaggagcaaacggagcagggaaccagccaggggccaacggggccggaaaccaaccaggagcaaacggagcggggaaccagccgggagcaaacggagcggacgaccagccgggagcaaacggagcgggaaaccaaccaggagcaaacggagcgggaaaccaaccgggagcgaacggagcagggaaccaaccaggagcaaacggagcaggggaccagccaggagcaaauggggcagggaaucagccaggagcgaacggagcggggaaccaaccaggagcgaacggggcaggaaaccagccaggagcgaacggggcaggaaaccaaccaggggcgaacggagcagggaaccaaccgggggcaaacggagcaggaaaccaaccgggagcaaacggggcaggaaaccaaccaggagcaaacggagcgggaaaccaaccaggggcaaacggagcaggaggacaagcagcaggaggaaacgcggcaaacaaaaaagcaggagacgccggggcagggcaaggacagaacaaugaaggagcaaaugcgccgaacgaaaaaagcguaaaagaguaccuagacaaaguaagagcaacaguaggaacggaauggacaccgugcagcguaacaugcgggguaggagugcgaguaagaaggagaguaaacgcagcgaacaaaaaaccagaggaccugacgcucaacgaucuggaaacagacgugugcacgauggacaagugcgcgggaauauucaacgugguaagcaacagccuagggcuaguaauauuguuaguccuagcacuauucaacuaa

SEQ ID NO: 6078 - RNA, 1188 nt, Artificial Sequence
  derived and/or modified CDS sequence (opt11) from Pv(Cam9)__AGN05240.1__CSP
augaaaaacuucauacugcuagcgguaagcaguauacuccugguagaccuauucccgacacacugcggacacaacguagaccuaagcaaagcaauaaaccuaaacggaguaggguucaacaacguagacgcgagcagccuaggagcagcacacguagggcaaagcgcaagcagaggaagaggacugggagaaaacccggacgacgaagaaggagacgcaaaaaaaaaaaaagacggaaaaaaagcagaaccaaagaacccaagagaaaacaaacuaaaacaaccugaagacggagcaggaaaccaaccaggagcaaacggagcgggaaaccagccaggagcaaacggggcgggaaaccagccaggggcaaacggggcagggaaccaaccaggagcaaacggggcaggaaaucagccaggggcgaacggagcaggaaaccaaccaggagcaaacggagcaggaaaccagccgggggcaaauggggcaggaaaccaaccaggggcaaacggagcggacgaccaacccggggcgaacggggcaggaaaccaaccaggggcaaacggggcagggaaccagcccggagcaaacggagcaggaaaccagccaggagcaaacggagcgggagaccaaccaggggccaacggagcaggaaaucaaccaggggcaaacggagcaggagaccagccaggagcaaacggagcaggaaaucaaccgggagcaaacggagcaggaaaccaaccaggagcgaacgaagcaggaaaucagccgggagcaaacggagcgggaaaccaaccgggagcaaauggagcgggaaaucaaccaggagcgaacggagcggggggacaagcagcgggaggaaacgcggcaaacaaaaaagcaggggacgcaggagcagggcaaggacaaaacaacgaaggggcaaacgcaccgaacgagaaaagugugaaagaauaccuagacaaagugagggcgacggugggaacggaauggacaccaugcagcguaacaugcggaguagggguaagaguacgaagaagaguaaacgcggcaaacaaaaaaccggaagaccugacgcuaaacgaccuggaaacagacguaugcacaauggacaaaugcgcgggcauauucaaugucguaagcaauucgcuaggacugguaauacuguuaguacuggcacuauucaauuaa

SEQ ID NO: 6079 - RNA, 1182 nt, Artificial Sequence
  derived and/or modified CDS sequence (opt11) from Pv(Ca05)__ADB92533.1__CSP
augaaaaacuucauacuacuagcgguaaguagcauauugcuaguagaccuauucccaacacacugcggacauaacguagaccugagcaaagcaaucaaccuaaacggggugggauucaacaacguagacgcaagcaguuugggagcggcccacgucggacaaagcgcaagcagaggaaggggacugggagaaaacccggacgacgaggagggggacgcgaaaaaaaaaaaagacggaaaaaaggcagaaccaaagaacccgagggagaauaaacuaaaacaaccagaagacggcgcaggagaccaaccaggggcaaacggagccggaaaccagccgggagcaaacggggcgggaaaccaaccgggagcaaacggggcggggaaucaaccaggagcgaacggagcggggaaccaaccaggagcaaacggagcagggaaccagccgggggcaaacggggcggggaaccaaccgggagcaaacggagcaggaaaucagccaggggccaacggagcagacgaucaaccgggagcaaacggggcagggaaccagccaggagcgaauggagcgggaaaccaaccaggggcgaacggggcagggaaccagccaggagccaauggggcaggagaccaaccgggggcaaacggggcaggaaaccagccaggggcaaacggagcgggagaccaaccgggagcaaacggggcagggaaccagccaggagcaaacggggcgggaaaccaaccaggagcaaacggagcagggaaccaaccgggggcaaacggagcaggaaaccaaccaggagcgaacggggcagggggacaggcagcgggagggaacgcagcaaauaaaaaagcaggagacgcgggaggaaacgcaggggggaacgcgggaggacaagggcaaaacaacgagggagcgaacgcgccaaacgaaaaaagcguaaaggaguaccuggacaaaguaagggcaacgguagggacagaauggacaccaugcagcguaacauguggaguaggaguaagagugagaaggagaguaaaugcagcaaacaaaaaaccagaagacuuaacauuaaaugaccuagaaacagauguaugcacaauggacaagugcgcaggaauauucaaugugguaaguaacagccuaggacuagugauauuacugguguuagcguuauucaacuaa

SEQ ID NO: 6080 - RNA, 1182 nt, Artificial Sequence
  derived and/or modified CDS sequence (opt11) from Pv(Ch05)__ADB92538.1__CSP
augaaaaacuucauacuacuggcaguaaguagcauccugcuaguagauuuauucccgacccacugcggacacaacguagaccuaagcaaagcgauaaaccuaaacggaguaggauucaacaacguagacgcaagcagcuuaggcgcagcgcacguaggacaaucggcaaguagggggagggggcugggggaaaacccagacgacgaagagggagacgcaaaaaaaaaaaaagacgggaagaaagcagaaccgaagaacccaagagaaaacaaacuaaaacaaccagaagacggagcgggggaucagccaggagcaaacggagcaggaaaccaacccggagcaaacggggcagggaaccaaccgggagcaaacggagcgggaaaccaaccgggagcgaacggagcaggaaaccagccaggggcaaacggggcagggaaccaaccaggggccaacggagccgggaaccaaccaggggcgaacggagcaggggaccaaccgggagcaaacggggcagacgaccaaccaggagcaaacggagcagggaaccaaccaggggcgaacggagcagggaaccaaccgggagcaaacggggcaggggaccagccaggagcgaauggagcaggagaccagccgggggcaaacggugcagggaaccagccgggagcgaauggagcgggagaucagccgggggcgaacggggcagggaaccagccaggagccaacggagcggggaaccaaccaggagcaaacggggcgggaaaccaaccaggagcaaacggggcaggaaaucaaccaggagccaacggggcagggggacaagcagcaggagggaacgcagcaaacaaaaaagcaggagaugcaggagggaacgcgggagggaacgcagggggacaaggacaaaacaacgaaggagcaaacgcgccaaaugaaaaaagcguaaaagaauaccuagacaaaguaagagcaacgguaggaacagaguggacacccugcaguguaacaugcggaguaggaguaagaguaaggaggagaguaaaugcggcaaauaaaaaaccagaagacuuaacauuaaacgaccuggaaacggauguaugcacaauggacaagugcgcaggaauauucaacguagugagcaacagccuagggcuagugauacuacugguauuggcacuguucaacuaa

SEQ ID NO: 6081 - RNA, 1173 nt, Artificial Sequence
  derived and/or modified CDS sequence (opt11) from Pv(Cam16)__AHL69649.1__CSP
augaaaaacuucauacuacuagcaguaagcaguauauuacugguagaccuauucccgacacacugcgggcacaacguagaccuaagcaaagcgauaaaccuaaacggggugggauucaacaacguagacgcgagcagucuaggggcagcgcacguggggcagagcgcaagcagagggaggggauugggagaaaacccggacgacgaagaaggagacgcaaagaaaaaaaaagacggaaaaaaagccgaaccaaaaaacccaagagaaaacaaacuaaaacagccagaggacggagcgggaaaccaaccgggagcaaacggagcagggaaccaaccaggggcgaacggagcagggaaccaaccgggagcaaacggcgcaggaaaccaaccgggagcaaacggggcggggaaccaaccaggagcgaacggagcaggaaaccaaccaggggcaaauggagcagacgaucaaccgggagcaaacggagcagggaaccaaccgggagcaaacggagcgggaaaccagccgggggccaacggagcaggaaaccaaccaggggcaaacggagcagggaaccaaccaggagcaaacggggcgggaaaccaaccaggagcaaacggagcaggagaccaaccaggggcaaauggagcaggaaaccaaccgggagcgaacggggcaggggaccagccaggagcgaacggagcaggaaaccaaccaggggcgaacggagcaggaaaccaaccaggagcaaacgaagcaggaaaccaaccaggggcaaacggggcgggaaaccaaccgggggcaaacggagcaggaaaucagccgggagcaaacggagcaggaggacaggcagcaggaggaaacgcaggagggaacgcgggaggacaaggacaaaacaacgaaggagcaaacgcgccaaacgaaaaaagcguaaaagaauaccuagacaaaguaagagcgaccgugggaacagaauggacaccaugcaguguaacaugcgggguaggagugcgaguaagaagaagagugaacgcagccaacaaaaaaccggaggaccuaacgcuaaacgaucuggagacagacgugugcacgauggacaagugcgcggggauauuuaacguaguaagcaacagcuuagggcugguaauacugcuagugcuagcacuauucaacuaa

SEQ ID NO: 6082 - RNA, 1170 nt, Artificial Sequence
  derived and/or modified CDS sequence (opt11) from Pv(Cam26)__AGN05254.1__CSP
augaaaaacuucauacuacuagcaguaagcaguauccuguuaguagaccuguucccgacgcacugcgggcacaacguagaccugaguaaagcgauaaaccugaacggaguaaacuucaacaacguggacgcaagcagcuugggagcagcacacguaggacaaagugcaaguaggggaaggggacuaggagaaaauccggacgacgaggaaggagacgcgaaaaagaagaaagacggaaagaaagcagagccgaaaaacccaagggaaaacaaacuaaaacaaccgggcgaccgagcggacgggcaaccagcgggggacagggcagacggacaaccagcgggagacagagcagacggacaaccagcaggagacagagcagcaggacagccagcgggagacagagcagacggacagccagcaggagacagagcagcggggcaaccggcgggagacagggcagcggggcaaccagcaggagacagggcagacggacagccggcaggcgacagagcagcaggacaaccagcgggagacagggcagcgggacaaccggcaggagacagggcagacgggcagccagcgggagacagagcagcaggacaaccagcgggagauagagcggacggacagccagcaggggacagagcagcaggacagccagcgggagacagagcggcagggcaaccagcgggagacagggcagacggccagccggcaggagacagagcggcaggacagccagcaggggacagagcagcaggacagccagcaggggacagggcggcgggacaaccggcaggaaacggggcgggaggacaggcggcaggagggaacgcagcaaauaaaaaggcagaagacgcaggaggaaaugcaggaggacaaggacaaaacaacgaaggggcgaaugcgccgaacgagaaaaguguaaaagaauacuuagauaaaguaagggcgacaguagggacagaauggacaccgugcagcgugacaugcggagugggaguaagagugagaaggcgaguaaacgcggcaaacaaaaagccggaagaucuaacacugaacgacauagaaacagacguaugcacgauggacaagugcgcgggaauauucaacguggugagcaacagccugggccuaguaauacugcuagugcuggcacuguuuaacuga

SEQ ID NO: 6083 - RNA, 1164 nt, Artificial Sequence
  derived and/or modified CDS sequence (opt11) from Pv(Ch01)__ADB92534.1__CSP
augaaaaauuucauacuauuggcaguaagcagcauauugcugguggauuuauucccgacgcacugcgggcacaauguagaucucaguaaggcgauaaaucugaacggaguaggguuuaacaacguagacgcgaguagccugggggcggcacauguagggcaaagcgcaaguagggggcgaggacuaggggaaaauccagacgacgaggaaggggacgcgaaaaagaagaaagauggaaagaaagcggagccgaaaaacccacgagagaacaaacuaaaacaaccggaagauggggcgggggaccaaccgggggcgaacggggcagggaaccagccgggggcaaacggagcgggaaaccaaccaggagcaaacggagcagggaaccagccaggggcaaacggcgcgggaaaucaaccgggggcgaacggggcagggaaccagcccggggcaaauggagcgggaaaccaaccgggagcgaacggagcaggaaaccagccaggggcaaacggagcggacgaccaaccgggagcgaacggggcaggaaaccagccaggggcaaauggagcaggcgaucaaccgggagcgaacggggcagggaaccagccaggggcaaauggagcgggggaucaaccgggagcgaacggggcaggaaaccaaccaggagcaaacggggcgggaaaccaaccgggggcgaacggggcagggaaccagccaggggcaaacggagcggggaaccagccgggagcaaacggagcagggggacaggcagcaggagggaacgcggcaaacaagaaagcaggagacgcgggcgcaggaggacaggcagcgggagggaacgccgcgaacaagaaagcgggggaugcaggggcaggacaaggacaaaauaacgagggggcaaacgcgccgaacgagaaaagugugaaagaauaccuagacaaagugagggcaacgguagggacagaauggacgccaugcagcguaacauguggagugggagugagagugaggagaagagugaacgcggcaaauaaaaagccagaggacuugacauugaacgaucuagaaacagacguauguacaauggacaagugcgcggggauauuuaacguagugagcaauaguuuaggguuggugauacugcuaguacuagcgcuguucaauuaa

SEQ ID NO: 6084 - RNA, 1164 nt, Artificial Sequence
  derived and/or modified CDS sequence (opt11) from Pv(Nr04)__ADB92542.1__CSP
augaaaaacuucauacugcuggcgguaagcagcauacuacucguggaccuauucccgacacauuguggacacaacguagaccuaagcaaagccauaaacuuaaacggaguaggauucaacaacguagacgcaaguagccugggagcagcacacguagggcaaagcgcaaguagaggaagagggcugggagaaaacccagacgacgaagaaggagacgcgaaaaagaagaaagacgggaagaaagcagaaccgaaaaacccaagagaaaacaaacuaaaacagccagaagacggcgcgggugaccagccgggggcaaacggggcggggaaccaaccaggagcaaacggagcaggaaaccagccgggggcgaacggagcgggaaaccaaccaggagcgaacggggcgggaaaccaaccaggagcgaacggagcaggaaaccaaccgggggcgaauggagcaggaaaccagccaggggcgaacggagcaggggaccagccgggggcaaacggagcggacaaccaaccaggagcgaacggagcagggaaccaaccaggggcaaacggggcagggaaccagccaggagcgaacggggcggggaaccaaccaggagcaaacggagcaggggaccagccgggagcgaauggagcaggaaaccaaccgggggcaaacggggcaggagaccaaccgggagcgaacggagcagggaaccaaccgggagcgaacggagcagggaaccaaccaggagcgaacggggcaggagggcaagcagcagggggaaacgcggcaaacaagaaagcaggagacgcgggagcgggagggcaagcggcagggggaaacgcggcaaacaagaaagcgggagaugcaggagcaggacaaggacaaaacaacgaaggagcaaaugcaccaaacgaaaagagcgugaaagaauacuuagauaaaguaagagcaacaguaggaacggaauggacaccaugcagcguaacgugcggaguaggaguaaggguaagaagaaggguaaacgcggcaaacaagaaaccggaagaccuaaccuuaaacgaccuagaaacggacgugugcacaauggacaaaugcgcaggaauauucaauguggugaguaauagccuagggcugguaauacugcuagugcuagcacuauucaauuga

SEQ ID NO: 6085 - RNA, 1164 nt, Artificial Sequence
  derived and/or modified CDS sequence (opt11) from Pv(Pt03)__ADB92553.1__CSP
augaaaaacuucauacuauuggcaguaagcagcauacugcuaguagaucuauucccgacacacuguggacacaauguagauuugaguaaagcaauaaacuuaaacggcguaggauucaacaacguggacgcaaguagucuaggagcagcgcacgugggacaaagcgcaagcagaggaaggggacuaggagaaaacccagacgacgaagaaggagacgcgaaaaagaagaaagaugggaagaaagcagaaccgaaaaauccaagagaaaacaaacugaaacaaccagaagacggggcgggagaccaaccaggcgcaaauggagcaggaaaccagccaggagcaaacggagcaggaaaccaaccaggagcaaacggagcgggaaaucaacccggggcaaacggggcaggagaccagccaggagcgaacggagcggggaaccagccaggggcgaacggagcaggagaccaaccaggagcaaacggagcaggaaaccaaccaggagcaaacggagcgggaaaccaaccaggagcaaacggagcgggaaaccaaccgggagcaaauggagcgggaaaccaaccgggggcgaacggggcgggaaaccaaccaggagcaaacggagcaggggaucaaccgggagcgaacggagcaggaaaccaaccgggagcaaacggagcgggaaaccagccaggggcaaacggagcgggaaaccagccgggagcaaacggggcaggaaaucaaccaggggcaaacggagcaggaggacaggcggcaggagggaacgcagcaaacaagaaagcaggggacgcaggagcaggagggcaggcagcagggggaaacgcagcaaacaaaaaggcaggagacgcgggagcagggcaaggacaaaacaacgaaggggcgaacgcaccaaaugaaaagagcguaaaagaauaccuggacaaaguaagagcaacaguaggaacggaauggacgccaugcagcguaacaugcggagugggaguacgggugagaagacgagugaacgcagcaaacaagaaaccagaagaccugacacugaacgaccuagaaacagacgugugcacaauggacaaaugcgcgggaauauucaacguaguaagcaacagucuagggcuaguaauacuguuaguacuagcacuauucaacuag

SEQ ID NO: 6086 - RNA, 1164 nt, Artificial Sequence
  derived and/or modified CDS sequence (opt11) from Pv(Vc03)__ADB92546.1__CSP
augaaaaacuucauacugcuagcggugagcaguauacugcugguagaccuauucccaacgcacuguggacacaacguggauuugagcaaagcaauaaaccugaacgggguaggguucaauaacguggacgcgagcagccuaggagcggcgcacguggggcagagcgcgagcagggggagaggguugggagagaacccggacgacgaagagggggacgcgaaaaagaagaaagaugggaaaaaggcagaaccgaagaaccccagagaaaacaaauuaaagcagccagaggacggggcaggggaucaaccgggagcgaacggagcgggaaaucaaccaggggcgaacggggcggggaaccagccaggagcaaacggggcgggaaaccaaccgggggcgaacggggcgggaaaccagccaggggcaaacggggcgggaaaccaaccgggggcaaacggggcagggaaccagccgggggcaaacggagcgggcgaucaaccgggggcaaacggggcagacgaccagccaggagcgaacggagccggaaaccaaccgggagcgaacggagcagggaaccagccgggagcaaauggggcaggaaaucaaccaggggcgaauggggcaggagaccagcccggagcaaauggagcggggaaccaaccgggagcgaacggggcaggaaaccaaccaggggcaaacggagcggggaaccaaccgggggcgaauggggcagggaaccagccaggggcaaacggggcaggaggacaagcggcgggagggaacgcagcaaacaagaaagcgggggacgcaggggcgggagggcaggcagcgggagggaacgcggcaaacaagaaagcaggggacgcaggggcggggcaaggacagaacaaugaaggggcgaacgcaccgaaugagaaaaguguaaaagaauaccuagacaaggugcgagcgacaguggggacggaauggacaccgugcaguguaacgugcgggguaggagugaggguaagaagaagagugaacgcagcgaacaagaagccggaagaucuaacgcugaacgacuuggaaacagacguaugcacgauggauaagugcgcagggauauucaacguaguaagcaauagccuagggcuagugauacuauuggugcuggcgcuauuuaacuag

SEQ ID NO: 6087 - RNA, 1164 nt, Artificial Sequence
  derived and/or modified CDS sequence (opt11) from Pv(Vc04)__ADB92547.1__CSP
augaaaaacuucauacuacuagcgguaagcaguauacugcuaguagacuuauucccgacacacugcggacacaacguagaccuaagcaaagcaauaaaccuaaacggaguaggauucaacaacguagaugcaagcagccuaggagcggcacacguaggacaaagcgcgagcaggggaagaggacugggggagaacccagacgacgaggaaggggacgcaaaaaaaaaaaaagacgggaaaaaagcagagccgaaaaacccaagagaaaacaaacugaaacagccggaagauggagcgggggaccagccgggagcaaacggggcagggaaccaaccaggggcaaacggggcgggaaaucaaccaggagcaaacggagcaggaaaucaaccgggggcaaacggagcaggaaaccaaccaggggcgaacggagcaggaaaucaaccgggagcaaauggggcaggaaaucaaccgggggcaaacggagcagacgaccaacccggagcaaacggagcaggagaccaaccaggggcgaacggggcaggcaaccagccaggggcgaauggcgcagggaaucaaccaggagcaaacggagcaggagaccagccaggggcaaacggagcaggggaccaacccggagcgaacggagcagggaaccaaccaggagcgaacggagcaggagaccaaccaggagcaaacggagcaggaaaccaaccgggggcaaauggagcaggaaaccaaccgggagcaaacggagcugggggacaagcagcgggagggaacgcggcaaacaaaaaagcgggagacgcgggagcaggaggacaagcagcaggggggaacgcggcgaacaaaaaagcaggagacgcgggagcagggcaagggcaaaauaacgaaggagcaaacgcaccaaacgagaaaagcguaaaagaauacuuagacaagguaagggcaacagugggaacagaauggacaccaugcagcgugacgugcggggugggagugagagugagaagaagggugaacgcggcaaacaaaaaaccagaagaccuaacgcuaaacgaccuagaaacagacgugugcacgauggacaaaugcgcgggaauauucaacguaguaagcaacagccuagggcuaguaauacuacuaguacuagcacuguucaacuaa

SEQ ID NO: 6088 - RNA, 1164 nt, Artificial Sequence
  derived and/or modified CDS sequence (opt11) from Pv(Vc05)__ADB92548.1__CSP
augaaaaacuucauacuacuagccgugaguucaauacugcuaguagaccuauuuccgacgcacugcgggcacaacguagaccugagcaaggcaauaaaucuaaacgggguaggauucaacaacguagaugcaagcagccugggagcggcccacguagggcaaagcgcaagcaggggaagaggacugggagaaaacccagacgacgaggaaggagacgcaaagaaaaagaaagauggaaagaaagcagaaccgaaaaacccaagggaaaacaaacuaaagcagccagaggacggggcgggagaccaaccaggagcaaacggagcgggaaaccaaccgggagcaaacggagcaggaaaucagccgggggcgaauggagcggggaaccaaccaggggcaaacggggcaggaaaccaaccgggggcaaacggagcgggaaaccaaccaggagcaaauggagcaggaaaccaaccgggagcaaacggagcaggggaccaaccgggagcgaacggagcagggaaccaaccgggagcaaacggggcgggaaaccaaccaggggcaaacggagcaggaaaccagccaggagcaaacggagcgggagaccaaccaggagcaaacggagcaggagaccagccaggagcuaacggagcagggaaccagccgggagcaaacggagcaggaaaccaaccaggcgcaaacggagcggggaaccaaccaggcgcaaacggagcgggaaaccaaccaggagcaaacggagcgggagggcaggcagcgggagggaacgcggccaacaaaaaggcaggggacgcgggggcaggaggacaggcagcgggaggcaacgcagcaaacaagaaagcgggagacgcaggagcagggcagggacagaacaacgaaggagcgaacgcaccgaacgagaaaagcguaaaagaauacuuagacaaagugagagcgacagugggaacagaauggacaccaugcaguguaacaugcggaguaggaguuagaguaaggaggagaguaaacgcagcaaacaagaaaccggaagacuuaacacuaaacgaccuggagacggacgugugcacaauggacaaaugcgcagggauauucaauguaguaaguaacucacuggggcuaguaauacugcuaguacuagcgcuauucaacuag

SEQ ID NO: 6089 - RNA, 1161 nt, Artificial Sequence
  derived and/or modified CDS sequence (opt11) from Pv(Ca03)__ADB92531.1__CSP
augaaaaacuucauacuacuggcggugaguagcauccuguuagucgaccuauucccgacacacugcggacacaauguagaccugagcaaagcaauaaaccugaacggagucggauucaacaacguggacgcaagcagucugggagcggcacacguagggcaaagcgcaagcaggggacggggacuaggcgaaaauccagacgacgaagagggagacgcgaaaaaaaaaaaagacggaaaaaaagcagaaccgaagaacccaagagaaaacaaacugaaacaaccagaagacggagccggagaccagccaggagcaaacggggcaggaaaccaaccgggagcaaacggggcagggaaccaaccaggggcgaacggagcaggcaaccaaccaggagcgaacggagcaggaaaccaaccgggggcaaacggagcaggaaaccaaccaggcgcaaacggagcaggaaaccaaccaggagcaaacggagcagacgaccaaccaggagcaaacggagcagacgaccagccaggagcaaacggagccggaaaccaaccgggagcgaacggggcaggaaaccaaccaggggcaaacggagcaggggaccaaccaggagcgaacggagcgggggaccaaccaggggcgaacggggcaggaaaccaaccgggcgcaaacggagcaggagaccaaccaggagcgaauggagcaggaaaccaaccgggagcaaacggggcgggaaaccaaccgggagcaaacggagcaggaaaccaaccaggagcaaacggagcaggaaaccaaccgggagccaacggagcaggaggacaagcagcagggggaaacgcggcgaacaaaaaagcaggagacgcaggaggaggacaaggacaaaacaacgaaggagcgaacgcacccaacgagaaaaguguaaaggaauaccuagacaaagugagagcaacgguaggaacagaauggacacccugcagcguaacaugugggguaggaguaagaguaagaagaaggguaaacgcagcaaauaaaaaaccagaagaucuaacccugaacgaccuagaaacagacgugugcacgauggacaaaugcgcaggaauauucaacguagugagcaacagccugggacuagugauacuguuggugcuagcacuauuuaacuag

SEQ ID NO: 6090 - RNA, 1161 nt, Artificial Sequence
  derived and/or modified CDS sequence (opt11) from Pv(Cam5)__AHL69647.1__CSP
augaaaaacuucauacuacuagcaguaagcagcauacugcuaguagaucuauucccaacacacugcggacacaacguagacuuaaguaaagcaauaaaccuaaacgggguaggauuuaacaacguagacgcaagcaguuuaggagcagcacacguaggacaaagcgcgaguagaggaagagggcugggggaaaacccagacgaugaagaaggggacgcgaaaaagaagaaagacggcaagaaagcagaaccgaaaaacccaagggaaaacaaacuaaaacagccagaagacggagcaggaaaccaaccaggggcaaacggggcaggaaaccaaccaggagcaaacggagcggggaaccaaccaggagcaaacggagcagggaaccaaccgggagcaaacggagcagggaaccaaccaggggcaaauggggcgggaaaucagccgggagcgaacggagcagggaaccaaccgggggcaaacggagcggacgaccaaccgggagcgaacggagccggaaaccaaccgggagcaaacggagcagggaaucaaccgggagcaaacggggcaggaaaccaaccgggagcgaacggagcgggggaccaaccaggagcaaacggggcggggaaccaaccaggagcgaacggagcgggagaccagccaggagcaaacggggcaggaaaccagccgggggcgaacggagcagggaaccagccaggggcgaacgaagcaggaaaucagccaggggcgaacggagcaggaaaccagccgggagcaaacggagcagggaaccaaccaggggcaaacggagcgggagggcaggcggcagggggaaaugcggcaaacaagaaagcgggagacgcaggagcagggcaagggcaaaacaacgaaggagcaaacgcgccaaacgagaaaagcgugaaagaauacuuagacaaagugagggcgacggugggaacagaauggacgccauguagcgugacaugcggcgugggaguaagggugagaagaagaguaaacgcagcgaacaagaaaccagaagaccugacacuaaaugaccucgaaacagacgugugcacgauggacaaaugcgcgggaauauucaacguaguaagcaacagccuaggacugguaauacugcuagugcuagcacuauucaacuga

SEQ ID NO: 6091 - RNA, 1161 nt, Artificial Sequence
  derived and/or modified CDS sequence (opt11) from Pv(Cam5)__AGN05236.2__CSP
augaaaaauuucauacuacuggcgguaagcagcauacugcuaguagacuuauuccccacgcacugcggacacaacguagaccuaagcaaagcaauaaacuuaaacggagugaacuucaacaacguagacgcaagcagucuaggagcggcacacguaggacagagcgcgaguagaggaaggggacugggggaaaauccggaugacgaagagggggacgcgaaaaagaagaaagaugggaagaaagcagaaccuaaaaacccaagagaaaacaaacuaaaacagccaggagacagagcagacggacagccagcaggagauggcgcagcaggacaaccggcgggggacggagcagcgggacagccagcaggagauagagcggcggggcaaccggcgggggacagggcggcggggcaaccagcgggggacggagcagccgggcagccagcgggagacggagcagcaggacagccggcaggagacagggcagcggggcaaccggcgggcgacagggcagcagggcagcccgcaggagauagagcagacgggcagccagcgggagacagagcagccggacaaccagcgggggacagagcagcaggacagccggcgggagacagagccgacgggcagccagcaggggacagggcggcaggacaaccggcaggagauagagcagcagggcagcccgcgggggacagagcagcaggacaaccggcgggggauagagcagacggacaaccagcaggagacagagcagcagggcaaccagcaggggacagggcagcgggacaaccggcaggagacagagcagcaggacaaccagcaggaaacggagcagggggacaagcggcaggaggaaacgcgggagggcagggacagaauaacgaaggggcgaacgcgccgaacgagaaaagcguaaaagaauaccuagacaaaguacgagcaacaguaggaacggaauggacaccaugcagugugacaugcggaguaggagugagggugaggagaaggguaaacgcagcaaacaagaaaccggaagaccuaacgcugaaugaucuagaaacagacguaugcacgauggacaaaugcgcgggaauauucaacguggugagcaacagucuaggguuaguaauacuauuaguacuagcguuguucaacuaa

SEQ ID NO: 6092 - RNA, 1161 nt, Artificial Sequence
  derived and/or modified CDS sequence (opt11) from Pv(Cam7)__AGN05238.1__CSP
augaaaaauuucauacuauuagcagugaguagcauacuacuaguagacuuauucccaacgcacugcgggcacaacguagaccuaagcaaagcaauaaaccuaaauggagugggguucaauaacguagacgcaaguucacuaggagcggcacacgucgggcaaagugcgaguagagggagagggcuaggggaaaauccagacgacgaagaaggagacgcaaaaaaaaaaaaagacgggaaaaaggcagaaccgaaaaacccgagagaaaacaaacuaaaacaacccgaagacggggcgggaaaccaaccgggagcaaacggagcaggaaaccaaccaggagcaaacggagcaggaaaccaaccgggagcaaacggagcaggaaaccaaccaggagccaacggggcaggaaaccaaccgggagcaaacggagcggggaaccaaccaggagcaaacggagcgggcaaccaaccaggagcaaacggagcagacgaccaaccgggggcgaacggggcgggaaaccaaccaggggcaaacggggcaggaaaccaaccaggagcaaacggcgcgggaaaccaaccgggagcaaacggggcaggaaaccagccgggggcaaacggagcaggagaccaaccaggagcuaacggggcagggaaucaaccaggagcaaacggcgcaggagaccagccaggagcaaacggggcagggaaccagccaggggcaaaugaggcagggaaccagccaggagcaaacggagcaggaaaccaaccgggggcaaacggggcaggaaaucaaccaggggcaaacggggcagggggacaagcagcaggaggaaacgcagcaaauaaaaaagcgggagacgcaggagcgggacaaggacaaaauaacgaaggagcaaacgcaccaaacgaaaaaagcgugaaagaauaucuagacaaaguaagagcgacgguagggacagaguggacaccaugcagugucacaugcggaguggggguacgagugaggaggaggguaaacgccgcgaacaaaaaaccggaagaccuaacauuaaacgaccuagagacagacguaugcacaauggacaaaugcgcagggauauucaacguagugagcaacagccuagggcugguaauacuucugguacuagcacuguucaacuag

SEQ ID NO: 6093 - RNA, 1161 nt, Artificial Sequence
  derived and/or modified CDS sequence (opt11) from Pv(CSP27VK247)__ANS71607.1__CSP
augaaaaacuucauccuauuagcgguaagcagcauacuauuaguggaccuauuuccaacgcacugugggcacaacguggaccuaagcaaggcgauaaaccuaaacgggguaggauucaacaacguggacgcgagcagccuaggagcagcgcacguagggcagagcgcaagcaggggaaggggacuaggggaaaacccagaugacgaagaaggagacgcgaaaaagaagaaagacggaaagaaagcagaacccaaaaacccaagggaaaauaaacuaaaacagccagaagacggagcagggaaccaaccaggagcaaacggagcgggagaucaaccgggagcaaacggggcgggaaaccaaccgggagcgaacggagcaggaaaccaaccaggggcaaacggggcaggaaaccagccaggggcaaacggcgcagggaaucaaccgggggcaaacggggcaggaaaccaaccgggagcaaacggagcgggggaccaaccaggagcaaacggggcaggaaaccaaccgggagcaaauggagccggaaaccaaccaggcgcaaacggggcggggaaccaaccaggagcaaacggagcaggagaccagccaggagcgaacggagcaggaaaccagccaggagccaacggagcaggagaccaaccaggagcgaacggggccggaaaccaaccaggagcaaacggagcggggaaccaaccgggagcaaacggggcagggaaucagcccggagcaaacggagcagggaaucaaccgggagcaaacggagcggggaaccagccaggggcgaacggagcaggaggacaagcggcgggcggaaacgcagcaaacaagaaagcgggagaugcaggggcggggcaaggacaaaacaacgagggagcgaacgcgccgaacgagaaaagcguaaaagaauaccuggacaaaguaaggacaacaguagggacagaauggacaccaugcagcguaacaugcggagugggagugagagugagaagacgagugaacgcggcaaauaagaaaccagaagaccuaacacuaaacgaccuagaaacagacguaugcacaauggacaaaugcgcaggaauauucaacguaguaagcaacagucuagggcuaguaauacugcuaguacuagcgcuauucaacuag

SEQ ID NO: 6094 - RNA, 1161 nt, Artificial Sequence
  derived and/or modified CDS sequence (opt11) from Pv(CSP38VK247)__ANS71618.1__CSP
augaaaaauuucauacuacuagcggugagcagcauauugcugguagaccuguucccaacacacugcggacacaacguggaccugaguaaagcgauaaaucugaacggaguaaacuuuaacaacguagacgcaagcagcuuaggagcggcacacguggggcagagcgcaaguagaggaagaggacuaggagagaacccggacgacgaagagggggacgcgaaaaagaagaaagacgggaagaaagcagaaccgaaaaacccaagagaaaacaagcugaagcaaccagaagacggagcaggagaucaaccgggagcaaacggggcaggaaaucaaccgggagcgaacggggcaggaaaccaaccgggagcaaacggagcaggaaaccaaccaggggcaaacggagcggggaaccagccgggggcgaacggagcaggaaaccaaccaggggcaaacggagcagggaaccaaccaggggcgaacggagcaggagaccaaccgggagcaaacggggcaggaaaccaaccgggagcgaacggagcaggggaccaaccgggagcgaacggggcgggaaaccagccaggagcgaacggagcgggaaaccaaccaggggcaaacggagcaggggaccaaccaggggcgaacggggcagggaaccaaccaggagcaaacggggcaggggaccagccgggagcgaacggagcagggaaccaaccgggagcaaacggagcgggaaaccagccaggagcgaacggggcagggaaccaaccgggggcaaacggggcggggaaccaaccaggagcaaauggagcaggaggacaggcggcaggaggaaacgcagcaaacaagaaagcgggggaugcaggagcaggacagggacaaaacaacgaaggggcaaacgcaccaaacgagaaaagcgugaaagaauacuuagacaaagugcgggcaacggugggaacagaauggacaccaugcagcguaacgugcggaguaggggugagaguaagaagaagaguaaacgcagcgaacaagaaaccggaagacuuaacacuaaacgacauagaaacggacguguguacaauggacaaaugcgcggggauauucaacguagucagcaauagccuggggcuagugauacuauuaguacuagcauuauucaacuag

SEQ ID NO: 6095 - RNA, 1161 nt, Artificial Sequence
  derived and/or modified CDS sequence (opt11) from Pv(CSP48VK247)__ANS71628.1__CSP
augaaaaacuucauccuacuagcagugucaagcauacugcugguagaccuguucccaacgcacugcgggcacaacguagaccuaagcaaggcaauaaaccuaaaugggguaggguuuaauaacguggacgcgagcagccuaggggcagcacacguaggacaaagcgcaagccgaggaagggggcugggagaaaaccccgacgacgaagagggagacgcaaaaaagaaaaaggacggaaaaaaagcagaaccaaaaaacccaagggaaaacaaacuaaaacagccagaagacggagcaggaaaccagcccggagcaaauggagcaggagaccagccaggagcgaacggggcaggaaaccaaccgggggccaacggagcaggcaaccaaccgggggcaaacggagcagggaaccaaccaggagccaacggagcaggaaaucaaccaggggcaaacggggcagggaaccagccgggagcgaacggggcaggcgaucaaccgggagcaaacggggcagggaaccagccgggggcgaacggagcagggaaccaaccaggagcgaacggggcagggaaccagccaggagcaaacggagcgggcgaccaaccgggagcgaacggagcagggaaccaaccaggagcaaacggagcaggggaccaaccaggagcaaacggagcagggaaccagccaggggccaacggcgcaggaaaucaaccaggagcgaacggagcaggaaaccagccaggagccaauggagcgggaaaccaaccaggggcaaacggggcaggaaaccaaccaggagcaaauggagcgggaggacaagcagcagggggcaaugcagcaaauaaaaaagcaggagacgcaggggcagggcaaggacaaaacaacgaaggagcaaaugcgccaaacgagaagagcguaaaagaauaccuagacaaaguaagagcaacaguagggacagaauggacaccauguagcguaacaugcggcguaggaguaaggguaagaaggagagugaacgcagcaaauaaaaaacccgaagaccuaacccuaaacgaucuggaaacagauguaugcacaauggacaaaugcgcgggaauauuuaauguaguaagcaacagccuaggacuaguaauauuacugguacuagcacuauucaacuga

SEQ ID NO: 6096 - RNA, 1161 nt, Artificial Sequence
  derived and/or modified CDS sequence (opt11) from Pv(Nr01)__ADB92539.1__CSP
augaagaacuucauacuacuagcaguaucgaguauacugcuaguagaccuguucccaacgcacugcggacacaacguagaccugaguaaggcaauaaacuugaacggagugggauucaauaacguagacgcaagcaguuuaggggcagcacacgugggacagagcgcaagcaggggaaggggauuaggagaaaacccggacgaugaagaaggagacgccaaaaaaaaaaaagacggaaaaaaggcagaaccgaaaaacccaagggaaaauaaacugaaacagccggaggacggggcuggagaccaaccaggagcaaacggggcaggaaaccaaccgggagcaaacggggcagggaaccagccgggagcaaauggagcaggcaaccaaccaggagcaaacggagcagggaaccagccaggggcaaacggagcagggaaccaaccgggagcaaacggggcaggaaaccagccgggagcaaacggagcgggagaccaaccgggagcaaacggagcggacgaccaaccaggagcaaacggagcgggaaaucagccaggagcgaacggagcaggaaaccagccaggagcaaacggagcaggggaucagccgggagcaaacggagcaggagaccagcccggagcaaacggagcagguaaccaaccaggcgcaaacggagccggagaccagccaggagcgaacggagcaggcaaccagccaggagcaaacggggcagggaaccaaccaggggcgaacggagccggagggcaaccgggagcaaacggggcaggaaaucaaccaggggcaaacggagcaggagggcaagcagcagggggaaacgcggcgaacaaaaaagcaggcgacgcaggggcagggcaagggcaaaacaacgaaggagcaaacgcaccgaacgaaaaaagcguaaaagaauaccuagacaaagugagggcaacgguagggacagaguggacgccaugcagcgugacgugcggaguagggguaagaguaagaagacgaguaaacgcagcgaacaaaaaaccagaagaccuaacacuaaacgaucuagaaacagauguaugcacaauggacaaaugcgcggggauauuuaacguggugaguaacagcuuagggcugguaauauuacuggugcuggcgcuauucaacuga

SEQ ID NO: 6097 - RNA, 1161 nt, Artificial Sequence
  derived and/or modified CDS sequence (opt11) from Pv(Nr02)__ADB92540.1__CSP
augaaaaacuucauacuacuagcaguaagcagcauacuauuaguagaccuauucccaacacacugcggacacaacguggaccuaaguaaagcaauaaaccucaacgggguaggguucaacaacguggacgccagcagccuaggggcagcgcacguaggacaaagugcaagcagaggaagaggacuaggggagaacccagacgacgaggaaggggacgcgaagaaaaagaaagacgggaagaaagcagaaccgaaaaauccgagagaaaacaaacuaaaacaaccagaagacggagcaggagaccagccaggggcgaacggagcggggaaccaaccaggggcaaacggagcaggaaaucaaccaggagcaaacggggcagggaaccaaccgggagcaaacggagcaggaaaccaacccggagcaaacggggcagggaaucaaccaggggcaaacggagcggggaaccaaccgggggcaaacggggcgggagaccagccaggggcaaacggggcaggagaccaaccgggagcaaauggagcgggaaaccaaccaggagcaaacggagcagggaaccaaccaggagcaaacggagcgggagaccaacccggagcaaacggagcaggagaucaaccaggagcaaauggagcgggaaaccaaccgggggcaaauggagcgggagaccaaccaggagcaaauggagcgggaaaccagcccggagcaaacggagccgggaaccaaccaggggcaaacggcgcagggaaccaaccgggagcaaacggagcagggaaacagccaggggcaaacggggcaggaggacaagcggcaggaggaaacgcggcaaacaagaaagcaggagacgccggagcggggcaagggcaaaacaacgaaggagcaaacgcgccaaacgagaaaagcguaaaagaguaccuagacaaagugagagcaacgguagggacagaauggacaccaugcagcguaacgugcggcgugggaguaaggguaaggaggagaguaaacgcagcaaacaaaaagccagaagaccugacacuaaacgaccuagaaacagacguauguacaauggacaaaugcgcagggauauucaacguaguaagcaacagccuagggcugguaauauugcuaguacuagcgcuauucaacuaa

SEQ ID NO: 6098 - RNA, 1161 nt, Artificial Sequence
  derived and/or modified CDS sequence (opt11) from Pv(Nr05)__ADB92543.1__CSP
augaaaaacuucauacuacuagcgguaaguaguauacugcuaguagaccuauucccgacacacugcggacacaacguagaccucaguaaagcaauaaaccuaaacggggugggauucaacaacguagacgcgagcucgcugggagcggcgcacguggggcaaagcgcaagcagggggagaggacugggggaaaacccagaugacgaggaaggagacgcgaaaaagaagaaagacgggaagaaagcagagccgaaaaacccaagggaaaacaaacuaaaacaaccagaagacggagcaggagaccaaccaggagcaaacggagcaggaaaucaaccaggagcaaacggagcaggaaaccagccaggggcaaacggagcgggaaaccaaccaggagcaaacggagcagggaaccaaccaggagcaaacggagcaggcaaccaaccgggggcaaacggggcgggaaaccagccaggagcgaacggggcgggaaaccaaccgggagcaaacggagccgaugaccaaccaggcgcaaauggggcaggaaaucaaccgggagcaaauggggcgggaaaccagccaggggcaaacggugcaggaaaccaaccaggagcgaacggagcaggggaccagccaggagcaaacggagcgggaaaccaaccgggggcaaacggagcaggagaucagccaggagcaaacggagcgggaaaucagccgggagcaaacggagcaggaaaccagccaggagccaauggagcggggaaccaaccaggggcaaacggagcaggaaaucaaccaggagcaaacggagcaggagggcaagcagcaggaggaaacgcagcaaacaagaaagcgggagacgcaggagcagggcaaggacaaaacaacgaaggagcaaacgcaccaaaugagaaaagcguaaaagaauacuuggacaaggugagggcaacaguaggaacagaauggacaccaugcagcgugacaugcggaguggggguaagaguaagaagaagaguaaacgcagcaaacaagaaaccggaagaccugacacuaaacgaccuggagacagacgugugcacaauggacaaaugcgcaggaauauucaacguggugagcaacagcuuagggcugguaauacuauuagugcuagcacuauucaacuag

SEQ ID NO: 6099 - RNA, 1161 nt, Artificial Sequence
  derived and/or modified CDS sequence (opt11) from Pv(Vc01)__ADB92544.1__CSP
augaaaaacuucauacugcuggcagugagcagcauacuacugguagaccuauucccaacgcacugcggacacaauguagaccuaagcaaagcgauaaaccugaacggggugggguucaacaacguggacgcaagcagucuaggggcggcacacguaggacaaagugcgagcaggggaagaggauuaggggaaaauccagacgacgaagaaggggacgcgaaaaagaagaaagacggaaagaaagcagaaccgaaaaacccaagggaaaacaaacugaaacagccagaagacggagcaggagaccaaccgggggcgaauggagcggggaaucaaccgggggcaaacggggcaggaaaucagccaggagcaaacggggcgggaaaccaaccaggagcaaacggggcaggaaaccagccaggggcaaacggggcaggaaaccaaccgggggcgaacggcgcaggaaaccagccgggagcaaauggagcaggaaaucaaccaggagcgaacggagcggacgaccaaccgggcgcaaacggagcaggaaaccaaccaggagcaaacggagcaggaaaccaaccaggagcaaacggagcaggcaaccaaccaggagcaaacggggcaggggaccagccaggggcgaacggagcgggaaaccaaccaggggcaaacggagcgggagaccagccaggagcaaacggggcggggaaccaaccgggagcaaacggggcggggaaccagccgggggcaaacggagcagggaaccagccaggagcaaacggggcgggaaaccaaccgggggcaaacggggcagggggacaggcggcgggagggaacgcggcaaacaagaaagcaggggacgcaggaggaggacaagggcaaaacaacgagggggcgaacgcgccgaacgagaaaagcgugaaagaauaccuggacaaaguaagagcgacgguaggaacggaauggacgccaugcaguguaacaugcggaguaggaguaagaguaagaaggaggguaaacgcagcaaacaagaaaccagaagaccugacacuaaacgaccuagaaacagacguaugcacaauggacaaaugcgcaggaauuuucaacguaguaagcaacagccuagggcuaguaauacugcuaguacuggcacuauucaacuga

SEQ ID NO: 6100 - RNA, 1161 nt, Artificial Sequence
  derived and/or modified CDS sequence (opt11) from Pv(Vc02)__ADB92545.1__CSP
augaagaacuucauacugcuagcagugaguaguauacuauuaguagaccuauucccaacgcacugcggacacaacguugaccugagcaaagcaauaaaccugaacggcgugggauucaauaauguggacgcaagcagucugggagcagcgcacguaggacagagcgcgagcaggggaaggggacuaggagagaacccggacgacgaggagggagaugcaaagaaaaagaaagaugggaaaaaggcagagccgaaaaacccaagggagaacaaacuaaaacaaccagaggacggggcaggagaccagccaggagcaaacggagcagggaaccagccaggagcgaacggggcaggaaaccagccaggagcaaacggggcggggaaucaaccgggggcgaacggagcaggaaaccaaccaggagcgaacggggcagggaaucaaccaggggcaaacggggcagggaaccaaccaggagcaaacggcgcaggagaccaaccgggagcaaacggagcagacgaccagccaggggcaaacggagcgggaaaccagccaggagcgaacggagcagggaaccagccaggagcaaacggggcaggagaccagccaggagcaaacggagcaggggaccagccgggagcaaacggagcaggaaaucaaccaggagcgaacggagccggagaccaaccaggagcgaacggagcaggaaaccaaccgggagcaaacggagcaggaaaucaaccaggagcgaacggggcagggaaccaaccaggagcaaacggggcaggaaaccaaccgggagcaaacggagcaggagggcaggcggcaggagggaaugcggcaaacaaaaaggcaggggacgcgggggcaggacagggacaaaacaacgaaggagcaaacgcaccgaacgagaaaagcguaaaagaauaucuagacaagguaagggcaacaguaggaacagaauggacaccgugcagcguaacgugcggaguaggagugagagugagaagaaggguaaacgcagcaaacaaaaagccggaggaccugacauuaaacgaccuggaaacagacguaugcacaauggacaaaugugcaggaauauucaacgugguaagcaauagccuaggccugguaauacuacugguacuagcauuauucaacuaa

SEQ ID NO: 6101 - RNA, 1158 nt, Artificial Sequence
  derived and/or modified CDS sequence (opt11) from Pv(Cam46)__AHL69652.1__CSP
augaaaaacuucauacuacuagcagugagcaguauacuacuaguagacuuguucccaacccauugcggacacaauguagaccuaaguaaagcaauaaaccuaaacggaguaggauucaacaacguggacgcaagcagccugggagcagcacacguaggacaaagcgccucaagaggaaggggacuaggggaaaacccagaugacgaagaaggagacgcgaagaaaaaaaaagacgggaaaaaagcggaaccaaagaacccaagagagaacaaacuaaaacagccggaggacggagcgggaaaccaaccaggagcgaacggagcagggaaccaaccaggagcgaacggagcagggaaccaaccaggagcgaacggagcagacgaccaaccaggagcgaacggagcgggaaaccaaccaggagcaaacggggcagguaaccaaccaggggcaaacggcgcgggaaaccaaccaggagcaaacggagcagggaaccaaccaggggcaaacggagcagacgaccagccaggcgcgaacggggcaggaaaccaaccaggggcaaacggagcagggaaccagccgggagcgaacggggcaggaaaccagccaggagccaacggagcaggagaccaaccaggagcaaacggagcagggaaccagccaggggcaaacggagcaggaaaucaaccaggggcaaacggagcaggaaaccagccaggagcaaacggagcaggaaaccaaccgggagcgaacggggcaggaaaccagccaggggcaaacggagcagggaaccaaccgggagcaaacggagccggaggacaagcagcaggggggaacgcaggaggaaacgcaggaggaaacgcgggggggcaaggacaaaacaacgaaggagcgaacgcaccaaacgaaaaaagcguaaaagaauaccuagacaaaguaagagcaacaguagggacagaauggacgccaugcagcguaacaugcggaguaggaguaagagugaggaggcggguaaacgcggcaaacaagaaaccagaagaccuaacgcugaacgaccuggaaacagacguaugcacgauggacaaaugcgcagggauauucaacguaguaagcaacagccugggacuaguaauacuacuaguacuggcacuauuuaacuaa

SEQ ID NO: 6102 - RNA, 1143 nt, Artificial Sequence
  derived and/or modified CDS sequence (opt11) from Pv(Cam20)__AGN05250.1__CSP
augaaaaauuucauacugcuggcagugaguaguauauugcuaguagaccuauucccaacacacugcggacacaacguagaccuaagcaaggcgauaaaccuaaauggggugaacuucaacaacguagacgcaagcagccuaggagcagcacacguaggacagagcgcaagcagagggagggggcuaggggagaacccagacgacgaagaaggggacgcgaaaaagaagaaagacgggaaaaaggcagagccgaaaaacccaagagagaacaaacuaaagcagccgggagauagggcagacgggcagccggcgggagacagagcagacggacagccggccggggauagggcggacggacaaccggcaggggacagagcagcagggcagccggcgggggacagggcggacgggcaaccagccggggacagggcggcgggacagccagcgggggacagggcggacggacaaccggcgggagacagggcggcggggcaaccggcgggggacagagcagacgggcaaccggcaggagacagggcagcaggacagccagcgggagacagggcagacgggcaaccagcaggagacagggcagcgggacaaccagcgggagacagagcagcaggacagccggcaggagacagggcggcggggcagccagcaggagacagagcggauggacaaccagcaggagauagagcagcgggacagccggcaggagacagagcagcggggcagccagcaggggauagagcggcgggacagccggcggggaacggggcgggaggacaggcggcaggaggaaacgcggcgaauaagaaagcagaagacgcgggaggaaacgcagggggacagggacagaauaaugaaggggcgaaugcgccaaaugagaaaagcgugaaagaauaccuggauaaaguaagagcgacaguggggacagaauggacgccgugcagcguaacauguggggugggaguacggguaaggaggaggguaaacgcggcgaacaagaaaccagaagaccuaacgcuaaacgacauagaaacggacguaugcacaauggacaaaugugcggggauauucaacguagugaguaacaguuuagggcuagucauacuacugguauuagcgcuauuuaacuaa

SEQ ID NO: 6103 - RNA, 1143 nt, Artificial Sequence
  derived and/or modified CDS sequence (opt11) from Pv(Cam22)__AGN05252.1__CSP
augaaaaacuucauacugcuagcgguaaguagcauacuacugguggaccuauuuccgacgcacugcggacauaacguggaccuaaguaaagcaauaaaccugaacggagugaauuucaacaauguagacgcaagcagccuaggagcggcacacguaggacaaagcgcaaguagggguagaggacugggggaaaauccagaugacgaagaaggggacgcgaaaaagaaaaaggacggaaagaaagcagagcccaaaaacccaagggaaaacaaacuaaagcaaccaggggacagagcggacgggcaaccagcaggggacagagcggacggacagccggcaggagacagggcggacggacagccagcaggagacagagcagcagggcagccggcaggagacagagcggacgggcagccagcgggagacagagcagcaggacaaccggcaggggaccgagcagacgggcaaccagcaggggacagagcagcaggacaaccagcaggagacagggcagcaggacaaccggcgggagacagagcagacgggcagccggcaggagacagggcagcaggacaaccagcaggagacagggcagacgggcaaccggcaggagacagagcggcgggacagccggcgggagacagagcagcgggacagccggcaggggauagagcagacggacaaccagcgggagacagagcggcaggacaaccggcgggagacagagcggcaggacaaccagcaggagacagagcagcaggacagccagcaggaaacggggcaggaggacaagcagcgggagggaacgcggcaaacaagaaagcggaggacgcgggagggaacgcaggcggacaaggacaaaacaacgaaggagcaaaugcaccgaacgagaaaagcgugaaagaauacuuagacaaaguaagagcaacaguggggaccgaguggacaccaugcagcguaacguguggagugggagugagaguaaggaggcgggugaacgcagcaaacaagaaaccggaagaccuaacacuaaacgauauagagacagacgugugcacgauggacaaaugcgcgggaauauucaacguaguaagcaacagccuaggacugguaauacuauuagugcuagcgcuauuuaacuga

SEQ ID NO: 6104 - RNA, 1143 nt, Artificial Sequence
  derived and/or modified CDS sequence (opt11) from Pv(Cam36)__AHL69651.1__CSP
augaagaauuuuauauuacuggcaguaagcagcauacugcuggucgaucuauuuccgacgcacuguggacauaacguagaccugagcaaggcaauaaaccugaacgggguaaacuucaauaauguggacgcaagcagucugggggcagcgcacgugggacaaagcgcgagcagggggaggggauugggagagaaccccgacgaugaagagggagaugcaaagaaaaagaaagauggaaagaaggcggaaccgaaaaacccaagggaaaauaaacuaaaacagccagcgggagauggagcggcggugcaaccggcaggggauggagcagcggugcagccggcgggagauggagcagacgggcaaccggcaggagacggggcagcgguacagccagcgggggacggagcggcgggacaaccggcgggggacagggcagcggggcagccggcagggaauagggcagcaggucagccggcaggagacagggcggauggacagccagcaggggauagagcggcagggcaaccagcaggagacagggcagcggggcagccagcgggagacagagcggacggacaaccagcaggggacagggcagcagggcaaccagcgggcgacagagcagccgggcaaccggcgggggacagggcagcgggacagccagcgggagauagagcagacgggcaaccggcaggggacagggcggcgggacaaccagcgggagacagagcggcagggcaaccagcgggggacagggcagcggggcaggcagcgggagggaacgcagggggaaacgcaggagggaacgcgggagggaacgcgggagggaacgcgggagggaacgcagggggacagggacaaaacaacgagggagcgaacgcaccgaaugagaaaagugugaaagaauaccuagacaagguaagggcaacgguagggacagaguggacgcccuguagugugacguguggggugggaguaagagugagaaggaggguaaacgcggcgaauaagaaaccagaggacuuaacacugaacgaucuagaaacagauguaugcacaauggacaagugcgcgggaauauucaauguagugagcaacagcuuaggauuggugauccugcugguacuggcacuguucaacuag

SEQ ID NO: 6105 - RNA, 1137 nt, Artificial Sequence
  derived and/or modified CDS sequence (opt11) from Pv(Pt01.7)__ADB92550.1__CSP
augaaaaacuucauacuguuagcagugucaagcauacuauuaguggaucuauucccaacgcacugcggacacaacguggaccugagcaaagcaauaaaccugaacggaguaggauuuaacaacguggacgcgagcagucuaggggcagcgcacgugggacagagugcgagcagaggaaggggacugggagagaacccggacgacgaagaaggagaugcaaagaaaaagaaagacggaaagaaagcagaaccgaaaaacccaagagaaaacaagcugaaacaaccagaggacggggcgggagaccagccaggggcaaauggggcagggaaccaaccaggagcgaacggggcaggaaaccagccaggagcaaacggcgcagggaaucaaccgggggcaaacggagcgggaaaccaaccaggagcgaacggggcggacgaucaaccgggagcaaacggggcggggaaccagccaggagcaaacggagcaggaaaucaaccgggagcgaacggagcggggaaccagccaggggcgaacggagcaggggaccaaccaggggcgaacggagcaggaaaccagccgggggcaaacggagcaggggaccagccaggcgcaaacggggccgggaaccaaccaggggcgaacggagcgggaaaccagccgggagcgaacggggcgggaaaccagccgggagcgaauggagcagggaaccaaccgggcgcgaacggagcagggggacaggcagcgggaggaaacgcagcgaacaaaaaggcaggggacgcaggagcgggagggcaagcagcaggagggaacgcagcgaacaaaaaggcgggagacgcgggagcggggcaagggcagaacaacgaaggagcgaacgcgccaaacgaaaagagcguaaaggaguaccuggacaaaguaagggccacgguaggaacagaauggacaccgugcagcguaacaugcggagugggaguaagagugagaagaagagugaaugcagcgaacaaaaagccagaagaccugacauuaaacgaucuagaaacagauguaugcacaauggacaaaugcgcaggaauauucaacguggugaguaacagccuagggcuaguaauacuccugguacuagcauuauucaacuag

SEQ ID NO: 6106 - RNA, 1134 nt, Artificial Sequence
  derived and/or modified CDS sequence (opt11) from Pv(Cam39)__AGN05267.1__CSP
augaagaauuucauacugcuagcaguaaguagcauacugcucguagaucuauuuccaacacacugcggacacaacguggaccuaagcaaggcaauaaacuugaauggaguaggauucaacaacguagacgcgagcagccuaggggcggcgcacguagggcagagcgcaagcagaggaagggggcuaggggaaaacccggacgaugaagaaggggacgcgaagaaaaagaaagacgggaaaaaggcggaaccgaaaaacccuagagaaaacaaacuaaaacaaccagcgggagacagggcggacgggcaaccagcaggagacagggcggacggacagccggcgggagacagggcggacgggcaaccagcaggggacagggcagcggggcagccggcaggagacagagcggacggacagccggcaggagauagggcagcggggcaaccagcaggggacagagcggacggacagccggcaggagacagagcagcaggacagccagcaggggacagagcagacgggcaaccagcaggggauagagcagcagggcagccagcaggagacagggcggcaggacaaccagcaggggacagggcagcaggacagccagcgggagacagagcggacgggcaaccggcaggagacagggcggcaggacagccagcaggagacagagcggacggacaaccggcaggagacagagcagcgggacaaccagcaggagacagagcagcaggacaaccggcgggggacagggcagcgggacaaccagcaggaaacggagcgggaggacaagcggcaggaggaaacgcagggggaaaugcagggggaaacgcaggaggacaaggacagaacaaugaaggggcgaacgcaccaaacgagaaaagcguaaaggaauaccuagacaaaguaagagcgacgguggggacggaauggacgccaugcagcguaacgugcgggguaggagugaggguaagaagaaggguaaacgcggcaaacaagaaaccagaagaccugacacuaaacgaccuggaaacggacgugugcacaauggacaaaugcgcggggauauuuaacguagucagcaacagucuagggcuagugauacugcuagugcuagcacuauucaauuag

SEQ ID NO: 6107 - RNA, 1134 nt, Artificial Sequence
  derived and/or modified CDS sequence (opt11) from Pv(Nr03)__ADB92541.1__CSP
augaaaaacuucauccuauuagcggugucgagcauacuauuaguagaccuauucccaacgcacugcgggcacaauguagaccugagcaaggcgauaaaccuaaacggaguaaacuucaacaacguggacgcaaguagccugggggcagcgcacguggggcaaagcgcaagcagagggagaggacugggagaaaacccagacgacgaagaaggagacgcaaaaaaaaaaaaagauggaaaaaaagcagaaccaaaaaacccaagagaaaacaaacuaaaacaaccgggggacagggcagacgggcagccagcaggagacagagcggacggacagccagcgggagacagggcagacggacagccagcaggagacagggcggacggacaaccagcaggggauagggcagacggacagccagcaggagacagagcggacgggcaaccggcgggagacagagcagacggacagccggcaggagacagagcggacggacaaccggcaggagauagggcggacggacaacccgcaggggacagggcagacggacaaccagcgggagacagggcggacggacaaccggcaggagacagagcagaugggcaaccggcaggagacagggcagaugggcaaccagcaggggacagagcggacgggcaaccggcaggggaccgggcggacgggcaaccagcaggagacagggcagacggacaaccggcaggagacagggcagcgggacagccagcaggggacagggcagcaggacaaccggccggggacagagcagcaggacagccagcgggcaacggggcaggagggcaggcagcaggagggaacgcagggggacaaggucaaaacaaugaaggagcaaacgcaccgaacgagaagucaguaaaagaauacuuggacaaaguaagagcaacaguggggacggaauggacaccgugcaguguaacaugcggaguaggagugaggguaaggagaagaguaaacgcagcgaacaagaaaccggaagaucuaacgcuaaaugaccuggaaacagacgugugcacaauggacaaaugugcaggaauauucaacgugguaagcaacagucuaggacuagugauacugcuaguacuagcacuguucaacuaa

SEQ ID NO: 6108 - RNA, 1134 nt, Artificial Sequence
  derived and/or modified CDS sequence (opt11) from Pv(Pt04.1)__ADB92554.1__CSP
augaaaaacuucauacuauuagcagugagcagcauauugcuaguagaccuauucccaacccacuguggacacaacguggaccuaaguaaagcgauaaaccugaacggagugaacuucaacaacguagacgcgagcagccuaggagcggcacacguaggacaaagcgcaagcaggggaagaggauuaggagaaaacccggacgacgaagaaggagacgcgaagaaaaagaaagacgggaagaaagcggaaccgaaaaacccaagggaaaacaaacuaaaacaaccaggagacagggcagacggacaaccagcaggggacagggcggacggacaaccagcaggcgauagagcagacggacaaccagcaggagacagagcagcaggucagccagcaggcgaccgagcggcagggcaaccagcgggggacagggcggacggacaacccgcaggagacagggcagacggacaaccagcgggggacagagcagaugggcagccggcaggagacagagcggacgggcaaccagcgggagacagagcagcaggacagccggcaggagacagggcagcaggacaaccagcaggagacagagcggauggacaaccagcaggggacagagcggcggggcagccagcaggggacagagcagacggacaaccggcaggagacagggcagcggggcaaccggcgggagacagagcagacggacaaccggcaggggacagagcggcaggacagccagcaggggacagggcagcagggcaaccagcaggggacagggcagcaggacaagcagcgggagacagagcagccggacaagcagcaggaggaaacgcaggagggcaaggucaaaacaaugagggagcaaacgcaccgaacgagaaaagcgugaaagaauacuuggacaagguaagggcaacagucggcacagaguggacaccgugcagcgugacaugcgggguaggagugagggugaggagaagaguaaacgcagcaaacaagaaaccagaggaucugacacuaaacgaccucgagacagacgugugcacgauggacaaaugcgcggggauauucaacguagugagcaacagcuuagggcuaguaauacugcugguacuagcauuauucaacuaa

SEQ ID NO: 6109 - RNA, 1134 nt, Artificial Sequence
  derived and/or modified CDS sequence (opt11) from Pv(Sal1)__ADB92528.1__CSP
augaagaacuucauacuacuagcaguaagcagcauacuacugguagacuuguucccaacacacugcggacacaacguggaccugagcaaggcaauaaaccugaacgggguaaauuucaauaacguagacgcgagcagccugggggcggcacacgugggacagagcgcgagcaggggacgaggauugggagaaaacccggaugacgaagagggcgacgcaaagaaaaagaaggacggaaagaaagcggagccgaaaaacccaagggagaacaagcuaaaacagccgggggacagggcagacgggcagccagcgggagacagagcggaugggcaaccggcaggagacagagcggacggacagccagcgggagacagagcagacgggcaaccagcaggggacagagcagcggggcagccagcgggagauagagcggacggacaaccggcaggggacagagcagacgggcaaccagcgggagaccgagcagacgggcaaccggcgggggacagggcggauggacaaccggcgggagauagggcagcagggcaaccagcaggggacagggcagcggggcagccagcgggagacagggcagacggacaaccggcgggcgacagggcagcggggcagccagcaggggacagggcagacggacaaccagcaggagacagagcagcggggcagccagcaggagacagagcagacgggcaaccggcaggagacagagcggcaggacaaccagcaggagacagagcggcaggacagccagcaggagacagggcagcgggacaggcagcaggagacagagcagcaggacaagcggcagggggaaacgcagggggacaagggcagaacaaugaaggcgcgaacgcgccgaacgagaaaagugugaaggaauaccuggacaaggugagggcgacagugggaacggaauggacaccauguagcgugacgugcggagugggaguaagaguaagaaggagggugaacgcagcgaacaagaaaccggaagaccuaacgcuaaacgaccuggaaacagacguaugcacgauggacaaaugugcaggaauauucaacgugguaaguaacagccuagggcuaguaauacuauuagugcuagcacuauucaauuag

SEQ ID NO: 6110 - RNA, 1131 nt, Artificial Sequence
  derived and/or modified CDS sequence (opt11) from Pv(Cam27)__AGN05255.1__CSP
augaagaacuucauauugcuggcagugagcagcauacugcuaguagaccuauucccaacgcacugcgggcacaacguggaccugagcaaggcgauaaaccuaaacgggguaggguucaacaacguagacgcaagcucgcuaggggcagcgcacguggggcagagcgcaagcaggggaaggggacuaggagaaaacccggacgaugaagaaggagacgcaaagaaaaagaaagacggaaagaaagcggaaccgaaaaacccaagggaaaacaaacugaaacagccagcgggagcaagagcggacggacaaccggcaggggacagagccgacggacagccagcgggggacagagcggacggccagccggcgggagacagggcggcaggacaaccggcaggagacagggcggacgggcaaccagcgggggauagggcagcgggacagccagcaggagacagagcggacgggcagccggcgggggauagggcagcggggcagccagcaggagacagagcagacggacaaccggcaggggacagggcagcaggacagccagcgggggacagagcggcagggcagccagcgggggacagggcagacggacagccggccggagacagggccgcagggcaaccagcaggggacagggcagauggacagccggcaggagacagagcggcgggacaaccagcgggggacagagcagcaggacagccagcaggggacagagcggcagggcaaccggcaggaaauggagcaggagggcaggcagcgggagggaacgcaggaggaaaugcgggaggaaaugcagggggaaacgcgggaggaaacgcgggagggcaaggacaaaacaacgagggggcgaacgcgccaaacgaaaagagugugaaagaauaccuggacaagguacgagcaacaguaggaacggaguggacgccaugcagcgugacaugcggggugggagugagaguaagaagaagagugaacgcggcaaacaaaaagccggaagaccuaacacugaacgaucuagagacggauguaugcacaauggacaagugcgcaggaauauuuaauguaguaagcaauaguuuagggcuaguaauacuacugguacuagcacuauucaacuga

SEQ ID NO: 6111 - RNA, 1131 nt, Artificial Sequence
  derived and/or modified CDS sequence (opt11) from Pv(Cam46)__AGN05273.2__CSP
augaagaacuuuauacugcuagcaguaagcagcauacuauugguagaucuauuuccgacacacugcggacacaacguggaccugagcaaggcgaucaaccugaacgggguaaauuucaacaacguagacgcgagcagucuaggagcagcacacguagggcaaagcgcgaguagaggaagaggacugggagaaaacccggacgacgaagagggagacgcaaagaaaaagaaagacggaaagaaagcagaaccgaaaaacccaagggaaaacaaauugaaacagccggcaggagauagagcggacgggcaaccggcaggagacagggcagaugggcagccagcgggagauagggcagacgggcagccggcuggagacagagccgcgggacaaccagcaggggauagagcggaugggcaaccggcaggagacagggcggcggggcagccagcgggagacagggcagacgggcaaccagcaggggacagggcagcgggacagccggcgggagauagggcggacggacaaccagcgggggacagggcagcgggacagccugcgggagacagagcggcagggcaaccggcaggagacagggcagacggccagccagcgggggauagggcggcagggcaaccggcaggagacagagcggauggacagccagcgggagauagggcggcagggcaaccagccggggacagggccgcgggacaaccagcgggagauagggcggcagggcaaccggcagggaacggagccgggggacaggcggcaggaggaaacgcgggaggaaacgcgggagggaacgcgggaggaaacgcgggagggaacgcaggagggcaagggcaaaauaacgagggggcaaacgcaccgaaugaaaagagcgugaaagaguacuuagacaagguacgggcaacagucgggacagaguggacaccaugcagcguaacauguggagugggaguaagagugagaagaagaguaaacgcggcgaacaaaaagccagaggaccugacacuaaacgaucuagaaacagacguaugcacaauggacaagugcgcgggaauauuuaauguagugagcaacagcuugggacugguaauacuccuagugcuggcgcuauucaauuaa

SEQ ID NO: 6112 - RNA, 1128 nt, Artificial Sequence
  derived and/or modified CDS sequence (opt11) from Pv(CSP10VK210)__ANS71590.1__CSP
augaaaaacuuuauacugcuggcggugagcagcauacugcugguagaucuauuuccaacgcacugcgggcacaauguagaccuaaguaaagcgauaaaccuaaacggggugaacuucaacaauguagacgcgagcagucugggagcggcacacguagggcaaagcgcaagcagagggagaggacuaggggaaaacccagacgaugaggaaggggacgcgaaaaagaaaaaggacgggaagaaagcagaaccgaaaaacccaagagagaacaaacugaagcaaccaggggacagagcggaugggcaaccagcaggagacagagcggacgggcagccagcaggagacagagcggacggacaaccagcgggggacagagcagacggacagccggcgggagacagggcggcaggacaaccagccggggacagagcagcaggacagccagcaggagacagagcagacgggcaacccgcgggagacagagcagcgggacagccagcgggagacagagcagacggacaaccggcgggggacagggcagcagggcagccagcgggagauagggcagcagggcagccagcaggagacagggcagcagggcaaccagcaggggacagggcggacggacaaccagcaggagacagggcagcgggacagccagcgggagacagagcagcaggacagccagcgggggacagggcggcaggacaaccagcgggagacagagcggcagggcaaccagcagggaacggggcaggagggcaggcagcgggaggaaacgcagcgaacaagaaagcggaagaugcaggagggaacgcgggagggaacgcaggaggacaaggacaaaacaacgaaggagcaaacgcgccaaacgagaaaagcguaaaagaauaccuggacaagguaagggcaacaguagggacagaauggacaccaugcagcgugacgugcggcgugggaguaagagugagaaggagagugaacgcagcaaauaaaaagccagaggacuuaacgcuaaacgaccuagaaacggacguauguaccauggacaaaugcgcaggaauauucaacguagugagcaacagccuggggcuaguaauacuauugguacuagcacuauucaacuga

SEQ ID NO: 6113 - RNA, 1122 nt, Artificial Sequence
  derived and/or modified CDS sequence (opt11) from Pv(Cam19)__AGN05249.1__CSP
augaagaacuucauacugcuagcaguaagcucaauacugcuaguagaccuguuccccacgcacugcggacacaacguagaccugagcaaggcgauaaaccugaacggaguaggguucaacaacguggacgcaaguagccugggggcagcgcacguggggcagagugcaaguaggggaaggggacuaggagagaacccagaugacgaagaaggagacgcgaagaaaaagaaagacggaaagaaagcggaaccgaaaaacccaagggagaacaagcugaaacaaccggcgggagacagagcagacgggcaaccggcaggggacagggcagacgggcaaccagcaggagacagagcagacgggcaaccagccggggauagggcggacggacagccagcgggggacagggcagacggacaaccagcaggggacagggcggcggggcaaccagcgggagacagggcagacgggcaaccggcaggagacagagcagcgggacagccagcgggagaccgggcggacggacagccggcaggagacagagcagacggacagccagcgggagacagggcagcagggcaaccagcgggggacagagcagacgggcagccagcaggagacagagcggcgggacaaccagcaggggacagagcagacgggcaaccagcgggggacagagcggcagggcagccggcaggagacagggcggcaggacagccagcgggggacagagcagcagggcaaccggcgggaaacggggcagggggacaggcagcgggaggaaacgcaggagggaacgcgggcgggaacgcgggagggaacgcaggggcggggcagggacagaacaacgaaggggcaaaugcgccgaacgagaagagugugaaggaauaccuagauaaagugagagcgacagugggaacggaauggacgccaugcagcgugacaugcgggguaggagugagagucaggagaagaguaaaugcagcgaacaagaaaccggaagaccugacacuaaacgacuuagaaacagacgugugcacgauggauaaaugcgcagggauauucaacguagugaguaacagccuaggguugguaauacuauuaguacuagcacuauucaauuag

SEQ ID NO: 6114 - RNA, 1119 nt, Artificial Sequence
  derived and/or modified CDS sequence (opt11) from Pv(Cam10)__AGN05241.2__CSP
augaagaacuuuauacugcuggcgguaucgagcauacugcugguggaccuauuuccgacacacuguggacacaacguggacuugagcaaggcaauaaaccugaacggaguaggguucaauaacguggacgcgagcucacugggggcagcgcacgugggacagagcgcgagcagaggaaggggauugggagagaacccggacgacgaagaaggagaugcaaagaaaaagaaagacggcaagaaagcggagccgaaaaaccccagggaaaauaaacugaaacaaccagcaggagauagagcggauggacaaccggcaggggacagggcggacgggcagccagcgggagaucgagcagacgggcagccggcgggagacagggccgcgggacagccagcgggggauagagcagacggacaaccagcaggggacagggcggcgggacagccagcgggagauagagcagacgggcaaccggcaggggacagggcagcgggacaaccagcaggggauagagcggacggacaaccggccggggacagggcagcgggacagccagcgggagauagagcagcggggcaaccggcaggggacagagcggauggacagccagcgggagacagagcggcagggcaaccggcgggggacagggcagaugggcagccagcgggugacagggcagcaggacagccggcaggggacagggccgcgggacagccagcgggagauagagcagcaggacaaccggcggggaacggagcaggaggacaggccgcagggggaaacgcgggaggaaacgcgggagggaacgcgggagggaacgcagggggacaaggacaaaauaacgagggagcgaacgcgccaaaugaaaagaguguaaaagaguaccuggauaaaguaagggcaacgguaggaacagaguggacacccuguagcgugacaugcggaguaggcgugcgagugaggagaagaguaaacgcggcaaauaagaaaccggaggaccugacacugaacgaucuggagacagauguauguacgauggacaaaugcgcggggauauucaaugugguaaguaauaguuugggacugguaauacuccugguauuggcacuguucaacuaa

SEQ ID NO: 6115 - RNA, 1119 nt, Artificial Sequence
  derived and/or modified CDS sequence (opt11) from Pv(Cam3)__AGN05234.2__CSP
augaagaacuucauacuacuagcgguaucgagcauacugcuaguagaccuauuucccacccacuguggacacaacguagaccuaagcaaagcaauaaaccugaacgggguaaacuucaacaacguggacgccagcucacuaggagcagcgcacguaggacagagugcaagcagaggcagaggccugggagagaacccagacgaugaagagggagacgcaaagaaaaagaaagacgggaagaaagcggaacccaaaaacccaagggaaaacaaacuaaaacaaccagcaggcgacagagcggacgggcaaccggcaggggacagggcagacgggcagccagcaggagaccgagcggacggacaaccggccggggauagagcagcgggacagccagcgggagacagagcagacggacaaccagcaggggacagagccgccgggcagccagcgggagacagagcggacggacaaccggcaggagacagagcagcaggacagccggcaggcgacagagcggacgggcagccagcaggagacagagcagcgggacaacccgcgggagaccgagcagcagggcaaccagcaggagacagggccgauggacagccagcaggagaccgcgcagcaggacaaccagccggggacagggcagacggacaaccagcaggcgacagagcagcaggacaaccggcaggggacagggccgcgggacagccagcaggagacagagcggcaggacaaccagcaggaaacggagcaggaggacaggcagcgggagggaacgcgggcgggaacgcgggaggaaacgcaggaggaaacgcgggagggcagggacaaaacaacgagggagcaaacgcaccaaaugagaaaagcgugaaagaauaccuagacaaaguaagggccacggucgggaccgaguggacgcccugcagcgugacaugcggagugggagugagagugcgaaggagaguaaacgcagcaaacaaaaagcccgaagaccugacacuaaacgaucuagagacugacguauguacaauggacaagugcgcaggcauauucaacguagugagcaacagccugggccuagucauacuccugguauuggcauuauucaacuga

SEQ ID NO: 6116 - RNA, 1119 nt, Artificial Sequence
  derived and/or modified CDS sequence (opt11) from Pv(Cam30)__AGN05258.1__CSP
augaaaaauuucauauugcuagcgguaagcagcauacuacugguggaccuauucccgacacacugcgggcacaacguggaccuaaguaaagcaauaaaucugaacgggguaaacuucaauaacguagacgcgagcagcuuaggggcggcgcacgugggacaaagcgcgaguagaggaaggggacugggagagaacccggacgaugaagagggagaugcaaagaaaaagaaagacggaaagaaagcggaaccgaagaauccaagggaaaacaaguugaaacagccagcaggagacggggcggcgguacagccagcaggggacggggcagcgguacaaccagcaggagacggagcggacgggcaaccggcgggggacggggcagcggggcaaccagcaggggacagagcagacgggcagccagcaggggacagagcagcggggcagccggcgggggacagggcagauggacaaccggcaggagacagagcagcaggacagccagcgggggacagggcagacggacaaccggcaggagacagagcagcaggacaaccggcaggagacagggcggcaggacaaccagcaggggacagagcagacggacaaccagcgggagaccgagcggcagggcaaccggcgggagacagagcggacggacaaccagcaggagaccgagcggcagggcagccggcaggggaccgggcagcggggcaaccagcgggggacagggcggcggggcagccggcggggaacggggcgggagggcaggccgcgggagggaacgcgggagggaacgcaggagggaacgcaggagggaacgcaggagggcaagggcaaaacaacgaaggggcgaacgcgccgaacgagaaaagugugaaagaauaccuggacaaggugagggcgacagugggaacagaauggacaccaugcucaguaacaugcggaguaggaguacggguaagaaggagggugaacgcggcaaauaaaaagccagaggaccugacgcugaacgaccuagaaacagacgucugcacaauggacaagugcgcgggaauauucaacgugguaagcaauagccugggacuggucauacuauugguauuagcgcuguucaacuga

SEQ ID NO: 6117 - RNA, 1119 nt, Artificial Sequence
  derived and/or modified CDS sequence (opt11) from Pv(Cam43)__AGN05271.1__CSP
augaaaaacuucauauugcucgccgugagcagcauacuauuaguggaccuguucccgacacacugugggcauaacguagaccuaagcaaagcgauaaaccuaaacggagugggauucaacaacguagacgcaagcagucuaggagcagcacacgugggccaaagcgcgagcaggggaagaggacuaggggaaaacccggaugacgaggaaggggacgcgaaaaagaagaaagacggaaagaaggcagagccgaaaaauccaagggaaaacaaacugaaacaaccagcgggggacagagcagacggacagccagcaggagacagggcagacggacaaccagcaggggacagagcagacggacaaccggcgggagacagagccgacgggcaaccggcaggggacagagcggacgggcaaccagcgggagaccgagcggcaggacaaccggcaggagacagagcagacggacagccagcaggggacagagcagcgggacaaccggcaggagacagggcggacggacagccagcaggagauagagcggacgggcagccggcgggggacagagcagcgggacaaccagcaggggacagagcagacggacaaccggcaggagacagagcagcggggcagccagcgggagacagagcggacggacaaccagcgggggacagggcagcaggacaaccagcaggagauagggcagcgggacaaccagcggggaacggagcaggaggacaggcagcaggagggaacgcaggaggaaacgcaggaggaaacgcagggggaaacgcaggaggaaacgcgggcgggaacgcgggggcaggacaaggacagaacaaugagggagcaaacgcaccaaacgaaaagagcgugaaagaauaccuagacaagguaagagcaacgguaggaacagaauggacaccguguagcguaacaugcggaguagggguaaggguaaggagaagaguaaacgcagcaaacaagaaaccagaagaccuaacacuaaaugaccuagaaacagacguauguacgauggacaaaugcgcaggaauauucaacguuguaagcaacagccuagggcuaguaauacugcuaguacuagcauuguucaacuaa

SEQ ID NO: 6118 - RNA, 1116 nt, Artificial Sequence
  derived and/or modified CDS sequence (opt11) from Pv(Cam40)__AGN05268.1__CSP
augaagaacuucauacugcuagcgguaagcagcauacuauuaguagaccuauucccaacacacugcgggcacaacguagaccuaaguaaagcaauaaaucuaaacggaguaggguucaacaauguagacgcaaguaguuugggagcggcacacguaggacaaagugcgagcagagggagaggacuaggagaaaacccagacgaugaggaaggggacgcgaaaaagaaaaaggacgggaagaaaacagaaccgaaaaacccaagggaaaacaaguugaaacaaccaggagacagggcagacggacagccagcaggagacagggcagacggacagccagcaggagacagagcagcagggcaaccggcgggagaccgggcagacgggcaaccagcaggagauagagcagacgggcaaccggcgggagacagggcagcggggcagccagcaggggacagagcagacgggcaaccagcaggggacagggcagcgggacagccagcaggggacagagcggauggacaaccggcgggagacagagcagcugggcagccagcgggagacagagcagcaggacagccggcaggagacagagcagacggacagccagcaggggacagagccgcaggacaaccagcaggggacagagcagacggacagccagcaggggauagagcagcagggcaaccagcgggagacagagcggcagggcagccggcaggggaccgagcagcgggacagccagcaggaaacggggcgggagggcaggcagcaggcgggaacgcagggggaaacgcgggaggaaacgcaggagggaacgcaggagggcaagggcaaaacaacgagggggcaaacgcgccgaacgaaaagagcguaaaggaauaucuagacaaaguaagggcaacgguaggaacagaauggacaccgugcaguguaaccugcgggguaggaguaagaguaagaagaaggguaaacgcggcaaacaagaaaccggaagaccuaacauuaaacgaccuagaaacagacguaugcacaauggacaaaugcgcaggaauauucaacguaguaagcaacagccuaggccugguaauccugcugguguuagcacuauucaacuaa

SEQ ID NO: 6119 - RNA, 1116 nt, Artificial Sequence
  derived and/or modified CDS sequence (opt11) from Pv(CSP14VK210)__ANS71594.1__CSP
augaaaaacuucauacuacuagcaguaagcaguauacugcuaguggaccuauucccgacacacugcggacacaacguagaccugagcaaagcaauaaaccuaaacggaguaaacuucaacaacguagacgcaagcagccuaggagcagcacacguagggcagagcgcaagcaggggaagaggacuaggagaaaacccagacgacgaagagggagacgcaaaaaaaaaaaaagacggaaaaaaagcggaaccaaaaaacccaagagaaaacaaacugaaacaaccaggagacagggcagacggacaaccagccggagacagagcagacggacaaccagcaggagacagggcagcagggcagccagcgggagacagagcagacgggcaacccgcgggagacagggcggccggacagccagcgggagacagagcggacgggcaaccggcaggagacagagcagcagggcaaccggcaggggacagagcggacggacagccagcaggagauagagcggcggggcaaccagcgggagaccgagcagacggacaaccagcaggggacagggcagcagggcaaccagcaggggauagagcagcaggacaaccagcaggggacagagcggacggacaaccagcaggggacagagcagacggacaaccggcgggagacagagcagcaggacagccggcaggagauagggcggcaggacaaccggcaggagacagagcagcagggcaaccggcgggaaacggagcaggcggacaagcagcgggaggaaacgcggcaaauaaaaaagcagaggacgcgggaggaaacgcgggggggcaagggcagaacaacgaaggcgcgaacgcgccaaaugagaagagcguaaaggaguaccuagacaaagugagagcgacaguggggacagaauggacaccauguagcguaaccuguggaguagggguaagaguacgacgaagaguaaacgcggcaaacaagaagccggaagaucuaacacuaaacgacauagaaacagacguaugcacgauggacaaaugcgcaggaauauucaacguagugaguaacagucugggacuggugauacugcuaguacuagcgcuauucaacuga

SEQ ID NO: 6120 - RNA, 1116 nt, Artificial Sequence
  derived and/or modified CDS sequence (opt11) from Pv(CSP22VK210)__ANS71602.1__CSP
augaaaaacuucauacuacuggcagugagcagcauacuacuaguggaucuauucccgacgcacugcggacacaacguagaccugaguaaagcaauaaaccugaacgggguaaacuucaacaauguagacgcgucaagccugggagcagcacauguaggacaaucagcgagccgaggaagggggcuaggggaaaauccagaugacgaagaaggggaugcaaaaaaaaaaaaagaugggaaaaaagcggaaccaaaaaacccaagagaaaacaaauuaaagcaaccgggagacagggcggauggacaaccagcgggagacagggcagacggacagccagcaggagacagggcagacggacaaccagcaggagacagggcagcggggcaaccagcgggggaccgcgcagacggacaaccggcaggagacagggcagcgggacaaccagcgggagaccgcgcagacggacaaccggcgggagauagagcggcaggacaaccagcgggagacagagcggcagggcaaccagcaggggacagagcagacggacaaccagcgggagacagagcggcaggacaaccagcaggagacagagcagcaggacaaccagcaggcgacagggcagaugggcagccggcaggcgauagggcagcaggacaaccggcaggagacagggcagcaggacaaccagcaggagacagagccgcaggacagccggcaggagacagagcggcaggacaaccggcgggaaacggagcaggaggccaagcagcaggagggaacgcggcaaacaaaaaagcagaggaugcagggggaaacgcaggaggacaagggcaaaacaacgaaggagcaaacgcgccaaacgaaaaaagcguaaaagaguaccuagacaaaguaagggcaacagucgggacagaauggacgccgugcagcgugacaugcggaguaggaguaagagugagaagaagagugaacgcagcaaacaaaaagccagaagaccugacauugaaugacauagaaacagacguaugcacaauggacaagugcgcaggaauauucaacgugguaagcaacagccuaggacuagucauacuacuaguacuagcgcuguucaacuaa

SEQ ID NO: 6121 - RNA, 1116 nt, Artificial Sequence
  derived and/or modified CDS sequence (opt11) from Pv(CSP28VK210)__ANS71608.1__CSP
augaaaaacuucauacuguuggcaguaagcucaauauugcuagucgaccuguucccgacgcacugcggacacaacguagaccugucgaaagcaauaaaccuaaacggggugaacuucaacaauguagaugcaaguagccugggagcagcgcauguaggacaaucagcaaguagaggaaggggacuaggggaaaauccagaugacgaggagggggacgcgaaaaagaagaaagacggaaagaaagcagagccgaaaaacccaagagagaacaaacuaaaacagccgggagacagagcggacgggcaaccggcaggggacagagcagauggacagccggcaggagauagagcagacgggcaaccggcaggagacagggcagcggggcaaccagcaggagaucgggcggaugggcaaccagcaggagacagggcggcgggacagccagcaggcgauagggcggacgggcaaccggcaggggacagggcggcgggacagccggcgggggauagagcggacgggcaaccggcaggggacagggcggcgggacaaccagcaggagauagggcggacgggcaaccagcaggagacagggcggcagggcagccagcgggagauagagcggccgggcaaccggcgggggacagggccgauggacagccagcaggggauagggcggcagggcaaccggcgggagacagggcagcgggacagccagcgggagacagggcggcagggcaaccggcagggaacggagcagggggacaggcggcaggagggaacgcggcaaauaaaaaggcagaagacgcaggagggaacgcaggagggcaggggcaaaacaacgaaggagcgaacgcgccaaaugaaaagagcgugaaagaauaccuagacaaagugagagcgacagucgggacagaauggacgccauguagcguaacaugcggaguaggagugagagugagaaggcgcgugaacgcggcaaacaaaaagccagaggaucugacauugaacgacauagagacagauguaugcacaauggacaagugcgcgggcauauucaacguaguaagcaauagcuugggguugguaauacuauugguauuggcauuauucaacuga

SEQ ID NO: 6122 - RNA, 1116 nt, Artificial Sequence
  derived and/or modified CDS sequence (opt11) from Pv(CSP31VK210)__ANS71611.1__CSP
augaaaaacuucauacugcuggcaguaagcagcauacugcugguagaccuauuucccacgcacugcgggcauaacguggaccugagcaaagcgauaaaccuaaacggggugaacuucaacaacguagacgcaagcagccugggggcagcacacguggggcagucagcgagcagggggaggggccuaggagagaacccagacgacgaggaaggagacgcgaagaaaaagaaagacgggaagaaagcagaaccgaaaaacccgagggaaaacaaacugaaacagccaggagauagagcggacggacagccagcaggagacagagcggacgggcaaccagcgggagacagggcagcaggacagccggcgggagacagagcggacggacaaccggcaggggacagagcagcgggacagccagcaggagacagggcagaugggcaaccggcgggggacagggccgcaggacagccagcgggagacagagcagacgggcagccggcgggggacagagcagauggacagccagcaggggacagagcagcagggcagccggcgggagacagagcagcgggacagccggcaggagacagggcggcaggacaaccugccggagacagggcagacgggcagccagcgggggacagagcagcagggcaaccggcaggggacagggcagcaggacagccagcaggagacagggcggcaggacagccagcaggagacagggcggcggggcagccagcagggaacggagcgggaggacaagcagcagggggcaacgcagcaaacaagaaagcggaggacgcaggagggaaugcgggaggacagggacaaaacaacgaaggagcgaacgcaccaaacgagaaaagcguaaaagaguaccuggacaaaguaagagcgacaguaggaacagaauggacaccgugcagcguaacaugcgggguaggaguaaggguaagaagaagagugaaugcagcaaacaagaaaccagaagaccuaacacugaacgacauagaaacggacguaugcacgauggauaaaugcgcaggaauuuucaacguagugaguaacaguuuagggcuggugauacuguuagugcuagcacuauucaacuag

SEQ ID NO: 6123 - RNA, 1116 nt, Artificial Sequence
  derived and/or modified CDS sequence (opt11) from Pv(CSP37VK210)__ANS71617.1__CSP
augaaaaacuuuauacuguuagcagugaguagcauacuacugguagaccuauucccgacgcauugugggcacaacguagaccuaagcaaagcgauaaaccuaaacggaguaaauuucaacaacguagacgcgagcagccugggagcagcacacguaggacaaagcgcaagcaggggaagagggcuaggagaaaacccggacgaugaagaaggggacgcgaaaaagaaaaaggacggcaagaaagcagagccaaagaauccgagagaaaacaaauuaaaacaacccggagacagagcggacggacaaccggcaggagauagggcagacggacagccagcaggagauagggcagaugggcaaccggcaggagacagggcagcaggacaaccggcaggagauagagcagcagggcaaccagcaggggacagagcggcaggacaaccagcaggagacagagcggacggacagccagcaggagacagagcagcaggacaaccggcaggagacagagcagacggacagccggcaggagacagagcagcgggccagccagcgggagacagggcggacggacagccagcgggagacagggcagcgggacagccagcaggggacagagcggcaggacaaccagcaggagacagggcggacggacaaccagcaggagacagagcagcggggcagccggcgggggacagggcagcaggacagccggcgggagauagagcagcgggacaaccagcggggaacggggcaggaggacaggcggcaggaggaaaugcagcaaauaaaaaggcggaggaugcagggggaaacgcaggaggacaagggcaaaacaacgaaggagcgaacgcgccaaacgagaaaaguguaaaagaauaccuggacaaaguaagagcgacggugggaacagaauggacgccaugcagcgugacaugcggagugggggugagaguacggagaagaguaaacgcagcaaacaaaaagccggaagaccugacacuaaacgauauagaaacagacgugugcacaauggacaaaugcgcggggauauucaacguaguaagcaacagccugggacugguaauacuauuagugcuagcacuguucaauuaa

SEQ ID NO: 6124 - RNA, 1116 nt, Artificial Sequence
  derived and/or modified CDS sequence (opt11) from Pv(CSP50VK210)__ANS71630.1__CSP
augaagaacuucauacuacuagcaguaaguagcauacuacuaguagacuuguucccaacgcacugcggacacaacguagaccuaagcaaagcgauaaaccuaaacggagugaacuucaacaacguggacgcaaguagccugggagcggcgcacguagggcagagugcaaguaggggacggggacuaggagaaaauccagacgacgaagaaggagacgcaaaaaaaaaaaaagacgggaaaaaagcggaaccaaaaaacccgagagagaacaaacuaaaacagccaggggacagagcagauggacagccggcaggggauagggcggacggacaaccagcaggagacagggcggcgggacagccagcgggagacagagcggacgggcaaccggcaggagacagagcggcaggacaaccagcaggagacagagcagacggacagccggcaggagacagagcggcgggacagccagcaggggacagggcggacggacagccagcaggggacagggcggcaggacagccggcgggagacagggcggaugggcagccggcgggagaccgggcagcagggcaaccagcaggagacagagcagcggggcaaccggcaggagacagagcggacgggcagccggcaggagacagggcggcggggcagccggcaggagacagggcggcgggacaaccggcgggggacagagcggcaggacaaccggcaggagacagagcagcagggcagccagcaggaaacggagcggggggacaagcagcggggggaaacgcagcaaacaaaaaagcagaagaugcggggggaaacgcaggggggcaagggcaaaacaacgagggagcgaaugcgccaaacgaaaagagcgugaaagaauaccuggacaaaguaagagcaacgguaggaacagaguggacaccgugcaguguaacaugcgggguaggaguaaggguaaggagaagagugaacgcagcgaauaaaaaaccggaagaccugacacugaacgauauagaaacggacguauguacgauggacaaaugcgcgggaauauuuaacguagugagcaacagccuagggcuggugauacuacuggugcuagcgcuauucaacuga

SEQ ID NO: 6125 - RNA, 1107 nt, Artificial Sequence
  derived and/or modified CDS sequence (opt11) from Pv(Cam16)__AGN05247.1__CSP
augaagaacuuuauacuguuggccgucagcaguauacuccuaguggaccuauucccgacacacugcggacauaauguggaccuaagcaaggcaauaaaccugaacgggguaaacuucaauaacguggaugcaaguagccuaggggcggcgcacguaggacagagcgcaaguaggggaaggggacugggggaaaacccagacgacgaggagggagacgcgaaaaagaagaaagacggaaagaaagcagaaccgaaaaacccaagggaaaacaaacuaaaacaaccagcgggagacagagcagacggacaaccagcaggagacagggccgacggacaaccggcgggagacagagcggcagggcaaccggcaggggacagagcggacggacaaccagcgggagacagggcggacggacaaccagcaggagacagggcagcaggacagccagcgggagaccgggcggacggacaaccagcaggagacagggcagcaggacaaccagccggagaccgagcagacgggcaaccagcaggggacagggcggacggacaaccagcgggcgacagagcggcaggacaaccagcaggagacagggcagacgggcaaccagcaggggacagagcggcaggacaaccggcaggagacagagccgacggacaaccagcgggagacagagcagcagggcaaccagcgggagacagagcggcagggcagccagcaggagacagagcagcagggcaaccggcaggaaacggggcaggaggacaagcagcgggaggaaacgcagggggaaacgcaggaggaaacgcgggaggacaaggacaaaacaacgagggagcaaacgcgccgaacgagaaaagcguaaaagaauauuuggacaaaguaagggcgacaguaggaacagaguggacgcccugcagcguaacaugcggcgugggagugcgaguaagaaggagaguaaacgcagcaaacaaaaagccggaagaccuaacacuaaacgacuuagagacagauguguguacgauggacaagugcgcgggaauauucaacguaguaagcaacagccuagggcucguaauacuacuggugcuagcacuauucaacuga

SEQ ID NO: 6126 - RNA, 1107 nt, Artificial Sequence
  derived and/or modified CDS sequence (opt11) from Pv(Cam32)__AGN05260.1__CSP
augaagaacuucauacuguuagcaguaaguagcauacuauuaguagaccuguucccaacgcacugcgggcacaacguagacuuaagcaaggcaauaaaucugaacggggugggcuucaacaacguggacgcaagcagccuaggggcagcacacguaggacagagugcaagcagagggagaggacugggagaaaacccagacgacgaagagggagacgccaagaaaaagaaagacggaaagaaagcagaaccgaaaaacccaagagaaaacaaacugaaacagccagcgggagacagagcggacggacagccggcaggagauagagcagacgggcagccagcaggagacagagcagaugggcagccagcaggggaccgggcagcaggacagccagcaggagauagagcggacggacagccagcaggggacagggcagcaggacaaccggcgggagacagagcagacggacaaccagcaggggacagggcggcggggcagccggcaggagacagggcagacgggcaaccggcaggggacagagcggcagggcaaccagcgggagacagggcggcagggcaaccggcaggagacagggcagacggacaaccggcgggagacagggcggcagggcaaccggcgggagacagggcagacggacagccagcgggagacagggcagcagggcaaccggcaggagacagagcagcaggacaaccagcaggagacagggcggcggggcaaccggcagggaacggggcgggagggcaggcagcgggaggaaacgcgggaggcaacgcgggaggaaaugcagggggacagggacaaaauaacgagggagcgaacgcgccgaacgagaaaagcgugaaggaguaccuagacaaaguaagagcgacgguggggacagaguggacaccgugcagcguaacauguggagucggcgugagaguaaggaggagagugaacgcggcaaacaagaagccggaagacuugacgcuaaacgaccuggaaacagacguaugcacaauggacaagugcgcgggaauauucaacguggugagcaauagccuagggcuagugauacugcuaguacuagcacuguucaacuga

SEQ ID NO: 6127 - RNA, 1107 nt, Artificial Sequence
  derived and/or modified CDS sequence (opt11) from Pv(Cam38)__AGN05266.1__CSP
augaagaacuucauacugcuagcgguaaguaguauacugcuaguggaccuauuuccaacacacugcgggcacaacguggacuuaagcaaggcaauaaacuugaacggggucaauuucaacaacguagacgcgagcagucuaggagccgcgcacguaggacagagcgcaagccgaggaagaggacugggagaaaacccggacgacgaagaaggggacgcaaagaagaagaaagacggaaagaaagcggaaccgaaaaacccaagagaaaacaaauugaaacaaccaggggacagggcagacggacagccagcgggggacagggcggacgggcaaccggcaggggacagggccgcgggacagccagcaggagaccgagcggacgggcaaccggcaggggacagagcagcgggacagccagcaggagacagggcggacggacaaccagcaggagacagggcagcgggacaaccggcaggagacagagcagacgggcagccagcaggagacagggcagcgggacagccggcaggggacagagcggacgggcaaccggcaggagacagagcagcgggccagccagcgggagacagagcggacggacaaccggcaggagacagagcagcagggcagccagcgggagaccgggcagccggacaaccggcaggggacagggcagacggacagccagcaggagacagggcagcugggcaaccggcaggggacagggcagcaggacagccagcaggagacagagcggcaggacagccggcaggaaacggagccgggggacaggcagcgggagggaacgcgggagggcaaggacaaaacaacgagggagcaaacgcgccaaacgagaaaagugugaaagaauaccuagacaaagugagggcaacgguagggacagaauggacgccaugcagcguaaccugcggcgugggaguaagagugagaagacgaguaaacgcggcaaauaagaaaccagaggaccugacacuaaacgaccuagaaacagacguauguacaauggacaaaugugcaggaauauucaacguaguaagcaacagccuaggacugguaauacucuuaguacuggcacuguucaacuga

SEQ ID NO: 6128 - RNA, 1104 nt, Artificial Sequence
  derived and/or modified CDS sequence (opt11) from Pv(CSP19VK210)__ANS71599.1__CSP
augaaaaacuucauacuauuagcggugagcaguauacuacugguggacuuguucccgacacacugcgggcacaaugucgaucuaagcaaagcaauaaaucugaacggagugaacuuuaacaacguagacgcaaguagccuaggagcggcacacguagggcaaucggccagcagaggacgaggacuaggggaaaauccagacgacgaggaaggagacgcaaagaagaaaaaggacgggaagaaggcagaaccaaagaacccaagagagaacaaacuaaagcaaccaggggauagagcagacgggcaaccagcaggggacagagcggacggacagccagcgggagauagggcggacggacaaccggcaggggacagggcagcgggacaaccagcgggagacagagcggacgggcaaccggcaggggauagagcagcaggacagccggcaggggauagagcggacgggcagccagcaggggacagggcagcggggcagccagcaggggacagggcggacgggcaaccggcaggggacagggcggcgggacaaccagcgggagauagagcggacggacaaccggcaggagacagggcagcaggacaaccggcgggcgauagagcggcaggacaaccggcaggggacagggcagacgggcagccggcaggggacagagcagcaggacaaccggcgggggacagagcagcgggacagccagcaggagaccgagcggcaggacaaccggcagggaacggggcaggagggcaggcggcgggagggaacgcagcgaacaagaaagcagaggacgcaggcgggcaagggcaaaacaacgagggggcgaacgcgccgaacgagaaaagcgugaaagaauaccuagacaaaguaagggcaacgguagggacagaauggacgccauguagcgugacgugcggaguaggggugagagugcgaagaagggugaacgcggcaaacaagaaaccagaggaccugacauugaacgauauagagacggauguaugcacaauggacaaaugugcgggaauauuuaacguagugagcaauagccugggauugguaauccugcuaguacuagcccuauucaacuaa

SEQ ID NO: 6129 - RNA, 1089 nt, Artificial Sequence
  derived and/or modified CDS sequence (opt11) from Pv(CSP24VK210)__ANS71604.1__CSP
augaaaaacuucauacuacuggcgguaagcagcauucuacuaguagaccuauucccgacgcacuguggacacaacguggacuugagcaaagcaaucaaccuaaacggaguaaacuucaacaacguagacgcgagcagccuaggagcagcacacguggggcaaagugcgagcagaggaaggggauuaggagaaaacccagaugacgaagagggagacgccaaaaaaaaaaaagacggaaaaaaagcggaaccaaaaaacccaagggaaaauaaacugaagcaaccaggggacagggcggacgggcagccagcgggagacagggcagacggacaaccggcgggagacagggcagacggacagcccgcaggggauagagcagcagggcaaccagcgggagacagggcagacggacaaccggcaggagacagggcagcagggcagccggcaggggacagggcggacggacaaccggcaggagacagggcagcaggacaaccagcaggagacagggcagacggacaaccagcgggagacagggcagcaggacaaccagcaggggacagagcagacgggcaaccagcaggagacagagcggcggggcaaccagcgggggacagggcagcagggcaaccagcgggggacagagcagacgggcaaccagcaggagacagggcagcaggacagccggcgggagacagagcagcagggcaaccagcgggaaacggggcaggaggacaagcagcagggggaaaugccgcaaacaagaaagcggaagacgcgggagggaacgcggggggacaaggacagaacaacgaaggagcaaacgcgccaaacgaaaaaaguguaaaagaauaccuggacaagguaagagcgacaguggggacagaguggacaccaugcagcguaacguguggaguagggguaagagugagaaggaggguaaacgcagcaaacaaaaaaccggaagaccuaacguugaacgacauagagacagacguauguacaauggacaagugcgcaggaauauucaacguaguaagcaacagucugggacuggugauauuacuaguacuagcacuauucaacuaa

SEQ ID NO: 6130 - RNA, 1089 nt, Artificial Sequence
  derived and/or modified CDS sequence (opt11) from Pv(CSP35VK210)__ANS71615.1__CSP
augaaaaacuucauauuacuagcgguaaguagcauacugcuaguagaccuauucccaacgcacugcggacacaacguagaccuaagcaaggcgauaaaccuaaacggaguaaacuuuaacaacguagacgcgaguagccuaggagcggcgcauguaggacagagcgcgagcagggggagaggacuaggcgaaaacccagacgacgaagagggggaugcgaaaaagaagaaagauggaaagaaagcagaacccaaaaacccaagggagaacaaauugaaacaaccaggagacagggcggauggacaaccagcaggagacagagcagacgggcaaccggcgggagacagagcagcgggacagccagcaggagacagagcagacgggcagccagcaggagauagggcagcgggacaaccagcgggagacagagcagacgggcagccagcaggggacagagcagcagggcaaccagcaggagacagggcagacggacaaccggcaggggacagagcggcgggacagccagcgggagacagagcagacgggcaaccagcaggggacagagcggcggggcagccagcgggagacagagcggcaggacagccggcaggagacagggcagacgggcagccagcaggagacagagcagcggggcaaccggcaggagacagagcagcgggacagccggcaggagacagagcggcaggacaaccggcaggaaauggggcaggagggcaggcagcgggagggaacgcagcaaacaagaaagcagaggacgcagggggaaacgcgggaggacaaggacaaaacaacgagggagcaaacgcaccaaacgagaaaagcguaaaagaauaccuagacaaggucagagcuacgguagggacagaguggacaccauguagcgugacaugcggaguaggggugagaguaagaagaagagugaacgcagcgaacaagaaaccagaggaccugacgcugaacgauauagagacggacguaugcacaauggacaaaugcgcggggauauucaacguaguaagcaacaguuuaggauuaguaauacugcugguacuggccuuguucaacuga

SEQ ID NO: 6131 - RNA, 1062 nt, Artificial Sequence
  derived and/or modified CDS sequence (opt11) from Pv(CSP9VK210)__ANS71589.1__CSP
augaaaaacuucauacuauuagcagugagcagcauacugcuaguagaccuguucccaacacacugcggacacaacguagaccuaagcaaagcgauaaaccugaacggaguaaacuuuaacaacguagacgcaaguagccuaggagcggcgcacguaggacaaagugcaagcagagggaggggacugggagaaaacccagacgacgaagaaggggacgcaaaaaaaaaaaaagacggaaaaaaagcggaaccaaaaaacccgagagaaaacaaacuaaaacaaccaggggacagagcagacggacaaccggcaggggacagagcggacggccaaccagcgggggaccgggcagcggggcaaccggcgggagacagagcagacggacagccagcaggagacagggcggcaggacaaccagcaggagacagggcagauggacaaccggcgggagacagagcagcaggacaaccggcgggggacagggcagacggacaaccagcaggagauagggcagccggacaaccggcgggagacagagcggcagggcagcccgcaggagacagagcggacggacagccggcaggagacagggcagcagggcaaccggcaggagauagagcggcagggcaaccagcaggagacagggcggcggggcaaccagcgggagacagagcagcagggcaaccagccggaaacggagcaggaggacaagcggcgggagggaacgcagcaaacaaaaaagcagaagacgcaggaggaaacgcagggggacaaggacaaaacaacgaaggggcgaacgcaccaaacgaaaaaagugugaaagaauaccucgacaaaguaagggcaacaguagggacagaauggacaccaugcagcgugacaugcgggguaggaguaagaguaagaagaagaguaaacgcggcaaacaaaaaaccagaagacuuaacacugaacgacauagaaacggacguaugcacaauggacaaaugcgcgggaauauucaacguggugagcaauagccuagggcugguaauacugcuaguacuggcauuguucaacuaa

SEQ ID NO: 6132 - RNA, 894 nt, Artificial Sequence
  derived and/or modified CDS sequence (opt11) from Pv(Pt02.2)__ADB92552.1__CSP
augaaaaacuuuauauugcuagcaguaagcagcauacugcuaguggaccuauucccgacacacugcgggcacaacguagaccuaaguaaagcaauaaaccuaaacggagugggauucaacaacguagacgcaagcagccuaggagcagcacacguaggacaaagcgcaagcagaggaagagggcugggggaaaacccagacgacgaagaaggagacgcgaaaaagaagaaagacggaaagaaagcagaacccaaaaacccaagagaaaacaaacuaaagcaaccggaagacggagcaggggaccagccaggagcaaacggggcaggaaaccaaccaggggcgaacggggcaggaaaccaaccgggggcgaacggagcagggaaccaaccaggagcgaacggagcagggaaccaaccgggagcaaacggagcaggaaaccagccaggagcgaacggagcgggaaaccagccaggagcaaacggagcaggagggcaggcagcgggagggaacgcagcaaacaagaaagccggggacgcgggagcaggaggacaagcagcgggagggaacgcagcaaacaagaaagcgggagacgccggagcgggacaagggcaaaacaacgaaggagcaaaugcaccgaaugagaaaaguguaaaagaauaccuagacaaagugagggcgacgguggggacagaauggacgccaugcagcgugacgugcggaguagggguaaggguaaggagaagaguaaacgcggcaaacaagaaaccagaagaccuaacgcuaaacgaccuagaaacagauguaugcacaauggacaaaugcgcggggauauucaacgugguaagcaacagccuaggacuggugauacuacugguacuagcguuauucaacuaa

SEQ ID NO: 6133 - RNA, 840 nt, Artificial Sequence
  derived and/or modified CDS sequence (opt11) from Pv(Pt04.5)__ADB92555.1__CSP
augaagaacuucauacugcuagcgguaagcagcauacuacugguagaccuauucccaacgcacugcggacacaacguagaccugaguaaagcaauaaaccugaacggggugggauucaacaacguagacgcaaguagccugggggcagcgcacguaggacagagcgcaagcagaggaaggggacugggagaaaacccggacgaugaagaaggagacgcgaaaaaaaaaaaagacggaaaaaaagcagaaccaaaaaacccacgagagaacaaacugaaacagccggaggacggggcaggagaccaaccaggggcaaacggagcaggaaaccaaccgggggcaaacggagcaggaaaccagccaggggcaaacggagcgggaaaucaaccgggagcgaacggggcaggaaaccagccaggggcaaacggggcaggaggacaggcagcagggggcaaugcagcgaacaaaaaagcgggagacgcaggagcaggggggcaggcggcaggaggaaacgcggcaaacaaaaaagcaggagacgcaggagcagggcaaggacagaacaacgaaggggcaaacgcaccgaacgaaaaaaguguaaaagaauaccuagacaagguaagggcgacgguaggaacggaauggacgccaugcagcguaacaugcggaguaggggugagagugaggagaagaguaaacgcagcaaacaagaaaccagaggaccucacacuaaacgaccuggaaacggauguaugcacaauggacaaaugugcagggauauucaacguaguaagcaacagccuaggacuagugauacugcuaguacuagcacuauucaacuaa

SEQ ID NO: 6134 - RNA, 1023 nt, Artificial Sequence
  derived and/or modified CDS sequence (opt11) from Pb(ANKA)__XP_022712148.1__CSP
augaaaaaaugcacgauccucgucgucgccucacuccuucucgucaacucccuccuaccaggauacggucaaaacaaauccauccaagcccaacgcaaccucaacgaauuaugcuacaacgaaggcaacgacaacaaacucuaccacguccuaaacucuaaaaacggcaaaaucuacaaccgaaacacagucaaccgccuccucgccgacgcccccgaaggcaaaaaaaacgaaaaaaaaaacgaaaaaaucgaacgaaacaacaaacucaaacaacccccccccccccccaaccccaacgaccccccacccccaaaccccaacgauccccccccccccaaccccaacgaccccccaccaccaaaccccaacgacccacccccccccaacgcaaacgacccccccccacccaacgccaacgaccccgccccacccaacgccaacgaccccgcaccccccaacgcaaacgaccccgccccaccaaacgcuaacgaccccgcacccccaaacgcgaacgacccccccccccccaaccccaacgacccagcaccccccaacgccaacgaccccccccccccaaaccccaacgaccccgcaccaccccaaggcaacaacaacccccaaccccaaccacguccccaaccccaaccccaaccccaaccccaaccucaaccacaaccccaaccccaaccccgcccccaaccccaaccccaaccaggcggaaacaacaacaacaaaaacaacaacaaugacgacucauacauacccucagcugagaaaauccucgaauucgucaaacaaauccgcgacucaaucaccgaagaauggucacaaugcaauguaaccugcggcuccggcaucagaguccgcaaacgaaaaggcuccaacaaaaaagcagaagaccucacucuagaagauauagacaccgaaaucugcaaaauggacaaaugcuccuccaucuucaacaucgucucaaacucccucggauucgucauccuacuaguucuagucuucuucaacuaa

SEQ ID NO: 6135 - DNA, 62 bp, Artificial Sequence
  5'-UTR of human peroxisomal multifunctional enzyme type 2 lacking the 5'-terminal oligopyrimidine tract (HSD17B4)
gtcccgcagtcggcgtccagcggctctgcttgttcgtgtgtgtgtcgttgcaggccttattc

SEQ ID NO: 6136 - RNA, 62 nt, Artificial Sequence
  5'-UTR of human peroxisomal multifunctional enzyme type 2 lacking the 5'-terminal oligopyrimidine tract (HSD17B4) mRNA
gucccgcagucggcguccagcggcucugcuuguucgugugugugucguugcaggccuuauuc

SEQ ID NO: 6137 - DNA, 42 bp, Artificial Sequence
  5'-UTR of human acid ceramidase lacking the 5'-terminal oligopyrimidine tract (ASAH1)
gcctctgctggagtccggggagtggcgttggctgctagagcg

SEQ ID NO: 6138 - RNA, 42 nt, Artificial Sequence
  5'-UTR of human acid ceramidase lacking the 5'-terminal oligopyrimidine tract (ASAH1) mRNA
gccucugcuggaguccggggaguggcguuggcugcuagagcg

SEQ ID NO: 6139 - DNA, 75 bp, Artificial Sequence
  5'-UTR of human mitochondrial ATP synthase subunit alpha lacking the 5'-terminal oligopyrimidine tract (ATP5A1)
gcggctcggccattttgtcccagtcagtccggaggctgcggctgcagaagtaccgcctgcggagtaactgcaaag

SEQ ID NO: 6140 - RNA, 75 nt, Artificial Sequence
  5'-UTR of human mitochondrial ATP synthase subunit alpha lacking the 5'-terminal oligopyrimidine tract (ATP5A1) mRNA
gcggcucggccauuuugucccagucaguccggaggcugcggcugcagaaguaccgccugcggaguaacugcaaag

SEQ ID NO: 6141 - DNA, 54 bp, Artificial Sequence
  5'-UTR of mouse RIKEN cDNA 2010107E04 gene (Mp68, 2010107E04Rik)
ctttcccattctgtagcagaatttggtgttgcctgtggtcttggtcccgcggag

SEQ ID NO: 6142 - RNA, 54 nt, Artificial Sequence
  5'-UTR of mouse RIKEN cDNA 2010107E04 gene (Mp68, 2010107E04Rik) mRNA
cuuucccauucuguagcagaauuugguguugccuguggucuuggucccgcggag

SEQ ID NO: 6143 - DNA, 81 bp, Artificial Sequence
  5'-UTR of mouse NADH dehydrogenase (ubiquinone) 1 alpha subcomplex, 4 (Ndufa4)
gtccgctcagccaggttgcagaagcggcttagcgtgtgtcctaatcttctctctgcgtgtaggtaggcctgtgccgcaaac

SEQ ID NO: 6144 - RNA, 81 nt, Artificial Sequence
  5'-UTR of mouse NADH dehydrogenase (ubiquinone) 1 alpha subcomplex, 4 (Ndufa4) mRNA
guccgcucagccagguugcagaagcggcuuagcguguguccuaaucuucucucugcguguagguaggccugugccgcaaac

SEQ ID NO: 6145 - DNA, 108 bp, Artificial Sequence
  5'-UTR of mouse nitric oxide synthase interacting protein (Nosip)
ctcctgtcgggcggaagtaggaggagtagagtttaaaaacagtactctttttccggttcgggacgtagttgaagcaacgacaagccggataaccgctcttgagacagg

SEQ ID NO: 6146 - RNA, 108 nt, Artificial Sequence
  5'-UTR of mouse nitric oxide synthase interacting protein (Nosip) mRNA
cuccugucgggcggaaguaggaggaguagaguuuaaaaacaguacucuuuuuccgguucgggacguaguugaagcaacgacaagccggauaaccgcucuugagacagg

SEQ ID NO: 6147 - DNA, 84 bp, Artificial Sequence
  5'-UTR of mouse ribosomal protein L31 (Rpl31)
cccgtgacccggaagttgtacggctacgcgactttccctcccacaaaccctcgcgcccttcctttcctacttgggcccggcaga

SEQ ID NO: 6148 - RNA, 84 nt, Artificial Sequence
  5'-UTR of mouse ribosomal protein L31 (Rpl31) mRNA
cccgugacccggaaguuguacggcuacgcgacuuucccucccacaaacccucgcgcccuuccuuuccuacuugggcccggcaga

SEQ ID NO: 6149 - DNA, 159 bp, Artificial Sequence
  5'-UTR of mouse solute carrier family 7 (cationic amino acid transporter, y+ system), member 3 (Slc7a3)
gggcgcttggcttgcaaggaccctgagctgcggcattgaagcacacccaacccaactcgactgaagtcagcctcactgaaccggatctgagaatcttctctctctgggcttgccagggctctccgaacctagctagcatcctcttcaattccaactaga

SEQ ID NO: 6150 - RNA, 159 nt, Artificial Sequence
  5'-UTR of mouse solute carrier family 7 (cationic amino acid transporter, y+ system), member 3 (Slc7a3) mRNA
gggcgcuuggcuugcaaggacccugagcugcggcauugaagcacacccaacccaacucgacugaagucagccucacugaaccggaucugagaaucuucucucucugggcuugccagggcucuccgaaccuagcuagcauccucuucaauuccaacuaga

SEQ ID NO: 6151 - DNA, 102 bp, Artificial Sequence
  5'-UTR of human tubulin beta 4B class Ivb (TUBB4B)
atataagcgttggcggagcgtcggttgtagcactctgcgcgcccgctcttctgctgctgtttgtctacttcctcctgcttccccgccgccgccgccgccatc

SEQ ID NO: 6152 - RNA, 102 nt, Artificial Sequence
  5'-UTR of human tubulin beta 4B class Ivb (TUBB4B) mRNA
auauaagcguuggcggagcgucgguuguagcacucugcgcgcccgcucuucugcugcuguuugucuacuuccuccugcuuccccgccgccgccgccgccauc

SEQ ID NO: 6153 - DNA, 222 bp, Artificial Sequence
  5'-UTR of mouse ubiquilin 2 (Ubqln2)
cggagacggcctgcaggacctgctctctcagccctcagccgaggcctacgccgagccgagtgcgcagccgacgaccgggaggagccgcagccttcaactctgaggtactgtgatccgcgctgcccgccgggccgccccagtccgctgctgcggcacctccttccctcgcgccctcttcgctcgccagcgccttccctgtgagcctgcgtcaccgcggccgcc

SEQ ID NO: 6154 - RNA, 222 nt, Artificial Sequence
  5'-UTR of mouse ubiquilin 2 (Ubqln2)  mRNA
cggagacggccugcaggaccugcucucucagcccucagccgaggccuacgccgagccgagugcgcagccgacgaccgggaggagccgcagccuucaacucugagguacugugauccgcgcugcccgccgggccgccccaguccgcugcugcggcaccuccuucccucgcgcccucuucgcucgccagcgccuucccugugagccugcgucaccgcggccgcc

SEQ ID NO: 6155 - DNA, 42 bp, Artificial Sequence
  5'-UTR of human ribosomal protein Large 32 lacking the 5'-terminal oligopyrimidine tract (RPL32, 32L4)
ggcgctgcctacggaggtggcagccatctccttctcggcatc

SEQ ID NO: 6156 - RNA, 42 nt, Artificial Sequence
  5'-UTR of human ribosomal protein Large 32 lacking the 5'-terminal oligopyrimidine tract (RPL32, 32L4) mRNA
ggcgcugccuacggagguggcagccaucuccuucucggcauc

SEQ ID NO: 6157 - DNA, 57 bp, Artificial Sequence
  3'-UTR of human proteasome subunit beta 3 (PSMB3)
ccctgttcccagagcccacttttttttctttttttgaaataaaatagcctgtctttc

SEQ ID NO: 6158 - RNA, 57 nt, Artificial Sequence
  3'-UTR of human proteasome subunit beta 3 (PSMB3) mRNA
cccuguucccagagcccacuuuuuuuucuuuuuuugaaauaaaauagccugucuuuc

SEQ ID NO: 6159 - DNA, 121 bp, Artificial Sequence
  3'-UTR of human caspase 1 (CASP1)
aataaggaaactgtatgaatgtctgtgggcaggaagtgaagagatccttctgtaaaggtttttggaattatgtctgctgaataataaacttttttgaaataataaatctggtagaaaaatg

SEQ ID NO: 6160 - RNA, 121 nt, Artificial Sequence
  3'-UTR of human caspase 1 (CASP1) mRNA
aauaaggaaacuguaugaaugucugugggcaggaagugaagagauccuucuguaaagguuuuuggaauuaugucugcugaauaauaaacuuuuuugaaauaauaaaucugguagaaaaaug

SEQ ID NO: 6161 - DNA, 137 bp, Artificial Sequence
  3'-UTR of human cytochrome c oxidase subunit 6B1 (COX6B1)
actggctgcatctccctttcctctgtcctccatccttctcccaggatggtgaagggggacctggtacccagtgatccccaccccaggatcctaaatcatgacttacctgctaataaaaactcattggaaaagtgaga

SEQ ID NO: 6162 - RNA, 137 nt, Artificial Sequence
  3'-UTR of human cytochrome c oxidase subunit 6B1 (COX6B1) mRNA
acuggcugcaucucccuuuccucuguccuccauccuucucccaggauggugaagggggaccugguacccagugauccccaccccaggauccuaaaucaugacuuaccugcuaauaaaaacucauuggaaaagugaga

SEQ ID NO: 6163 - DNA, 353 bp, Artificial Sequence
  3'-UTR of mouse GNAS (guanine nucleotide binding protein, alpha stimulating) complex locus (Gnas)
gaagggaacacccaaatttaattcagccttaagcacaattaattaagagtgaaacgtaattgtacaagcagttggtcacccaccatagggcatgatcaacaccgcaacctttcctttttcccccagtgattctgaaaaacccctcttcccttcagcttgcttagatgttccaaatttagtaagcttaaggcggcctacagaagaaaaagaaaaaaaaggccacaaaagttccctctcactttcagtaaataaaataaaagcagcaacagaaataaagaaataaatgaaattcaaaatgaaataaatattgtgttgtgcagcattaaaaaatcaataaaaattaaaaatgagca

SEQ ID NO: 6164 - RNA, 353 nt, Artificial Sequence
  3'-UTR of mouse GNAS (guanine nucleotide binding protein, alpha stimulating) complex locus (Gnas) mRNA
gaagggaacacccaaauuuaauucagccuuaagcacaauuaauuaagagugaaacguaauuguacaagcaguuggucacccaccauagggcaugaucaacaccgcaaccuuuccuuuuucccccagugauucugaaaaaccccucuucccuucagcuugcuuagauguuccaaauuuaguaagcuuaaggcggccuacagaagaaaaagaaaaaaaaggccacaaaaguucccucucacuuucaguaaauaaaauaaaagcagcaacagaaauaaagaaauaaaugaaauucaaaaugaaauaaauauuguguugugcagcauuaaaaaaucaauaaaaauuaaaaaugagca

SEQ ID NO: 6165 - DNA, 133 bp, Artificial Sequence
  3'-UTR of mouse NADH dehydrogenase (ubiquinone) 1 alpha subcomplex, 1 (Ndufa1)
ggaagcattttcctggctgattaaaagaaattactcagctatggtcatctgttcctgttagaaggctatgcagcatattatatactatgcgcatgttatgaaatgcataataaaaaattttaaaaaatctaaa

SEQ ID NO: 6166 - RNA, 133 nt, Artificial Sequence
  3'-UTR of mouse NADH dehydrogenase (ubiquinone) 1 alpha subcomplex, 1 (Ndufa1) mRNA
ggaagcauuuuccuggcugauuaaaagaaauuacucagcuauggucaucuguuccuguuagaaggcuaugcagcauauuauauacuaugcgcauguuaugaaaugcauaauaaaaaauuuuaaaaaaucuaaa

SEQ ID NO: 6167 - DNA, 70 bp, Artificial Sequence
  3'-UTR of human ribosomal protein S9 (RPS9)
gtccacctgtccctcctgggctgctggattgtctcgttttcctgccaaataaacaggatcagcgctttac

SEQ ID NO: 6168 - RNA, 70 nt, Artificial Sequence
  3'-UTR of human ribosomal protein S9 (RPS9) mRNA
guccaccugucccuccugggcugcuggauugucucguuuuccugccaaauaaacaggaucagcgcuuuac

SEQ ID NO: 6169 - DNA, 187 bp, Artificial Sequence
  3'-UTR ALB7
gcatcacatttaaaagcatctcagcctaccatgagaataagagaaagaaaatgaagatcaatagcttattcatctctttttctttttcgttggtgtaaagccaacaccctgtctaaaaaacataaatttctttaatcattttgcctcttttctctgtgcttcaattaataaaaaatggaaagaacct

SEQ ID NO: 6170 - RNA, 187 nt, Artificial Sequence
  3'-UTR ALB7 mRNA
gcaucacauuuaaaagcaucucagccuaccaugagaauaagagaaagaaaaugaagaucaauagcuuauucaucucuuuuucuuuuucguugguguaaagccaacacccugucuaaaaaacauaaauuucuuuaaucauuuugccucuuuucucugugcuucaauuaauaaaaaauggaaagaaccu

SEQ ID NO: 6171 - DNA, 44 bp, Artificial Sequence
  Center, alpha-complex-binding portion of the 3'-UTR of an alpha-globin gene (muag)
gcccgatgggcctcccaacgggccctcctcccctccttgcaccg

SEQ ID NO: 6172 - RNA, 44 nt, Artificial Sequence
  Center, alpha-complex-binding portion of the 3'-UTR of an alpha-globin gene (muag) mRNA
gcccgaugggccucccaacgggcccuccuccccuccuugcaccg

SEQ ID NO: 6173 - DNA, 24 bp, Artificial Sequence
  histone stem-loop sequence (histoneSL, hSL)
caaaggctcttttcagagccacca

SEQ ID NO: 6174 - RNA, 24 nt, Artificial Sequence
  histone stem-loop sequence (histoneSL, hSL) mRNA
caaaggcucuuuucagagccacca

SEQ ID NO: 6175 - DNA, 13 bp, Artificial Sequence
  Kozak
gccgccaccatgg

SEQ ID NO: 6176 - RNA, 13 nt, Artificial Sequence
  Kozak mRNA
gccgccaccaugg

SEQ ID NO: 6177 - RNA, 6 nt, Artificial Sequence
  mRNA 5'-end
gggaga

SEQ ID NO: 6178 - RNA, 6 nt, Artificial Sequence
  mRNA 5'-end
aggaga

SEQ ID NO: 6179 - RNA, 99 nt, Artificial Sequence
  mRNA 3'-end A75-histoneSL
aaaaaaaaaaaaaaaaaaaaaaaaaaaaaaaaaaaaaaaaaaaaaaaaaaaaaaaaaaaaaaaaaaaaaaaaaaacaaaggcucuuuucagagccacca

SEQ ID NO: 6180 - RNA, 102 nt, Artificial Sequence
  mRNA 3'-end U3-A75-histoneSL
uuuaaaaaaaaaaaaaaaaaaaaaaaaaaaaaaaaaaaaaaaaaaaaaaaaaaaaaaaaaaaaaaaaaaaaaaaaaaacaaaggcucuuuucagagccacca

SEQ ID NO: 6181 - RNA, 178 nt, Artificial Sequence
  mRNA 3'-end A154-histoneSL
aaaaaaaaaaaaaaaaaaaaaaaaaaaaaaaaaaaaaaaaaaaaaaaaaaaaaaaaaaaaaaaaaaaaaaaaaaaaaaaaaaaaaaaaaaaaaaaaaaaaaaaaaaaaaaaaaaaaaaaaaaaaaaaaaaaaaaaaaaaaaaaaaaaaaaaaaacaaaggcucuuuucagagccacca

SEQ ID NO: 6182 - RNA, 181 nt, Artificial Sequence
  mRNA 3'-end U3-A154-histoneSL
uuuaaaaaaaaaaaaaaaaaaaaaaaaaaaaaaaaaaaaaaaaaaaaaaaaaaaaaaaaaaaaaaaaaaaaaaaaaaaaaaaaaaaaaaaaaaaaaaaaaaaaaaaaaaaaaaaaaaaaaaaaaaaaaaaaaaaaaaaaaaaaaaaaaaaaaaaaaacaaaggcucuuuucagagccacca

SEQ ID NO: 6183 - RNA, 101 nt, Artificial Sequence
  mRNA 3'-end N2-A75-histoneSL
agaaaaaaaaaaaaaaaaaaaaaaaaaaaaaaaaaaaaaaaaaaaaaaaaaaaaaaaaaaaaaaaaaaaaaaaaaaacaaaggcucuuuucagagccacca

SEQ ID NO: 6184 - RNA, 99 nt, Artificial Sequence
  mRNA 3'-end histoneSL-A75
caaaggcucuuuucagagccaccaaaaaaaaaaaaaaaaaaaaaaaaaaaaaaaaaaaaaaaaaaaaaaaaaaaaaaaaaaaaaaaaaaaaaaaaaaaa

SEQ ID NO: 6185 - RNA, 124 nt, Artificial Sequence
  mRNA 3'-end histoneSL-A100
caaaggcucuuuucagagccaccaaaaaaaaaaaaaaaaaaaaaaaaaaaaaaaaaaaaaaaaaaaaaaaaaaaaaaaaaaaaaaaaaaaaaaaaaaaaaaaaaaaaaaaaaaaaaaaaaaaaa

SEQ ID NO: 6186 - RNA, 170 nt, Artificial Sequence
  mRNA 3'-end histoneSL-A146
caaaggcucuuuucagagccaccaaaaaaaaaaaaaaaaaaaaaaaaaaaaaaaaaaaaaaaaaaaaaaaaaaaaaaaaaaaaaaaaaaaaaaaaaaaaaaaaaaaaaaaaaaaaaaaaaaaaaaaaaaaaaaaaaaaaaaaaaaaaaaaaaaaaaaaaaaaaaaaaaaa

SEQ ID NO: 6187 - RNA, 136 nt, Artificial Sequence
  mRNA 3'-end N8-A64-N5-C30-histoneSL-N5
agauuaauaaaaaaaaaaaaaaaaaaaaaaaaaaaaaaaaaaaaaaaaaaaaaaaaaaaaaaaaaaaaaaaaugcaucccccccccccccccccccccccccccccccaaaggcucuuuucagagccaccagaauu

SEQ ID NO: 6188 - RNA, 131 nt, Artificial Sequence
  mRNA 3'-end N8-A64-N5-C30-histoneSL
agauuaauaaaaaaaaaaaaaaaaaaaaaaaaaaaaaaaaaaaaaaaaaaaaaaaaaaaaaaaaaaaaaaaaugcaucccccccccccccccccccccccccccccccaaaggcucuuuucagagccacca

SEQ ID NO: 6189 - RNA, 105 nt, Artificial Sequence
  mRNA 3'-end N8-A64-N5-C4-histoneSL
agauuaauaaaaaaaaaaaaaaaaaaaaaaaaaaaaaaaaaaaaaaaaaaaaaaaaaaaaaaaaaaaaaaaaugcaucccccaaaggcucuuuucagagccacca

SEQ ID NO: 6190 - RNA, 115 nt, Artificial Sequence
  mRNA 3'-end N8-A64-N5-C14-histoneSL
agauuaauaaaaaaaaaaaaaaaaaaaaaaaaaaaaaaaaaaaaaaaaaaaaaaaaaaaaaaaaaaaaaaaaugcaucccccccccccccccaaaggcucuuuucagagccacca

SEQ ID NO: 6191 - RNA, 134 nt, Artificial Sequence
  mRNA 3'-end N6-A64-N5-C30-histoneSL-N5
agaucuaaaaaaaaaaaaaaaaaaaaaaaaaaaaaaaaaaaaaaaaaaaaaaaaaaaaaaaaaaaaaaaaugcaucccccccccccccccccccccccccccccccaaaggcucuuuucagagccaccagaauu

SEQ ID NO: 6192 - RNA, 129 nt, Artificial Sequence
  mRNA 3'-end N6-A64-N5-C30-histoneSL
agaucuaaaaaaaaaaaaaaaaaaaaaaaaaaaaaaaaaaaaaaaaaaaaaaaaaaaaaaaaaaaaaaaaugcaucccccccccccccccccccccccccccccccaaaggcucuuuucagagccacca

SEQ ID NO: 6193 - RNA, 103 nt, Artificial Sequence
  mRNA 3'-end N6-A64-N5-C4-histoneSL
agaucuaaaaaaaaaaaaaaaaaaaaaaaaaaaaaaaaaaaaaaaaaaaaaaaaaaaaaaaaaaaaaaaaugcaucccccaaaggcucuuuucagagccacca

SEQ ID NO: 6194 - RNA, 113 nt, Artificial Sequence
  mRNA 3'-end N6-A64-N5-C14-histoneSL
agaucuaaaaaaaaaaaaaaaaaaaaaaaaaaaaaaaaaaaaaaaaaaaaaaaaaaaaaaaaaaaaaaaaugcaucccccccccccccccaaaggcucuuuucagagccacca

SEQ ID NO: 6195 - RNA, 99 nt, Artificial Sequence
  mRNA 3'-end N6-A64-histoneSL-N5
agaucuaaaaaaaaaaaaaaaaaaaaaaaaaaaaaaaaaaaaaaaaaaaaaaaaaaaaaaaaaaaaaaaacaaaggcucuuuucagagccaccagaauu

SEQ ID NO: 6196 - RNA, 128 nt, Artificial Sequence
  mRNA 3'-end A64-N5-C30-histoneSL-N5
aaaaaaaaaaaaaaaaaaaaaaaaaaaaaaaaaaaaaaaaaaaaaaaaaaaaaaaaaaaaaaaaugcaucccccccccccccccccccccccccccccccaaaggcucuuuucagagccaccagaauu

SEQ ID NO: 6197 - RNA, 123 nt, Artificial Sequence
  mRNA 3'-end A64-N5-C30-histoneSL
aaaaaaaaaaaaaaaaaaaaaaaaaaaaaaaaaaaaaaaaaaaaaaaaaaaaaaaaaaaaaaaaugcaucccccccccccccccccccccccccccccccaaaggcucuuuucagagccacca

SEQ ID NO: 6198 - RNA, 97 nt, Artificial Sequence
  mRNA 3'-end A64-N5-C4-histoneSL
aaaaaaaaaaaaaaaaaaaaaaaaaaaaaaaaaaaaaaaaaaaaaaaaaaaaaaaaaaaaaaaaugcaucccccaaaggcucuuuucagagccacca

SEQ ID NO: 6199 - RNA, 107 nt, Artificial Sequence
  mRNA 3'-end A64-N5-C14-histoneSL
aaaaaaaaaaaaaaaaaaaaaaaaaaaaaaaaaaaaaaaaaaaaaaaaaaaaaaaaaaaaaaaaugcaucccccccccccccccaaaggcucuuuucagagccacca

SEQ ID NO: 6200 - RNA, 93 nt, Artificial Sequence
  mRNA 3'-end A64-histoneSL-N5
aaaaaaaaaaaaaaaaaaaaaaaaaaaaaaaaaaaaaaaaaaaaaaaaaaaaaaaaaaaaaaaacaaaggcucuuuucagagccaccagaauu

SEQ ID NO: 6201 - protein, 14 aa, Artificial Sequence
  derived and/or modified protein sequence (artificial) from Artificial____carrier peptide 1
CRRRRRRRRRRRRC

SEQ ID NO: 6202 - protein, 13 aa, Artificial Sequence
  derived and/or modified protein sequence (artificial) from Artificial____carrier peptide 2
CRRRRRRRRRRRR

SEQ ID NO: 6203 - protein, 14 aa, Artificial Sequence
  derived and/or modified protein sequence (artificial) from Artificial____carrier peptide 3
WRRRRRRRRRRRRC

SEQ ID NO: 6204 - protein, 18 aa, Artificial Sequence
  derived and/or modified protein sequence (artificial) from Artificial____carrier peptide 4
CHHHHHHRRRRHHHHHHC

SEQ ID NO: 6205 - protein, 18 aa, Artificial Sequence
  derived and/or modified protein sequence (wt) from Homo sapiens__NP_000468.1__signal peptide_HsALB
MKWVTFISLLFLFSSAYS

SEQ ID NO: 6206 - protein, 18 aa, Artificial Sequence
  derived and/or modified protein sequence (wt) from Homo sapiens__AAB59424.1__signal peptide_IgE
MDWTWILFLVAAATRVHS

SEQ ID NO: 6207 - protein, 24 aa, Artificial Sequence
  derived and/or modified protein sequence (wt) from Homo sapiens__AAA59172.1__signal peptide_HsIns-iso1
MALWMRLLPLLALLALWGPDPAAA

SEQ ID NO: 6208 - protein, 17 aa, Artificial Sequence
  derived and/or modified protein sequence (wt) from Homo sapiens__CAA68724.1__signal peptide_HsSPARC
MRAWIFFLLCLAGRALA

SEQ ID NO: 6209 - RNA, 54 nt, Artificial Sequence
  derived and/or modified CDS sequence (wt) from Homo sapiens__NP_000468.1__signal peptide_HsALB
augaaguggguaaccuuuauuucccuucuuuuucucuuuagcucggcuuauucc

SEQ ID NO: 6210 - RNA, 54 nt, Artificial Sequence
  derived and/or modified CDS sequence (wt) from Homo sapiens__AAB59424.1__signal peptide_IgE
auggacuggaccuggauccuguuccucguggccgccgcgacccgcguccacagc

SEQ ID NO: 6211 - RNA, 72 nt, Artificial Sequence
  derived and/or modified CDS sequence (wt) from Homo sapiens__AAA59172.1__signal peptide_HsIns-iso1
auggcccuguggaugcgccuccugccccugcuggcgcugcuggcccucuggggaccugacccagccgcagcc

SEQ ID NO: 6212 - RNA, 51 nt, Artificial Sequence
  derived and/or modified CDS sequence (wt) from Homo sapiens__CAA68724.1__signal peptide_HsSPARC
augagggccuggaucuucuuucuccuuugccuggccgggagggcucuggca

SEQ ID NO: 6213 - RNA, 54 nt, Artificial Sequence
  derived and/or modified CDS sequence (opt1) from Homo sapiens__NP_000468.1__signal peptide_HsALB
augaagugggugaccuucaucagccugcucuuccuguucuccagcgccuacucc

SEQ ID NO: 6214 - RNA, 54 nt, Artificial Sequence; identical to SEQ ID NO: 6210
  derived and/or modified CDS sequence (opt1) from Homo sapiens__AAB59424.1__signal peptide_IgE

SEQ ID NO: 6215 - RNA, 72 nt, Artificial Sequence
  derived and/or modified CDS sequence (opt1) from Homo sapiens__AAA59172.1__signal peptide_HsIns-iso1
auggcccuguggaugcgccuccugccccugcucgcccugcuggcgcucuggggcccggaccccgccgccgcc

SEQ ID NO: 6216 - RNA, 51 nt, Artificial Sequence
  derived and/or modified CDS sequence (opt1) from Homo sapiens__CAA68724.1__signal peptide_HsSPARC
augcgcgccuggaucuucuuccugcucugccuggccggccgggcccuggcc

SEQ ID NO: 6217 - RNA, 54 nt, Artificial Sequence
  derived and/or modified CDS sequence (opt2) from Homo sapiens__NP_000468.1__signal peptide_HsALB
augaagugggucaccuucaucucccuccucuuccucuucuccuccgccuacucc

SEQ ID NO: 6218 - RNA, 54 nt, Artificial Sequence
  derived and/or modified CDS sequence (opt2) from Homo sapiens__AAB59424.1__signal peptide_IgE
auggacuggaccuggauccucuuccucgucgccgccgccacccgcguccacucc

SEQ ID NO: 6219 - RNA, 72 nt, Artificial Sequence
  derived and/or modified CDS sequence (opt2) from Homo sapiens__AAA59172.1__signal peptide_HsIns-iso1
auggcccucuggaugcgccuccucccccuccucgcccuccucgcccucuggggccccgaccccgccgccgcc

SEQ ID NO: 6220 - RNA, 51 nt, Artificial Sequence
  derived and/or modified CDS sequence (opt2) from Homo sapiens__CAA68724.1__signal peptide_HsSPARC
augcgcgccuggaucuucuuccuccucugccucgccggccgcgcccucgcc

SEQ ID NO: 6221 - RNA, 54 nt, Artificial Sequence
  derived and/or modified CDS sequence (opt3) from Homo sapiens__NP_000468.1__signal peptide_HsALB
augaagugggugaccuucaucagccugcucuuucuuuucuccucugccuacuca

SEQ ID NO: 6222 - RNA, 54 nt, Artificial Sequence
  derived and/or modified CDS sequence (opt3) from Homo sapiens__AAB59424.1__signal peptide_IgE
auggacuggaccuggauccuguuccucguggccgcugcaacaagaguccacagc

SEQ ID NO: 6223 - RNA, 72 nt, Artificial Sequence
  derived and/or modified CDS sequence (opt3) from Homo sapiens__AAA59172.1__signal peptide_HsIns-iso1
auggcccuguggaugagacuccuuccccuguuggcuuuacuggcacuauggggcccugacccagccgcggcu

SEQ ID NO: 6224 - RNA, 51 nt, Artificial Sequence
  derived and/or modified CDS sequence (opt3) from Homo sapiens__CAA68724.1__signal peptide_HsSPARC
augagagccuggaucuucuuucugcucugccuugcuggcagggcacuggcc

SEQ ID NO: 6225 - RNA, 54 nt, Artificial Sequence
  derived and/or modified CDS sequence (opt4) from Homo sapiens__NP_000468.1__signal peptide_HsALB
augaagugggugaccuucaucagccugcuguuccuguucagcagcgccuacagc

SEQ ID NO: 6226 - RNA, 54 nt, Artificial Sequence
  derived and/or modified CDS sequence (opt4) from Homo sapiens__AAB59424.1__signal peptide_IgE
auggacuggaccuggauccuguuccugguggccgccgccaccagagugcacagc

SEQ ID NO: 6227 - RNA, 72 nt, Artificial Sequence
  derived and/or modified CDS sequence (opt4) from Homo sapiens__AAA59172.1__signal peptide_HsIns-iso1
auggcccuguggaugagacugcugccccugcuggcccugcuggcccuguggggccccgaccccgccgccgcc

SEQ ID NO: 6228 - RNA, 51 nt, Artificial Sequence
  derived and/or modified CDS sequence (opt4) from Homo sapiens__CAA68724.1__signal peptide_HsSPARC
augagagccuggaucuucuuccugcugugccuggccggcagagcccuggcc

SEQ ID NO: 6229 - RNA, 54 nt, Artificial Sequence
  derived and/or modified CDS sequence (opt5) from Homo sapiens__NP_000468.1__signal peptide_HsALB
augaagugggugaccuucaucagccugcucuuucuguucuccucugccuacagc

SEQ ID NO: 6230 - RNA, 54 nt, Artificial Sequence
  derived and/or modified CDS sequence (opt5) from Homo sapiens__AAB59424.1__signal peptide_IgE
auggacuggaccuggauccuguuccucguggccgcugccacaagaguccacagc

SEQ ID NO: 6231 - RNA, 72 nt, Artificial Sequence
  derived and/or modified CDS sequence (opt5) from Homo sapiens__AAA59172.1__signal peptide_HsIns-iso1
auggcccuguggaugagacuccugccccuucuggcucuccuggcccuuuggggcccugacccggcggcugcc

SEQ ID NO: 6232 - RNA, 51 nt, Artificial Sequence
  derived and/or modified CDS sequence (opt5) from Homo sapiens__CAA68724.1__signal peptide_HsSPARC
augagagccuggaucuucuuucugcucugccuggcuggccgggcccuugcg

SEQ ID NO: 6233 - RNA, 54 nt, Artificial Sequence
  derived and/or modified CDS sequence (opt6) from Homo sapiens__NP_000468.1__signal peptide_HsALB
augaaauggguuacuuuuauuucucuucuuuuucuuuuuucuucugcuuacucu

SEQ ID NO: 6234 - RNA, 54 nt, Artificial Sequence
  derived and/or modified CDS sequence (opt6) from Homo sapiens__AAB59424.1__signal peptide_IgE
auggacuggacauggauauuauuuuuaguagcagcagcaacaagaguacauuca

SEQ ID NO: 6235 - RNA, 72 nt, Artificial Sequence
  derived and/or modified CDS sequence (opt6) from Homo sapiens__AAA59172.1__signal peptide_HsIns-iso1
auggcauuauggaugagauuauuaccauuauuagcauuauuagcauuauggggaccagauccagcagcagca

SEQ ID NO: 6236 - RNA, 51 nt, Artificial Sequence
  derived and/or modified CDS sequence (opt6) from Homo sapiens__CAA68724.1__signal peptide_HsSPARC
augcgugcauggauauuuuuucuuuuauguuuggcuggacgugcacuugca

SEQ ID NO: 6237 - RNA, 54 nt, Artificial Sequence
  derived and/or modified CDS sequence (opt11) from Homo sapiens__NP_000468.1__signal peptide_HsALB
augaaaugggucaccuucaucucccuccucuuccucuucuccuccgccuacucc

SEQ ID NO: 6238 - RNA, 54 nt, Artificial Sequence
  derived and/or modified CDS sequence (opt11) from Homo sapiens__AAB59424.1__signal peptide_IgE
auggauuggacguggauacucuuucucguggccgcggccacgcgcgugcacucg

SEQ ID NO: 6239 - RNA, 72 nt, Artificial Sequence
  derived and/or modified CDS sequence (opt11) from Homo sapiens__AAA59172.1__signal peptide_HsIns-iso1
auggcccucuggaugcgccuacucccccuccucgcccuacucgcccucuggggccccgaccccgccgccgcc

SEQ ID NO: 6240 - RNA, 51 nt, Artificial Sequence
  derived and/or modified CDS sequence (opt11) from Homo sapiens__CAA68724.1__signal peptide_HsSPARC
augcgcgcguggauauucuuucucuugugcuuggccgggcgcgcgcucgcg

SEQ ID NO: 6241 - protein, 3 aa, Artificial Sequence
  derived and/or modified protein sequence (artificial) from Artificial____L(AAY)
AAY

SEQ ID NO: 6242 - protein, 5 aa, Artificial Sequence
  derived and/or modified protein sequence (artificial) from Artificial____L(G4S)
GGGGS

SEQ ID NO: 6243 - protein, 4 aa, Artificial Sequence
  derived and/or modified protein sequence (artificial) from Artificial____L(PVTN)
PVTN

SEQ ID NO: 6244 - protein, 9 aa, Artificial Sequence
  derived and/or modified protein sequence (artificial) from Artificial____L(G4SG4)
GGGGSGGGG

SEQ ID NO: 6245 - RNA, 9 nt, Artificial Sequence
  derived and/or modified CDS sequence (artificial) from Artificial____L(AAY)
gcggccuac

SEQ ID NO: 6246 - RNA, 9 nt, Artificial Sequence
  derived and/or modified CDS sequence (artificial) from Artificial____L(AAY)
gccgcguau

SEQ ID NO: 6247 - RNA, 9 nt, Artificial Sequence
  derived and/or modified CDS sequence (artificial) from Artificial____L(AAY)
gccgccuac

SEQ ID NO: 6248 - RNA, 9 nt, Artificial Sequence
  derived and/or modified CDS sequence (artificial) from Artificial____L(AAY)
gccgcuuac

SEQ ID NO: 6249 - RNA, 9 nt, Artificial Sequence
  derived and/or modified CDS sequence (artificial) from Artificial____L(AAY)
gccgcauac

SEQ ID NO: 6250 - RNA, 9 nt, Artificial Sequence
  derived and/or modified CDS sequence (artificial) from Artificial____L(AAY)
gccgcuuau

SEQ ID NO: 6251 - RNA, 9 nt, Artificial Sequence
  derived and/or modified CDS sequence (artificial) from Artificial____L(AAY)
gccgccuau

SEQ ID NO: 6252 - RNA, 15 nt, Artificial Sequence
  derived and/or modified CDS sequence (artificial) from Artificial____L(G4S)
ggaggcggaggaucu

SEQ ID NO: 6253 - RNA, 15 nt, Artificial Sequence
  derived and/or modified CDS sequence (artificial) from Artificial____L(G4S)
ggcggagguggaagu

SEQ ID NO: 6254 - RNA, 15 nt, Artificial Sequence
  derived and/or modified CDS sequence (artificial) from Artificial____L(G4S)
ggcgggggcgggagc

SEQ ID NO: 6255 - RNA, 15 nt, Artificial Sequence
  derived and/or modified CDS sequence (artificial) from Artificial____L(G4S)
ggaggugguggaucc

SEQ ID NO: 6256 - RNA, 15 nt, Artificial Sequence
  derived and/or modified CDS sequence (artificial) from Artificial____L(G4S)
ggcggcggcggcucc

SEQ ID NO: 6257 - RNA, 15 nt, Artificial Sequence
  derived and/or modified CDS sequence (artificial) from Artificial____L(G4S)
ggcgggggagguagc

SEQ ID NO: 6258 - RNA, 15 nt, Artificial Sequence
  derived and/or modified CDS sequence (artificial) from Artificial____L(G4S)
ggcggcggcggcagc

SEQ ID NO: 6259 - RNA, 15 nt, Artificial Sequence
  derived and/or modified CDS sequence (artificial) from Artificial____L(G4S)
ggcgggggaggcagc

SEQ ID NO: 6260 - RNA, 15 nt, Artificial Sequence
  derived and/or modified CDS sequence (artificial) from Artificial____L(G4S)
ggcggggguggcagc

SEQ ID NO: 6261 - RNA, 15 nt, Artificial Sequence
  derived and/or modified CDS sequence (artificial) from Artificial____L(G4S)
ggggggggggggagu

SEQ ID NO: 6262 - RNA, 12 nt, Artificial Sequence
  derived and/or modified CDS sequence (artificial) from Artificial____L(PVTN)
ccggugacgaac

SEQ ID NO: 6263 - RNA, 12 nt, Artificial Sequence
  derived and/or modified CDS sequence (artificial) from Artificial____L(PVTN)
cccgugaccaac

SEQ ID NO: 6264 - RNA, 12 nt, Artificial Sequence
  derived and/or modified CDS sequence (artificial) from Artificial____L(PVTN)
cccgucaccaac

SEQ ID NO: 6265 - RNA, 12 nt, Artificial Sequence
  derived and/or modified CDS sequence (artificial) from Artificial____L(PVTN)
cccgucacuaau

SEQ ID NO: 6266 - RNA, 27 nt, Artificial Sequence
  derived and/or modified CDS sequence (artificial) from Artificial____L(G4SG4)
ggcgggggcgggagcggcgggggcggc

SEQ ID NO: 6267 - RNA, 27 nt, Artificial Sequence
  derived and/or modified CDS sequence (artificial) from Artificial____L(G4SG4)
ggcggcggcggcuccggcggcggcggc

SEQ ID NO: 6268 - RNA, 27 nt, Artificial Sequence
  derived and/or modified CDS sequence (artificial) from Artificial____L(G4SG4)
ggcgggggagguagcggcgggggaggc

SEQ ID NO: 6269 - RNA, 27 nt, Artificial Sequence
  derived and/or modified CDS sequence (artificial) from Artificial____L(G4SG4)
ggcggcggcggcagcggcggcggcggc

SEQ ID NO: 6270 - RNA, 27 nt, Artificial Sequence
  derived and/or modified CDS sequence (artificial) from Artificial____L(G4SG4)
ggcgggggaggcagcgggggaggcggg

SEQ ID NO: 6271 - RNA, 27 nt, Artificial Sequence
  derived and/or modified CDS sequence (artificial) from Artificial____L(G4SG4)
ggcggggguggcagcgggggcgguggg

SEQ ID NO: 6272 - protein, 15 aa, Artificial Sequence
  derived and/or modified protein sequence (wt) from Clostridium tetani__WP_023439719.1__P2
QYIKANSKFIGITEL

SEQ ID NO: 6273 - protein, 13 aa, Artificial Sequence
  derived and/or modified protein sequence (artificial) from Artificial____PADRE
AKFVAAWTLKAAA

SEQ ID NO: 6274 - protein, 226 aa, Artificial Sequence
  derived and/or modified protein sequence (wt) from Hepatitis B virus(Ag57)__AIJ50189.1__HBsAg
MENITSGFLGPLLVLQAGFFLLTRILTIPQSLDSWWTSLNFLGGSPVCLGQNSQSPTSNHSPTSCPPICPGYRWMCLRRFIIFLFILLLCLIFLLVLLDYQGMLPVCPLIPGSTTTNTGPCKTCTTPAQGNSMFPSCCCTKPTDGNCTCIPIPSSWAFAKYLWEWASVRFSWLSLLVPFVQWFVGLSPTVWLSAIWMMWYWGPSLYSIVSPFIPLLPIFFCLWVYI

SEQ ID NO: 6275 - RNA, 45 nt, Artificial Sequence
  derived and/or modified CDS sequence (wt) from Clostridium tetani__WP_023439719.1__P2
caguauauaaaagcaaauucuaaauuuauagguauaacugaacua

SEQ ID NO: 6276 - RNA, 39 nt, Artificial Sequence
  derived and/or modified CDS sequence (wt) from Artificial____PADRE
gccaaguuuguugcugccuggacacugaaggcagcagcc

SEQ ID NO: 6277 - RNA, 681 nt, Artificial Sequence
  derived and/or modified CDS sequence (wt) from Hepatitis B virus(Ag57)__AIJ50189.1__HBsAg
auggagaacaucacaucaggauuccuaggaccccugcucguguuacaggcgggguuuuucuuguugacaagaauccucacaauaccgcagagucuagacucgugguggacuucucucaauuuucuagggggaucacccgugugucuuggccaaaauucgcaguccccaaccuccaaucacucaccaaccuccuguccuccaauuuguccugguuaucgcuggaugugucugcggcguuuuaucauauuccucuucauccugcugcuaugccucaucuucuuauugguucuucuggauuaucaagguauguugcccguuuguccucuaauuccaggaucaacaacaaccaauacgggaccaugcaaaaccugcacgacuccugcucaaggcaacucuauguuucccucauguugcuguacaaaaccuacggauggaaauugcaccuguauucccaucccaucguccugggcuuucgcaaaauaccuaugggagugggccucaguccguuucucuuggcucaguuuacuagugccauuuguucagugguucguagggcuuucccccacuguuuggcuuucagcuauauggaugaugugguauugggggccaagucuguacagcaucgugagucccuuuauaccgcuguuaccaauuuucuuuugucucuggguauacauuuaa

SEQ ID NO: 6278 - RNA, 45 nt, Artificial Sequence
  derived and/or modified CDS sequence (opt1) from Clostridium tetani__WP_023439719.1__P2
caguacaucaaggccaacagcaaguucaucggcaucaccgagcug

SEQ ID NO: 6279 - RNA, 39 nt, Artificial Sequence
  derived and/or modified CDS sequence (opt1) from Artificial____PADRE
gccaaguucguggccgccuggacccugaaggcggccgcc

SEQ ID NO: 6280 - RNA, 681 nt, Artificial Sequence
  derived and/or modified CDS sequence (opt1) from Hepatitis B virus(Ag57)__AIJ50189.1__HBsAg
auggagaacaucaccagcggcuuccuggggccccuccuggugcugcaggccggcuucuuccuccugacccgcauccugaccaucccgcagucccucgacagcugguggaccucccugaacuuccucgggggcagccccgucugccuggggcagaacucccagagccccaccuccaaccacagccccaccuccugcccgcccaucugccccggcuaccgguggaugugccugcgccgguucaucaucuuccuguucauccuccugcugugccucaucuuccugcuggugcuccuggacuaccagggcaugcugcccgugugcccgcucauccccgggagcacgaccaccaacaccggccccugcaagacgugcaccacccccgcccaggggaacuccauguucccgagcugcugcugcaccaagcccacggacggcaacugcacgugcauccccauccccuccagcugggcguucgccaaguaccugugggagugggccuccguccgcuucagcuggcugucccuccuggugccguucgugcagugguucgucgggcugagccccaccguguggcucuccgccaucuggaugaugugguacuggggccccagccuguacagcaucgugucccccuucaucccgcugcuccccaucuucuucugccugugggucuacaucuga

SEQ ID NO: 6281 - RNA, 45 nt, Artificial Sequence; identical to SEQ ID NO: 6278
  derived and/or modified CDS sequence (opt1) from Clostridium tetani__WP_023439719.1__P2

SEQ ID NO: 6282 - RNA, 39 nt, Artificial Sequence
  derived and/or modified CDS sequence (opt1) from Artificial____PADRE
gccaaguucguggccgcguggacccugaaggccgccgcc

SEQ ID NO: 6283 - RNA, 678 nt, Artificial Sequence
  derived and/or modified CDS sequence (opt1) from Hepatitis B virus(Ag57)__AIJ50189.1__HBsAg
auggagaacaucaccagcggcuuccuggggccccuccuggugcugcaggccggcuucuuccuccugacccgcauccugaccaucccgcagucccucgacagcugguggaccucccugaacuuccucgggggcagccccgucugccuggggcagaacucccagagccccaccuccaaccacagccccaccuccugcccgcccaucugccccggcuaccgguggaugugccugcgccgguucaucaucuuccuguucauccuccugcugugccucaucuuccugcuggugcuccuggacuaccagggcaugcugcccgugugcccgcucauccccgggagcacgaccaccaacaccggccccugcaagacgugcaccacccccgcccaggggaacuccauguucccgagcugcugcugcaccaagcccacggacggcaacugcacgugcauccccauccccuccagcugggcguucgccaaguaccugugggagugggccuccguccgcuucagcuggcugucccuccuggugccguucgugcagugguucgucgggcugagccccaccguguggcucuccgccaucuggaugaugugguacuggggccccagccuguacagcaucgugucccccuucaucccgcugcuccccaucuucuucugccugugggucuacauc

SEQ ID NO: 6284 - RNA, 45 nt, Artificial Sequence
  derived and/or modified CDS sequence (opt2) from Clostridium tetani__WP_023439719.1__P2
caguacaucaaggccaacuccaaguucaucggcaucaccgagcuc

SEQ ID NO: 6285 - RNA, 39 nt, Artificial Sequence
  derived and/or modified CDS sequence (opt2) from Artificial____PADRE
gccaaguucgucgccgccuggacccucaaggccgccgcc

SEQ ID NO: 6286 - RNA, 678 nt, Artificial Sequence
  derived and/or modified CDS sequence (opt2) from Hepatitis B virus(Ag57)__AIJ50189.1__HBsAg
auggagaacaucaccuccggcuuccucggcccccuccucguccuccaggccggcuucuuccuccucacccgcauccucaccaucccccagucccucgacuccugguggaccucccucaacuuccucggcggcucccccgucugccucggccagaacucccagucccccaccuccaaccacucccccaccuccugcccccccaucugccccggcuaccgcuggaugugccuccgccgcuucaucaucuuccucuucauccuccuccucugccucaucuuccuccucguccuccucgacuaccagggcaugcuccccgucugcccccucauccccggcuccaccaccaccaacaccggccccugcaagaccugcaccacccccgcccagggcaacuccauguuccccuccugcugcugcaccaagcccaccgacggcaacugcaccugcauccccauccccuccuccugggccuucgccaaguaccucugggagugggccuccguccgcuucuccuggcucucccuccucguccccuucguccagugguucgucggccucucccccaccgucuggcucuccgccaucuggaugaugugguacuggggccccucccucuacuccaucgucucccccuucaucccccuccuccccaucuucuucugccucugggucuacauc

SEQ ID NO: 6287 - RNA, 45 nt, Artificial Sequence
  derived and/or modified CDS sequence (opt3) from Clostridium tetani__WP_023439719.1__P2
caguacaucaaggccaacagcaaauucauuggcauaaccgagcug

SEQ ID NO: 6288 - RNA, 39 nt, Artificial Sequence
  derived and/or modified CDS sequence (opt3) from Artificial____PADRE
gccaaguucguggcugcauggacccugaaagccgcggcu

SEQ ID NO: 6289 - RNA, 678 nt, Artificial Sequence
  derived and/or modified CDS sequence (opt3) from Hepatitis B virus(Ag57)__AIJ50189.1__HBsAg
auggagaacaucaccagcggcuuccuggggccccuccuugugcugcaggccggauuuuucuuguuaacaaggauucugacuauaccucaaucccuagacucuugguggacgucacucaauuuucuggguggcaguccagucugccuugggcagaacagccaguccccgaccucuaaucacucgcccacaucauguccuccaaucugccccggauacagauggaugugucugcggcgcuucauuaucuuuuuguucauucuccugcugugccucaucuuuuuacugguucuuuuggauuaucagggcaugcugccuguguguccacuaauacccgguagcacuaccacaaacaccgggccuugcaagacuuguacaaccccagcucaaggaaauaguauguucccguccugcuguugcacgaaacccacugacggcaacuguaccugcaucccuauuccaucuagcugggcauuugccaaguaccucugggaaugggcguccguacgauucucauggcugagucuucuggugcccuuuguccagugguucgugggcuugagcccuacaguuuggcucucugcuaucuggaugaugugguauugggggccaucccuguacucaauugugagccccuuuaucccguuacugccuauauucuucugccucugggucuauauu

SEQ ID NO: 6290 - RNA, 45 nt, Artificial Sequence; identical to SEQ ID NO: 6278
  derived and/or modified CDS sequence (opt4) from Clostridium tetani__WP_023439719.1__P2

SEQ ID NO: 6291 - RNA, 39 nt, Artificial Sequence
  derived and/or modified CDS sequence (opt4) from Artificial____PADRE
gccaaguucguggccgccuggacccugaaggccgccgcc

SEQ ID NO: 6292 - RNA, 678 nt, Artificial Sequence
  derived and/or modified CDS sequence (opt4) from Hepatitis B virus(Ag57)__AIJ50189.1__HBsAg
auggagaacaucaccagcggcuuccugggcccccugcuggugcugcaggccggcuucuuccugcugaccagaauccugaccaucccccagagccuggacagcugguggaccagccugaacuuccugggcggcagccccgugugccugggccagaacagccagagccccaccagcaaccacagccccaccagcugcccccccaucugccccggcuacagauggaugugccugagaagauucaucaucuuccuguucauccugcugcugugccugaucuuccugcuggugcugcuggacuaccagggcaugcugcccgugugcccccugauccccggcagcaccaccaccaacaccggccccugcaagaccugcaccacccccgcccagggcaacagcauguuccccagcugcugcugcaccaagcccaccgacggcaacugcaccugcauccccauccccagcagcugggccuucgccaaguaccugugggagugggccagcgugagauucagcuggcugagccugcuggugcccuucgugcagugguucgugggccugagccccaccguguggcugagcgccaucuggaugaugugguacuggggccccagccuguacagcaucgugagccccuucaucccccugcugcccaucuucuucugccuguggguguacauc

SEQ ID NO: 6293 - RNA, 45 nt, Artificial Sequence
  derived and/or modified CDS sequence (opt5) from Clostridium tetani__WP_023439719.1__P2
caguacaucaaggccaacagcaaauucauuggcaucaccgagcug

SEQ ID NO: 6294 - RNA, 39 nt, Artificial Sequence
  derived and/or modified CDS sequence (opt5) from Artificial____PADRE
gccaaguucguggcugccuggacccugaaagcggcugcc

SEQ ID NO: 6295 - RNA, 678 nt, Artificial Sequence
  derived and/or modified CDS sequence (opt5) from Hepatitis B virus(Ag57)__AIJ50189.1__HBsAg
auggagaacaucaccagcggcuuccuggggccccuccuggugcuucaggccggauuuuuccugcucacacggauucugacgaucccucaaucccuugacucuugguggaccagccugaauuuucucggcggguccccggucugccugggacagaacucucagagccccacauccaaucacucuccuaccagcugucccccuauuugccccggcuacagauggaugugucugcgcagauucaucauuuuucucuucauccugcuucugugccucaucuuucugcuuguucugcucgauuaucaggggaugcugccuguguguccgcugauucccggauccacaaccacaaacaccggcccuugcaagacguguaccacacccgcucaaggcaauagcauguucccuucuugcuguugcaccaaacccacagacgggaacuguaccugcaucccgauuccuuccagcugggccuuugcgaaguaccucugggaaugggcuucugugcgguucuccuggcugagccuucugguccccuuugugcagugguucguuggacucucuccuacgguguggcuguccgccaucuggaugaugugguauuggggccccagccuuuacuccauugucucucccuuuaucccucugcucccgauuuucuucugccuguggguguauauc

SEQ ID NO: 6296 - RNA, 45 nt, Artificial Sequence
  derived and/or modified CDS sequence (opt6) from Clostridium tetani__WP_023439719.1__P2
caauacauaaaagcaaacagcaaauucauaggaauaacagaacua

SEQ ID NO: 6297 - RNA, 39 nt, Artificial Sequence
  derived and/or modified CDS sequence (opt6) from Artificial____PADRE
gcaaaauuuguagcagcauggacauuaaaagcagcagca

SEQ ID NO: 6298 - RNA, 678 nt, Artificial Sequence
  derived and/or modified CDS sequence (opt6) from Hepatitis B virus(Ag57)__AIJ50189.1__HBsAg
auggaaaauauaacuucagguuuucuuggaccucuacuuguacuucaagcuggauuuuuccuucuaacucgaauuuuaacuauaccucaaucuuuagauucaugguggacuucucuuaacuuuuuagguggaucuccaguuugccuuggccaaaauucucaaucuccaacuucaaaucacucaccaacuucauguccaccuauauguccugguuaucguuggaugugucuuagacguuucauuauauuuuuauuuauauuauuauuaugucuuauauuuuuauuaguacuuuuagauuaucaaggaauguuaccuguaugcccacuuauaccaggaucuacaacuacaaauaccgguccauguaaaacuuguacuacuccugcacaaggaaauuccauguucccuucauguuguuguacaaaaccaacagacgguaauuguacauguauuccuauaccuucaucuugggcuuucgcuaaauauuuaugggaaugggcaucuguucguuucucuuggcuuucacuauuaguuccauuuguacaaugguuuguagguuuaucuccaacuguaugguuaucugcaauuuggaugaugugguauuggggaccuucauuauauucuauaguuucaccuuuuauuccauuauuaccuauauucuuuuguuuauggguauauaua

SEQ ID NO: 6299 - RNA, 45 nt, Artificial Sequence
  derived and/or modified CDS sequence (opt11) from Clostridium tetani__WP_023439719.1__P2
caauacaucaaagccaacuccaaauucaucggcaucaccgaacuc

SEQ ID NO: 6300 - RNA, 39 nt, Artificial Sequence
  derived and/or modified CDS sequence (opt11) from Artificial____PADRE
gcaaaauuuguggcagcauggacacugaaggcggcggcg

SEQ ID NO: 6301 - RNA, 678 nt, Artificial Sequence
  derived and/or modified CDS sequence (opt11) from Hepatitis B virus(Ag57)__AIJ50189.1__HBsAg
auggaaaacaucaccuccggcuuccucggcccccuccucguccuccaagccggcuucuuccuccucacccgaauccuaaccaucccccaaucccucgacuccugguggacaucccuuaacuuccucggcggcucccccgucugccuaggccaaaacucccaaucccccaccuccaaccacucccccaccuccugcccccccaucugccccggcuaccgcuggaugugccuacgccgcuucaucaucuuccucuucauccuccuccucugccucaucuuccuacucguccuccucgacuaccaaggcaugcuacccgucugcccccucauccccggcuccaccaccaccaacacaggccccugcaaaaccugcaccacccccgcacaaggcaacucaauguuccccuccugcugcugcaccaaacccacagacggcaacugcaccugcauccccauccccuccuccugggccuucgccaaauaccucugggaaugggccucuguccgauucuccuggcucucccuccuaguacccuucguccaaugguucgucggccucucccccaccgucuggcucuccgccaucuggaugaugugguacuggggccccucccucuacuccaucgucucccccuucaucccccuccuccccaucuucuucugccucugggucuacauc

SEQ ID NO: 6302 - protein, 46 aa, Artificial Sequence
  derived and/or modified protein sequence (wt) from Influenza A(H1N1/A/Netherlands/602/2009)__ACQ45338.1__TM domain HA
KLESTRIYQILAIYSTVASSLVLVVSLGAISFWMCSNGSLQCRICI

SEQ ID NO: 6303 - RNA, 138 nt, Artificial Sequence
  derived and/or modified CDS sequence (wt) from Influenza A(H1N1/A/Netherlands/602/2009)__ACQ45338.1__TM domain HA
aagcuggaaucaacaaggauuuaccagauuuuggcgaucuauucaacugucgccaguucauugguacugguagucucccugggggcaaucaguuucuggaugugcucuaaugggucucuacaguguagaauauguauu

SEQ ID NO: 6304 - RNA, 138 nt, Artificial Sequence
  derived and/or modified CDS sequence (opt1) from Influenza A(H1N1/A/Netherlands/602/2009)__ACQ45338.1__TM domain HA
aagcucgaguccacgcggaucuaccagauccuggcgaucuacagcaccgucgccagcucccuggugcucguggucagccugggggccaucuccuucuggaugugcagcaacggcucccugcagugccgcaucugcauc

SEQ ID NO: 6305 - RNA, 138 nt, Artificial Sequence
  derived and/or modified CDS sequence (opt1) from Influenza A(H1N1/A/Netherlands/602/2009)__ACQ45338.1__TM domain HA
aagcuggagagcacccgcaucuaccagauccucgccaucuacuccaccguggccagcucccugguccugguggugagccucggcgcgaucuccuucuggaugugcagcaacgggucccugcagugccggaucugcauc

SEQ ID NO: 6306 - RNA, 138 nt, Artificial Sequence
  derived and/or modified CDS sequence (opt2) from Influenza A(H1N1/A/Netherlands/602/2009)__ACQ45338.1__TM domain HA
aagcucgaguccacccgcaucuaccagauccucgccaucuacuccaccgucgccuccucccucguccucgucgucucccucggcgccaucuccuucuggaugugcuccaacggcucccuccagugccgcaucugcauc

SEQ ID NO: 6307 - RNA, 138 nt, Artificial Sequence
  derived and/or modified CDS sequence (opt3) from Influenza A(H1N1/A/Netherlands/602/2009)__ACQ45338.1__TM domain HA
aagcuggagagcaccagaaucuaccagauucucgccauauauuccacaguggcuucuucacuuguccugguugugaguuugggcgcaaucagcuucuggaugugcuccaacgggucuuuacaauguaggauuugcauc

SEQ ID NO: 6308 - RNA, 138 nt, Artificial Sequence
  derived and/or modified CDS sequence (opt4) from Influenza A(H1N1/A/Netherlands/602/2009)__ACQ45338.1__TM domain HA
aagcuggagagcaccagaaucuaccagauccuggccaucuacagcaccguggccagcagccuggugcugguggugagccugggcgccaucagcuucuggaugugcagcaacggcagccugcagugcagaaucugcauc

SEQ ID NO: 6309 - RNA, 138 nt, Artificial Sequence
  derived and/or modified CDS sequence (opt5) from Influenza A(H1N1/A/Netherlands/602/2009)__ACQ45338.1__TM domain HA
aagcuggagagcaccagaaucuaccagauucucgccaucuauuccacaguggcuucuagccugguccuuguugugucccugggcgccauuucuuucuggaugugcagcaacgggucccuccaaugucggaucugcauu

SEQ ID NO: 6310 - RNA, 138 nt, Artificial Sequence
  derived and/or modified CDS sequence (opt6) from Influenza A(H1N1/A/Netherlands/602/2009)__ACQ45338.1__TM domain HA
aaacuagaaucaacuagaauuuaccaaauacuugcaauuuacucuacaguugcaucuucacuuguacuuguaguuucacuuggagcuauaucuuucuggauguguucaaauggaucucuacaaugccguauauguaua

SEQ ID NO: 6311 - RNA, 138 nt, Artificial Sequence
  derived and/or modified CDS sequence (opt11) from Influenza A(H1N1/A/Netherlands/602/2009)__ACQ45338.1__TM domain HA
aaacucgaauccacccgcaucuaccaaauccucgccaucuacuccaccgucgccuccucacucguccucgucgucucccucggcgccaucuccuucuggaugugcuccaacggcucccuccaaugccgcaucugcauc

SEQ ID NO: 6312 - RNA, 1567 nt, Artificial Sequence
  mRNA Design a-3 (A64-N5-C30-hSL-N5) comprising derived and/or modified sequence from Pf(3D7)__XP_001351122.1__Pf-CSP (wt)
aggagagggcgcuuggcuugcaaggacccugagcugcggcauugaagcacacccaacccaacucgacugaagucagccucacugaaccggaucugagaaucuucucucucugggcuugccagggcucuccgaaccuagcuagcauccucuucaauuccaacuagaaagcuuaccaugaugagaaaauuagcuauuuuaucuguuucuuccuuuuuauuuguugaggccuuauuccaggaauaccagugcuauggaaguucgucaaacacaaggguucuaaaugaauuaaauuaugauaaugcaggcacuaauuuauauaaugaauuagaaaugaauuauuaugggaaacaggaaaauugguauagucuuaaaaaaaauaguagaucacuuggagaaaaugaugauggaaauaacgaagacaacgagaaauuaaggaaaccaaaacauaaaaaauuaaagcaaccagcggaugguaauccugauccaaaugcaaacccaaauguagaucccaaugccaacccaaauguagauccaaaugcaaacccaaauguagauccaaaugcaaacccaaaugcaaacccaaaugcaaacccaaaugcaaacccaaaugcaaacccaaaugcaaacccaaaugcaaacccaaaugcaaacccaaaugcaaacccaaaugcaaacccaaaugcaaacccaaaugcaaacccaaaugcaaacccaaaugcaaaccccaaugcaaauccuaaugcaaacccaaaugcaaacccaaacguagauccuaaugcaaauccaaaugcaaacccaaacgcaaaccccaaugcaaauccuaaugcaaaccccaaugcaaauccuaaugcaaauccuaaugccaauccaaaugcaaauccaaaugcaaacccaaacgcaaaccccaaugcaaauccuaaugccaauccaaaugcaaauccaaaugcaaacccaaaugcaaacccaaaugcaaaccccaaugcaaauccuaauaaaaacaaucaagguaauggacaaggucacaauaugccaaaugacccaaaccgaaauguagaugaaaaugcuaaugccaacagugcuguaaaaaauaauaauaacgaagaaccaagugauaagcacauaaaagaauauuuaaacaaaauacaaaauucucuuucaacugaaugguccccauguaguguaacuuguggaaaugguauucaaguuagaauaaagccuggcucugcuaauaaaccuaaagacgaauuagauuaugcaaaugauauugaaaaaaaaauuuguaaaauggaaaaauguuccaguguguuuaaugucguaaauaguucaauaggauuaauaaugguauuauccuucuuguuccuuaauuagggacuagucccuguucccagagcccacuuuuuuuucuuuuuuugaaauaaaauagccugucuuucagaucuaaaaaaaaaaaaaaaaaaaaaaaaaaaaaaaaaaaaaaaaaaaaaaaaaaaaaaaaaaaaaaaaugcaucccccccccccccccccccccccccccccccaaaggcucuuuucagagccaccagaauu

SEQ ID NO: 6313 - RNA, 1498 nt, Artificial Sequence
  mRNA Design a-3 (A64-N5-C30-hSL-N5) comprising derived and/or modified sequence from Pf(3D7)__XP_001351122.1__Pf-CSP(1-374) (wt)
aggagagggcgcuuggcuugcaaggacccugagcugcggcauugaagcacacccaacccaacucgacugaagucagccucacugaaccggaucugagaaucuucucucucugggcuugccagggcucuccgaaccuagcuagcauccucuucaauuccaacuagaaagcuuaccaugaugagaaaauuagcuauuuuaucuguuucuuccuuuuuauuuguugaggccuuauuccaggaauaccagugcuauggaaguucgucaaacacaaggguucuaaaugaauuaaauuaugauaaugcaggcacuaauuuauauaaugaauuagaaaugaauuauuaugggaaacaggaaaauugguauagucuuaaaaaaaauaguagaucacuuggagaaaaugaugauggaaauaacgaagacaacgagaaauuaaggaaaccaaaacauaaaaaauuaaagcaaccagcggaugguaauccugauccaaaugcaaacccaaauguagaucccaaugccaacccaaauguagauccaaaugcaaacccaaauguagauccaaaugcaaacccaaaugcaaacccaaaugcaaacccaaaugcaaacccaaaugcaaacccaaaugcaaacccaaaugcaaacccaaaugcaaacccaaaugcaaacccaaaugcaaacccaaaugcaaacccaaaugcaaacccaaaugcaaacccaaaugcaaaccccaaugcaaauccuaaugcaaacccaaaugcaaacccaaacguagauccuaaugcaaauccaaaugcaaacccaaacgcaaaccccaaugcaaauccuaaugcaaaccccaaugcaaauccuaaugcaaauccuaaugccaauccaaaugcaaauccaaaugcaaacccaaacgcaaaccccaaugcaaauccuaaugccaauccaaaugcaaauccaaaugcaaacccaaaugcaaacccaaaugcaaaccccaaugcaaauccuaauaaaaacaaucaagguaauggacaaggucacaauaugccaaaugacccaaaccgaaauguagaugaaaaugcuaaugccaacagugcuguaaaaaauaauaauaacgaagaaccaagugauaagcacauaaaagaauauuuaaacaaaauacaaaauucucuuucaacugaaugguccccauguaguguaacuuguggaaaugguauucaaguuagaauaaagccuggcucugcuaauaaaccuaaagacgaauuagauuaugcaaaugauauugaaaaaaaaauuuguaaaauggaaaaauguugaggacuagucccuguucccagagcccacuuuuuuuucuuuuuuugaaauaaaauagccugucuuucagaucuaaaaaaaaaaaaaaaaaaaaaaaaaaaaaaaaaaaaaaaaaaaaaaaaaaaaaaaaaaaaaaaaugcaucccccccccccccccccccccccccccccccaaaggcucuuuucagagccaccagaauu

SEQ ID NO: 6314 - RNA, 1351 nt, Artificial Sequence
  mRNA Design a-3 (A64-N5-C30-hSL-N5) comprising derived and/or modified sequence from Pf(3D7)__XP_001351122.1__Pf-CSP(1-325) (wt)
aggagagggcgcuuggcuugcaaggacccugagcugcggcauugaagcacacccaacccaacucgacugaagucagccucacugaaccggaucugagaaucuucucucucugggcuugccagggcucuccgaaccuagcuagcauccucuucaauuccaacuagaaagcuuaccaugaugagaaaauuagcuauuuuaucuguuucuuccuuuuuauuuguugaggccuuauuccaggaauaccagugcuauggaaguucgucaaacacaaggguucuaaaugaauuaaauuaugauaaugcaggcacuaauuuauauaaugaauuagaaaugaauuauuaugggaaacaggaaaauugguauagucuuaaaaaaaauaguagaucacuuggagaaaaugaugauggaaauaacgaagacaacgagaaauuaaggaaaccaaaacauaaaaaauuaaagcaaccagcggaugguaauccugauccaaaugcaaacccaaauguagaucccaaugccaacccaaauguagauccaaaugcaaacccaaauguagauccaaaugcaaacccaaaugcaaacccaaaugcaaacccaaaugcaaacccaaaugcaaacccaaaugcaaacccaaaugcaaacccaaaugcaaacccaaaugcaaacccaaaugcaaacccaaaugcaaacccaaaugcaaacccaaaugcaaacccaaaugcaaaccccaaugcaaauccuaaugcaaacccaaaugcaaacccaaacguagauccuaaugcaaauccaaaugcaaacccaaacgcaaaccccaaugcaaauccuaaugcaaaccccaaugcaaauccuaaugcaaauccuaaugccaauccaaaugcaaauccaaaugcaaacccaaacgcaaaccccaaugcaaauccuaaugccaauccaaaugcaaauccaaaugcaaacccaaaugcaaacccaaaugcaaaccccaaugcaaauccuaauaaaaacaaucaagguaauggacaaggucacaauaugccaaaugacccaaaccgaaauguagaugaaaaugcuaaugccaacagugcuguaaaaaauaauaauaacgaagaaccaagugauaagcacauaaaagaauauuuaaacaaaauacaaaauugaggacuagucccuguucccagagcccacuuuuuuuucuuuuuuugaaauaaaauagccugucuuucagaucuaaaaaaaaaaaaaaaaaaaaaaaaaaaaaaaaaaaaaaaaaaaaaaaaaaaaaaaaaaaaaaaaugcaucccccccccccccccccccccccccccccccaaaggcucuuuucagagccaccagaauu

SEQ ID NO: 6315 - RNA, 1567 nt, Artificial Sequence
  mRNA Design a-3 (A64-N5-C30-hSL-N5) comprising derived and/or modified sequence from Pf(3D7)__XP_001351122.1__Pf-CSP (opt1)
aggagagggcgcuuggcuugcaaggacccugagcugcggcauugaagcacacccaacccaacucgacugaagucagccucacugaaccggaucugagaaucuucucucucugggcuugccagggcucuccgaaccuagcuagcauccucuucaauuccaacuagaaagcuuaccaugaugcgcaagcuggccauccucagcguguccagcuuccuguucgucgaggcccuguuccaggaguaccagugcuacggcuccagcuccaacacccgggugcucaacgagcugaacuacgacaacgcggggaccaaccuguacaacgagcucgagaugaacuacuacggcaagcaggagaacugguacagccugaagaagaacucccgcagccugggggagaacgacgacggcaacaacgaggacaacgagaagcuccggaagcccaagcacaagaagcugaagcagccggccgacgggaaccccgaccccaacgccaaccccaacguggacccgaacgccaaccccaacgucgaccccaacgccaaccccaacguggacccgaacgcgaaccccaacgccaaccccaacgccaaccccaacgccaacccgaacgcgaaccccaacgccaaccccaacgccaaccccaacgccaacccgaacgccaaccccaacgcgaaccccaacgccaaccccaacgccaacccgaacgccaaccccaacgccaaccccaacgcgaaccccaacgccaacccgaacgccaaccccaacguggaccccaacgccaaccccaacgccaacccgaacgcgaaccccaacgccaaccccaacgccaacccgaacgccaaccccaacgccaaccccaacgcgaaccccaacgccaacccgaacgccaaccccaacgccaaccccaacgcgaaccccaacgccaacccgaacgccaaccccaacgccaaccccaacgccaaccccaacgcgaacccgaacgccaaccccaacaagaacaaccagggcaacggccaggggcacaacaugcccaacgaccccaaccgcaacgucgacgagaacgccaacgccaacuccgccgugaagaacaacaacaacgaggagccgagcgacaagcacaucaaggaguaccugaacaagauccagaacucccucagcacggaguggucccccugcagcgugaccugcggcaacgggauccagguccggaucaagcccggcuccgcgaacaagcccaaggacgagcuggacuacgccaacgacaucgagaagaagaucugcaagauggagaagugcagcuccguguucaacguggucaacagcuccaucgggcugaucauggugcucagcuuccuguuccugaacugaggacuagucccuguucccagagcccacuuuuuuuucuuuuuuugaaauaaaauagccugucuuucagaucuaaaaaaaaaaaaaaaaaaaaaaaaaaaaaaaaaaaaaaaaaaaaaaaaaaaaaaaaaaaaaaaaugcaucccccccccccccccccccccccccccccccaaaggcucuuuucagagccaccagaauu

SEQ ID NO: 6316 - RNA, 1498 nt, Artificial Sequence
  mRNA Design a-3 (A64-N5-C30-hSL-N5) comprising derived and/or modified sequence from Pf(3D7)__XP_001351122.1__Pf-CSP(1-374) (opt1)
aggagagggcgcuuggcuugcaaggacccugagcugcggcauugaagcacacccaacccaacucgacugaagucagccucacugaaccggaucugagaaucuucucucucugggcuugccagggcucuccgaaccuagcuagcauccucuucaauuccaacuagaaagcuuaccaugaugcgcaagcuggccauccucagcguguccagcuuccuguucgucgaggcccuguuccaggaguaccagugcuacggcuccagcuccaacacccgggugcucaacgagcugaacuacgacaacgcggggaccaaccuguacaacgagcucgagaugaacuacuacggcaagcaggagaacugguacagccugaagaagaacucccgcagccugggggagaacgacgacggcaacaacgaggacaacgagaagcuccggaagcccaagcacaagaagcugaagcagccggccgacgggaaccccgaccccaacgccaaccccaacguggacccgaacgccaaccccaacgucgaccccaacgccaaccccaacguggacccgaacgcgaaccccaacgccaaccccaacgccaaccccaacgccaacccgaacgcgaaccccaacgccaaccccaacgccaaccccaacgccaacccgaacgccaaccccaacgcgaaccccaacgccaaccccaacgccaacccgaacgccaaccccaacgccaaccccaacgcgaaccccaacgccaacccgaacgccaaccccaacguggaccccaacgccaaccccaacgccaacccgaacgcgaaccccaacgccaaccccaacgccaacccgaacgccaaccccaacgccaaccccaacgcgaaccccaacgccaacccgaacgccaaccccaacgccaaccccaacgcgaaccccaacgccaacccgaacgccaaccccaacgccaaccccaacgccaaccccaacgcgaacccgaacgccaaccccaacaagaacaaccagggcaacggccaggggcacaacaugcccaacgaccccaaccgcaacgucgacgagaacgccaacgccaacuccgccgugaagaacaacaacaacgaggagccgagcgacaagcacaucaaggaguaccugaacaagauccagaacucccucagcacggaguggucccccugcagcgugaccugcggcaacgggauccagguccggaucaagcccggcuccgcgaacaagcccaaggacgagcuggacuacgccaacgacaucgagaagaagaucugcaagauggagaagugcugaggacuagucccuguucccagagcccacuuuuuuuucuuuuuuugaaauaaaauagccugucuuucagaucuaaaaaaaaaaaaaaaaaaaaaaaaaaaaaaaaaaaaaaaaaaaaaaaaaaaaaaaaaaaaaaaaugcaucccccccccccccccccccccccccccccccaaaggcucuuuucagagccaccagaauu

SEQ ID NO: 6317 - RNA, 1351 nt, Artificial Sequence
  mRNA Design a-3 (A64-N5-C30-hSL-N5) comprising derived and/or modified sequence from Pf(3D7)__XP_001351122.1__Pf-CSP(1-325) (opt1)
aggagagggcgcuuggcuugcaaggacccugagcugcggcauugaagcacacccaacccaacucgacugaagucagccucacugaaccggaucugagaaucuucucucucugggcuugccagggcucuccgaaccuagcuagcauccucuucaauuccaacuagaaagcuuaccaugaugcgcaagcuggccauccucagcguguccagcuuccuguucgucgaggcccuguuccaggaguaccagugcuacggcuccagcuccaacacccgggugcucaacgagcugaacuacgacaacgcggggaccaaccuguacaacgagcucgagaugaacuacuacggcaagcaggagaacugguacagccugaagaagaacucccgcagccugggggagaacgacgacggcaacaacgaggacaacgagaagcuccggaagcccaagcacaagaagcugaagcagccggccgacgggaaccccgaccccaacgccaaccccaacguggacccgaacgccaaccccaacgucgaccccaacgccaaccccaacguggacccgaacgcgaaccccaacgccaaccccaacgccaaccccaacgccaacccgaacgcgaaccccaacgccaaccccaacgccaaccccaacgccaacccgaacgccaaccccaacgcgaaccccaacgccaaccccaacgccaacccgaacgccaaccccaacgccaaccccaacgcgaaccccaacgccaacccgaacgccaaccccaacguggaccccaacgccaaccccaacgccaacccgaacgcgaaccccaacgccaaccccaacgccaacccgaacgccaaccccaacgccaaccccaacgcgaaccccaacgccaacccgaacgccaaccccaacgccaaccccaacgcgaaccccaacgccaacccgaacgccaaccccaacgccaaccccaacgccaaccccaacgcgaacccgaacgccaaccccaacaagaacaaccagggcaacggccaggggcacaacaugcccaacgaccccaaccgcaacgucgacgagaacgccaacgccaacuccgccgugaagaacaacaacaacgaggagccgagcgacaagcacaucaaggaguaccugaacaagauccagaacugaggacuagucccuguucccagagcccacuuuuuuuucuuuuuuugaaauaaaauagccugucuuucagaucuaaaaaaaaaaaaaaaaaaaaaaaaaaaaaaaaaaaaaaaaaaaaaaaaaaaaaaaaaaaaaaaaugcaucccccccccccccccccccccccccccccccaaaggcucuuuucagagccaccagaauu

SEQ ID NO: 6318 - RNA, 1567 nt, Artificial Sequence
  mRNA Design a-3 (A64-N5-C30-hSL-N5) comprising derived and/or modified sequence from Pf(3D7)__XP_001351122.1__HsALB_Pf-CSP(19-397) (opt1)
aggagagggcgcuuggcuugcaaggacccugagcugcggcauugaagcacacccaacccaacucgacugaagucagccucacugaaccggaucugagaaucuucucucucugggcuugccagggcucuccgaaccuagcuagcauccucuucaauuccaacuagaaagcuuaccaugaagugggugaccuucaucagccugcucuuccuguucuccagcgccuacucccuguuccaggaguaccagugcuacggcuccagcuccaacacccgggugcucaacgagcugaacuacgacaacgcggggaccaaccuguacaacgagcucgagaugaacuacuacggcaagcaggagaacugguacagccugaagaagaacucccgcagccugggggagaacgacgacggcaacaacgaggacaacgagaagcuccggaagcccaagcacaagaagcugaagcagccggccgacgggaaccccgaccccaacgccaaccccaacguggacccgaacgccaaccccaacgucgaccccaacgccaaccccaacguggacccgaacgcgaaccccaacgccaaccccaacgccaaccccaacgccaacccgaacgcgaaccccaacgccaaccccaacgccaaccccaacgccaacccgaacgccaaccccaacgcgaaccccaacgccaaccccaacgccaacccgaacgccaaccccaacgccaaccccaacgcgaaccccaacgccaacccgaacgccaaccccaacguggaccccaacgccaaccccaacgccaacccgaacgcgaaccccaacgccaaccccaacgccaacccgaacgccaaccccaacgccaaccccaacgcgaaccccaacgccaacccgaacgccaaccccaacgccaaccccaacgcgaaccccaacgccaacccgaacgccaaccccaacgccaaccccaacgccaaccccaacgcgaacccgaacgccaaccccaacaagaacaaccagggcaacggccaggggcacaacaugcccaacgaccccaaccgcaacgucgacgagaacgccaacgccaacuccgccgugaagaacaacaacaacgaggagccgagcgacaagcacaucaaggaguaccugaacaagauccagaacucccucagcacggaguggucccccugcagcgugaccugcggcaacgggauccagguccggaucaagcccggcuccgcgaacaagcccaaggacgagcuggacuacgccaacgacaucgagaagaagaucugcaagauggagaagugcagcuccguguucaacguggucaacagcuccaucgggcugaucauggugcucagcuuccuguuccugaacugaggacuagucccuguucccagagcccacuuuuuuuucuuuuuuugaaauaaaauagccugucuuucagaucuaaaaaaaaaaaaaaaaaaaaaaaaaaaaaaaaaaaaaaaaaaaaaaaaaaaaaaaaaaaaaaaaugcaucccccccccccccccccccccccccccccccaaaggcucuuuucagagccaccagaauu

SEQ ID NO: 6319 - RNA, 1585 nt, Artificial Sequence
  mRNA Design a-3 (A64-N5-C30-hSL-N5) comprising derived and/or modified sequence from Pf(3D7)__XP_001351122.1__HsIns-iso1_Pf-CSP(19-397) (opt1)
aggagagggcgcuuggcuugcaaggacccugagcugcggcauugaagcacacccaacccaacucgacugaagucagccucacugaaccggaucugagaaucuucucucucugggcuugccagggcucuccgaaccuagcuagcauccucuucaauuccaacuagaaagcuuaccauggcccuguggaugcgccuccugccccugcucgcccugcuggcgcucuggggcccggaccccgccgccgcccuguuccaggaguaccagugcuacggcuccagcuccaacacccgggugcucaacgagcugaacuacgacaacgcggggaccaaccuguacaacgagcucgagaugaacuacuacggcaagcaggagaacugguacagccugaagaagaacucccgcagccugggggagaacgacgacggcaacaacgaggacaacgagaagcuccggaagcccaagcacaagaagcugaagcagccggccgacgggaaccccgaccccaacgccaaccccaacguggacccgaacgccaaccccaacgucgaccccaacgccaaccccaacguggacccgaacgcgaaccccaacgccaaccccaacgccaaccccaacgccaacccgaacgcgaaccccaacgccaaccccaacgccaaccccaacgccaacccgaacgccaaccccaacgcgaaccccaacgccaaccccaacgccaacccgaacgccaaccccaacgccaaccccaacgcgaaccccaacgccaacccgaacgccaaccccaacguggaccccaacgccaaccccaacgccaacccgaacgcgaaccccaacgccaaccccaacgccaacccgaacgccaaccccaacgccaaccccaacgcgaaccccaacgccaacccgaacgccaaccccaacgccaaccccaacgcgaaccccaacgccaacccgaacgccaaccccaacgccaaccccaacgccaaccccaacgcgaacccgaacgccaaccccaacaagaacaaccagggcaacggccaggggcacaacaugcccaacgaccccaaccgcaacgucgacgagaacgccaacgccaacuccgccgugaagaacaacaacaacgaggagccgagcgacaagcacaucaaggaguaccugaacaagauccagaacucccucagcacggaguggucccccugcagcgugaccugcggcaacgggauccagguccggaucaagcccggcuccgcgaacaagcccaaggacgagcuggacuacgccaacgacaucgagaagaagaucugcaagauggagaagugcagcuccguguucaacguggucaacagcuccaucgggcugaucauggugcucagcuuccuguuccugaacugaggacuagucccuguucccagagcccacuuuuuuuucuuuuuuugaaauaaaauagccugucuuucagaucuaaaaaaaaaaaaaaaaaaaaaaaaaaaaaaaaaaaaaaaaaaaaaaaaaaaaaaaaaaaaaaaaugcaucccccccccccccccccccccccccccccccaaaggcucuuuucagagccaccagaauu

SEQ ID NO: 6320 - RNA, 1564 nt, Artificial Sequence
  mRNA Design a-3 (A64-N5-C30-hSL-N5) comprising derived and/or modified sequence from Pf(3D7)__XP_001351122.1__HsSPARC_Pf-CSP(19-397) (opt1)
aggagagggcgcuuggcuugcaaggacccugagcugcggcauugaagcacacccaacccaacucgacugaagucagccucacugaaccggaucugagaaucuucucucucugggcuugccagggcucuccgaaccuagcuagcauccucuucaauuccaacuagaaagcuuaccaugcgcgccuggaucuucuuccugcucugccuggccggccgggcccuggcccuguuccaggaguaccagugcuacggcuccagcuccaacacccgggugcucaacgagcugaacuacgacaacgcggggaccaaccuguacaacgagcucgagaugaacuacuacggcaagcaggagaacugguacagccugaagaagaacucccgcagccugggggagaacgacgacggcaacaacgaggacaacgagaagcuccggaagcccaagcacaagaagcugaagcagccggccgacgggaaccccgaccccaacgccaaccccaacguggacccgaacgccaaccccaacgucgaccccaacgccaaccccaacguggacccgaacgcgaaccccaacgccaaccccaacgccaaccccaacgccaacccgaacgcgaaccccaacgccaaccccaacgccaaccccaacgccaacccgaacgccaaccccaacgcgaaccccaacgccaaccccaacgccaacccgaacgccaaccccaacgccaaccccaacgcgaaccccaacgccaacccgaacgccaaccccaacguggaccccaacgccaaccccaacgccaacccgaacgcgaaccccaacgccaaccccaacgccaacccgaacgccaaccccaacgccaaccccaacgcgaaccccaacgccaacccgaacgccaaccccaacgccaaccccaacgcgaaccccaacgccaacccgaacgccaaccccaacgccaaccccaacgccaaccccaacgcgaacccgaacgccaaccccaacaagaacaaccagggcaacggccaggggcacaacaugcccaacgaccccaaccgcaacgucgacgagaacgccaacgccaacuccgccgugaagaacaacaacaacgaggagccgagcgacaagcacaucaaggaguaccugaacaagauccagaacucccucagcacggaguggucccccugcagcgugaccugcggcaacgggauccagguccggaucaagcccggcuccgcgaacaagcccaaggacgagcuggacuacgccaacgacaucgagaagaagaucugcaagauggagaagugcagcuccguguucaacguggucaacagcuccaucgggcugaucauggugcucagcuuccuguuccugaacugaggacuagucccuguucccagagcccacuuuuuuuucuuuuuuugaaauaaaauagccugucuuucagaucuaaaaaaaaaaaaaaaaaaaaaaaaaaaaaaaaaaaaaaaaaaaaaaaaaaaaaaaaaaaaaaaaugcaucccccccccccccccccccccccccccccccaaaggcucuuuucagagccaccagaauu

SEQ ID NO: 6321 - RNA, 1567 nt, Artificial Sequence
  mRNA Design a-3 (A64-N5-C30-hSL-N5) comprising derived and/or modified sequence from Pf(3D7)__XP_001351122.1__IgE_Pf-CSP(19-397) (opt1)
aggagagggcgcuuggcuugcaaggacccugagcugcggcauugaagcacacccaacccaacucgacugaagucagccucacugaaccggaucugagaaucuucucucucugggcuugccagggcucuccgaaccuagcuagcauccucuucaauuccaacuagaaagcuuaccauggacuggaccuggauccuguuccucguggccgccgcgacccgcguccacagccuguuccaggaguaccagugcuacggcuccagcuccaacacccgggugcucaacgagcugaacuacgacaacgcggggaccaaccuguacaacgagcucgagaugaacuacuacggcaagcaggagaacugguacagccugaagaagaacucccgcagccugggggagaacgacgacggcaacaacgaggacaacgagaagcuccggaagcccaagcacaagaagcugaagcagccggccgacgggaaccccgaccccaacgccaaccccaacguggacccgaacgccaaccccaacgucgaccccaacgccaaccccaacguggacccgaacgcgaaccccaacgccaaccccaacgccaaccccaacgccaacccgaacgcgaaccccaacgccaaccccaacgccaaccccaacgccaacccgaacgccaaccccaacgcgaaccccaacgccaaccccaacgccaacccgaacgccaaccccaacgccaaccccaacgcgaaccccaacgccaacccgaacgccaaccccaacguggaccccaacgccaaccccaacgccaacccgaacgcgaaccccaacgccaaccccaacgccaacccgaacgccaaccccaacgccaaccccaacgcgaaccccaacgccaacccgaacgccaaccccaacgccaaccccaacgcgaaccccaacgccaacccgaacgccaaccccaacgccaaccccaacgccaaccccaacgcgaacccgaacgccaaccccaacaagaacaaccagggcaacggccaggggcacaacaugcccaacgaccccaaccgcaacgucgacgagaacgccaacgccaacuccgccgugaagaacaacaacaacgaggagccgagcgacaagcacaucaaggaguaccugaacaagauccagaacucccucagcacggaguggucccccugcagcgugaccugcggcaacgggauccagguccggaucaagcccggcuccgcgaacaagcccaaggacgagcuggacuacgccaacgacaucgagaagaagaucugcaagauggagaagugcagcuccguguucaacguggucaacagcuccaucgggcugaucauggugcucagcuuccuguuccugaacugaggacuagucccuguucccagagcccacuuuuuuuucuuuuuuugaaauaaaauagccugucuuucagaucuaaaaaaaaaaaaaaaaaaaaaaaaaaaaaaaaaaaaaaaaaaaaaaaaaaaaaaaaaaaaaaaaugcaucccccccccccccccccccccccccccccccaaaggcucuuuucagagccaccagaauu

SEQ ID NO: 6322 - RNA, 1732 nt, Artificial Sequence
  mRNA Design a-3 (A64-N5-C30-hSL-N5) comprising derived and/or modified sequence from Pf(3D7)__XP_001351122.1__Pf-CSP_L(G4SG4)_TM domain HA (opt1)
aggagagggcgcuuggcuugcaaggacccugagcugcggcauugaagcacacccaacccaacucgacugaagucagccucacugaaccggaucugagaaucuucucucucugggcuugccagggcucuccgaaccuagcuagcauccucuucaauuccaacuagaaagcuuaccaugaugcgcaagcuggccauccucagcguguccagcuuccuguucgucgaggcccuguuccaggaguaccagugcuacggcuccagcuccaacacccgggugcucaacgagcugaacuacgacaacgcggggaccaaccuguacaacgagcucgagaugaacuacuacggcaagcaggagaacugguacagccugaagaagaacucccgcagccugggggagaacgacgacggcaacaacgaggacaacgagaagcuccggaagcccaagcacaagaagcugaagcagccggccgacgggaaccccgaccccaacgccaaccccaacguggacccgaacgccaaccccaacgucgaccccaacgccaaccccaacguggacccgaacgcgaaccccaacgccaaccccaacgccaaccccaacgccaacccgaacgcgaaccccaacgccaaccccaacgccaaccccaacgccaacccgaacgccaaccccaacgcgaaccccaacgccaaccccaacgccaacccgaacgccaaccccaacgccaaccccaacgcgaaccccaacgccaacccgaacgccaaccccaacguggaccccaacgccaaccccaacgccaacccgaacgcgaaccccaacgccaaccccaacgccaacccgaacgccaaccccaacgccaaccccaacgcgaaccccaacgccaacccgaacgccaaccccaacgccaaccccaacgcgaaccccaacgccaacccgaacgccaaccccaacgccaaccccaacgccaaccccaacgcgaacccgaacgccaaccccaacaagaacaaccagggcaacggccaggggcacaacaugcccaacgaccccaaccgcaacgucgacgagaacgccaacgccaacuccgccgugaagaacaacaacaacgaggagccgagcgacaagcacaucaaggaguaccugaacaagauccagaacucccucagcacggaguggucccccugcagcgugaccugcggcaacgggauccagguccggaucaagcccggcuccgcgaacaagcccaaggacgagcuggacuacgccaacgacaucgagaagaagaucugcaagauggagaagugcagcuccguguucaacguggucaacagcuccaucgggcugaucauggugcucagcuuccuguuccugaacggcgggggcgggagcggcgggggcggcaagcucgaguccacgcggaucuaccagauccuggcgaucuacagcaccgucgccagcucccuggugcucguggucagccugggggccaucuccuucuggaugugcagcaacggcucccugcagugccgcaucugcaucugaggacuagucccuguucccagagcccacuuuuuuuucuuuuuuugaaauaaaauagccugucuuucagaucuaaaaaaaaaaaaaaaaaaaaaaaaaaaaaaaaaaaaaaaaaaaaaaaaaaaaaaaaaaaaaaaaugcaucccccccccccccccccccccccccccccccaaaggcucuuuucagagccaccagaauu

SEQ ID NO: 6323 - RNA, 1606 nt, Artificial Sequence
  mRNA Design a-3 (A64-N5-C30-hSL-N5) comprising derived and/or modified sequence from Pf(3D7)__XP_001351122.1__Pf-CSP(199-377)_L(PVTN)_HBsAg (opt1)
aggagagggcgcuuggcuugcaaggacccugagcugcggcauugaagcacacccaacccaacucgacugaagucagccucacugaaccggaucugagaaucuucucucucugggcuugccagggcucuccgaaccuagcuagcauccucuucaauuccaacuagaaagcuuaccauggaccccaacgccaaccccaacgccaacccgaacgcgaaccccaacgccaaccccaacgccaacccgaacgccaaccccaacgccaaccccaacgcgaaccccaacgccaacccgaacgccaaccccaacgccaaccccaacgcgaaccccaacgccaacccgaacgccaaccccaacgccaaccccaacgccaaccccaacgcgaacccgaacgccaaccccaacaagaacaaccagggcaacggccaggggcacaacaugcccaacgaccccaaccgcaacgucgacgagaacgccaacgccaacuccgccgugaagaacaacaacaacgaggagccgagcgacaagcacaucaaggaguaccugaacaagauccagaacucccucagcacggaguggucccccugcagcgugaccugcggcaacgggauccagguccggaucaagcccggcuccgcgaacaagcccaaggacgagcuggacuacgccaacgacaucgagaagaagaucugcaagauggagaagugcagcuccgugccggugacgaacauggagaacaucaccagcggcuuccuggggccccuccuggugcugcaggccggcuucuuccuccugacccgcauccugaccaucccgcagucccucgacagcugguggaccucccugaacuuccucgggggcagccccgucugccuggggcagaacucccagagccccaccuccaaccacagccccaccuccugcccgcccaucugccccggcuaccgguggaugugccugcgccgguucaucaucuuccuguucauccuccugcugugccucaucuuccugcuggugcuccuggacuaccagggcaugcugcccgugugcccgcucauccccgggagcacgaccaccaacaccggccccugcaagacgugcaccacccccgcccaggggaacuccauguucccgagcugcugcugcaccaagcccacggacggcaacugcacgugcauccccauccccuccagcugggcguucgccaaguaccugugggagugggccuccguccgcuucagcuggcugucccuccuggugccguucgugcagugguucgucgggcugagccccaccguguggcucuccgccaucuggaugaugugguacuggggccccagccuguacagcaucgugucccccuucaucccgcugcuccccaucuucuucugccugugggucuacaucugaggacuagucccuguucccagagcccacuuuuuuuucuuuuuuugaaauaaaauagccugucuuucagaucuaaaaaaaaaaaaaaaaaaaaaaaaaaaaaaaaaaaaaaaaaaaaaaaaaaaaaaaaaaaaaaaaugcaucccccccccccccccccccccccccccccccaaaggcucuuuucagagccaccagaauu

SEQ ID NO: 6324 - RNA, 1648 nt, Artificial Sequence
  mRNA Design a-3 (A64-N5-C30-hSL-N5) comprising derived and/or modified sequence from Pf(3D7)__XP_001351122.1__Pf-CSP(199-387)_L(PVTN)_HBsAg (opt1)
aggagagggcgcuuggcuugcaaggacccugagcugcggcauugaagcacacccaacccaacucgacugaagucagccucacugaaccggaucugagaaucuucucucucugggcuugccagggcucuccgaaccuagcuagcauccucuucaauuccaacuagaaagcuuaccaugauggccccggaccccaacgccaaccccaacgccaacccgaacgcgaaccccaacgccaaccccaacgccaacccgaacgccaaccccaacgccaaccccaacgcgaaccccaacgccaacccgaacgccaaccccaacgccaaccccaacgcgaaccccaacgccaacccgaacgccaaccccaacgccaaccccaacgccaaccccaacgcgaacccgaacgccaaccccaacaagaacaaccagggcaacggccaggggcacaacaugcccaacgaccccaaccgcaacgucgacgagaacgccaacgccaacuccgccgugaagaacaacaacaacgaggagccgagcgacaagcacaucaaggaguaccugaacaagauccagaacucccucagcacggaguggucccccugcagcgugaccugcggcaacgggauccagguccggaucaagcccggcuccgcgaacaagcccaaggacgagcuggacuacgccaacgacaucgagaagaagaucugcaagauggagaagugcagcuccguguucaacguggucaacagcuccaucgggcuggggccggugacgaacauggagaacaucaccagcggcuuccuggggccccuccuggugcugcaggccggcuucuuccuccugacccgcauccugaccaucccgcagucccucgacagcugguggaccucccugaacuuccucgggggcagccccgucugccuggggcagaacucccagagccccaccuccaaccacagccccaccuccugcccgcccaucugccccggcuaccgguggaugugccugcgccgguucaucaucuuccuguucauccuccugcugugccucaucuuccugcuggugcuccuggacuaccagggcaugcugcccgugugcccgcucauccccgggagcacgaccaccaacaccggccccugcaagacgugcaccacccccgcccaggggaacuccauguucccgagcugcugcugcaccaagcccacggacggcaacugcacgugcauccccauccccuccagcugggcguucgccaaguaccugugggagugggccuccguccgcuucagcuggcugucccuccuggugccguucgugcagugguucgucgggcugagccccaccguguggcucuccgccaucuggaugaugugguacuggggccccagccuguacagcaucgugucccccuucaucccgcugcuccccaucuucuucugccugugggucuacaucugaggacuagucccuguucccagagcccacuuuuuuuucuuuuuuugaaauaaaauagccugucuuucagaucuaaaaaaaaaaaaaaaaaaaaaaaaaaaaaaaaaaaaaaaaaaaaaaaaaaaaaaaaaaaaaaaaugcaucccccccccccccccccccccccccccccccaaaggcucuuuucagagccaccagaauu

SEQ ID NO: 6325 - RNA, 832 nt, Artificial Sequence
  mRNA Design a-3 (A64-N5-C30-hSL-N5) comprising derived and/or modified sequence from Pf(3D7)__XP_001351122.1__HsALB_Pf-CSP(19-152) (opt1)
aggagagggcgcuuggcuugcaaggacccugagcugcggcauugaagcacacccaacccaacucgacugaagucagccucacugaaccggaucugagaaucuucucucucugggcuugccagggcucuccgaaccuagcuagcauccucuucaauuccaacuagaaagcuuaccaugaagugggugaccuucaucagccugcucuuccuguucuccagcgccuacucccuguuccaggaguaccagugcuacggcuccagcuccaacacccgggugcucaacgagcugaacuacgacaacgcggggaccaaccuguacaacgagcucgagaugaacuacuacggcaagcaggagaacugguacagccugaagaagaacucccgcagccugggggagaacgacgacggcaacaacgaggacaacgagaagcuccggaagcccaagcacaagaagcugaagcagccggccgacgggaaccccgaccccaacgccaaccccaacguggacccgaacgccaaccccaacgucgaccccaacgccaaccccaacguggacccgaacgcgaaccccaacgccaaccccaacgccaaccccaacgccaacccgaacgcgaaccccaacgccaaccccugaggacuagucccuguucccagagcccacuuuuuuuucuuuuuuugaaauaaaauagccugucuuucagaucuaaaaaaaaaaaaaaaaaaaaaaaaaaaaaaaaaaaaaaaaaaaaaaaaaaaaaaaaaaaaaaaaugcaucccccccccccccccccccccccccccccccaaaggcucuuuucagagccaccagaauu

SEQ ID NO: 6326 - RNA, 952 nt, Artificial Sequence
  mRNA Design a-3 (A64-N5-C30-hSL-N5) comprising derived and/or modified sequence from Pf(3D7)__XP_001351122.1__HsALB_Pf-CSP(19-192) (opt1)
aggagagggcgcuuggcuugcaaggacccugagcugcggcauugaagcacacccaacccaacucgacugaagucagccucacugaaccggaucugagaaucuucucucucugggcuugccagggcucuccgaaccuagcuagcauccucuucaauuccaacuagaaagcuuaccaugaagugggugaccuucaucagccugcucuuccuguucuccagcgccuacucccuguuccaggaguaccagugcuacggcuccagcuccaacacccgggugcucaacgagcugaacuacgacaacgcggggaccaaccuguacaacgagcucgagaugaacuacuacggcaagcaggagaacugguacagccugaagaagaacucccgcagccugggggagaacgacgacggcaacaacgaggacaacgagaagcuccggaagcccaagcacaagaagcugaagcagccggccgacgggaaccccgaccccaacgccaaccccaacguggacccgaacgccaaccccaacgucgaccccaacgccaaccccaacguggacccgaacgcgaaccccaacgccaaccccaacgccaaccccaacgccaacccgaacgcgaaccccaacgccaaccccaacgccaaccccaacgccaacccgaacgccaaccccaacgcgaaccccaacgccaaccccaacgccaacccgaacgccaaccccaacgccaaccccaacgcgaaccccaacgccaacccgugaggacuagucccuguucccagagcccacuuuuuuuucuuuuuuugaaauaaaauagccugucuuucagaucuaaaaaaaaaaaaaaaaaaaaaaaaaaaaaaaaaaaaaaaaaaaaaaaaaaaaaaaaaaaaaaaaugcaucccccccccccccccccccccccccccccccaaaggcucuuuucagagccaccagaauu

SEQ ID NO: 6327 - RNA, 1192 nt, Artificial Sequence
  mRNA Design a-3 (A64-N5-C30-hSL-N5) comprising derived and/or modified sequence from Pf(3D7)__XP_001351122.1__HsALB_Pf-CSP(19-272) (opt1)
aggagagggcgcuuggcuugcaaggacccugagcugcggcauugaagcacacccaacccaacucgacugaagucagccucacugaaccggaucugagaaucuucucucucugggcuugccagggcucuccgaaccuagcuagcauccucuucaauuccaacuagaaagcuuaccaugaagugggugaccuucaucagccugcucuuccuguucuccagcgccuacucccuguuccaggaguaccagugcuacggcuccagcuccaacacccgggugcucaacgagcugaacuacgacaacgcggggaccaaccuguacaacgagcucgagaugaacuacuacggcaagcaggagaacugguacagccugaagaagaacucccgcagccugggggagaacgacgacggcaacaacgaggacaacgagaagcuccggaagcccaagcacaagaagcugaagcagccggccgacgggaaccccgaccccaacgccaaccccaacguggacccgaacgccaaccccaacgucgaccccaacgccaaccccaacguggacccgaacgcgaaccccaacgccaaccccaacgccaaccccaacgccaacccgaacgcgaaccccaacgccaaccccaacgccaaccccaacgccaacccgaacgccaaccccaacgcgaaccccaacgccaaccccaacgccaacccgaacgccaaccccaacgccaaccccaacgcgaaccccaacgccaacccgaacgccaaccccaacguggaccccaacgccaaccccaacgccaacccgaacgcgaaccccaacgccaaccccaacgccaacccgaacgccaaccccaacgccaaccccaacgcgaaccccaacgccaacccgaacgccaaccccaacgccaaccccaacgcgaaccccaacgccaacccgaacgccaaccccaacgccaaccccaacgccaaccccaacgcgaacccgaacgccaaccccugaggacuagucccuguucccagagcccacuuuuuuuucuuuuuuugaaauaaaauagccugucuuucagaucuaaaaaaaaaaaaaaaaaaaaaaaaaaaaaaaaaaaaaaaaaaaaaaaaaaaaaaaaaaaaaaaaugcaucccccccccccccccccccccccccccccccaaaggcucuuuucagagccaccagaauu

SEQ ID NO: 6328 - RNA, 1354 nt, Artificial Sequence
  mRNA Design a-3 (A64-N5-C30-hSL-N5) comprising derived and/or modified sequence from Pf(3D7)__XP_001351122.1__HsALB_Pf-CSP(19-272)_L(AAY)_Pf-CSP(310-3 27)_L(AAY)_Pf-CSP(346-375) (opt1)
aggagagggcgcuuggcuugcaaggacccugagcugcggcauugaagcacacccaacccaacucgacugaagucagccucacugaaccggaucugagaaucuucucucucugggcuugccagggcucuccgaaccuagcuagcauccucuucaauuccaacuagaaagcuuaccaugaagugggugaccuucaucagccugcucuuccuguucuccagcgccuacucccuguuccaggaguaccagugcuacggcuccagcuccaacacccgggugcucaacgagcugaacuacgacaacgcggggaccaaccuguacaacgagcucgagaugaacuacuacggcaagcaggagaacugguacagccugaagaagaacucccgcagccugggggagaacgacgacggcaacaacgaggacaacgagaagcuccggaagcccaagcacaagaagcugaagcagccggccgacgggaaccccgaccccaacgccaaccccaacguggacccgaacgccaaccccaacgucgaccccaacgccaaccccaacguggacccgaacgcgaaccccaacgccaaccccaacgccaaccccaacgccaacccgaacgcgaaccccaacgccaaccccaacgccaaccccaacgccaacccgaacgccaaccccaacgcgaaccccaacgccaaccccaacgccaacccgaacgccaaccccaacgccaaccccaacgcgaaccccaacgccaacccgaacgccaaccccaacguggaccccaacgccaaccccaacgccaacccgaacgcgaaccccaacgccaaccccaacgccaacccgaacgccaaccccaacgccaaccccaacgcgaaccccaacgccaacccgaacgccaaccccaacgccaaccccaacgcgaaccccaacgccaacccgaacgccaaccccaacgccaaccccaacgccaaccccaacgcgaacccgaacgccaaccccgccgcguaugagccgagcgacaagcacaucaaggaguaccugaacaagauccagaacucccucgcggccuacaucaagcccggcuccgcgaacaagcccaaggacgagcuggacuacgccaacgacaucgagaagaagaucugcaagauggagaagugcagcugaggacuagucccuguucccagagcccacuuuuuuuucuuuuuuugaaauaaaauagccugucuuucagaucuaaaaaaaaaaaaaaaaaaaaaaaaaaaaaaaaaaaaaaaaaaaaaaaaaaaaaaaaaaaaaaaaugcaucccccccccccccccccccccccccccccccaaaggcucuuuucagagccaccagaauu

SEQ ID NO: 6329 - RNA, 1315 nt, Artificial Sequence
  mRNA Design a-3 (A64-N5-C30-hSL-N5) comprising derived and/or modified sequence from Pf(3D7)__XP_001351122.1__HsALB_Pf-CSP(19-272)_L(AAY)_Pf-CSP(346-3 65)_L(AAY)_P2 (opt1)
aggagagggcgcuuggcuugcaaggacccugagcugcggcauugaagcacacccaacccaacucgacugaagucagccucacugaaccggaucugagaaucuucucucucugggcuugccagggcucuccgaaccuagcuagcauccucuucaauuccaacuagaaagcuuaccaugaagugggugaccuucaucagccugcucuuccuguucuccagcgccuacucccuguuccaggaguaccagugcuacggcuccagcuccaacacccgggugcucaacgagcugaacuacgacaacgcggggaccaaccuguacaacgagcucgagaugaacuacuacggcaagcaggagaacugguacagccugaagaagaacucccgcagccugggggagaacgacgacggcaacaacgaggacaacgagaagcuccggaagcccaagcacaagaagcugaagcagccggccgacgggaaccccgaccccaacgccaaccccaacguggacccgaacgccaaccccaacgucgaccccaacgccaaccccaacguggacccgaacgcgaaccccaacgccaaccccaacgccaaccccaacgccaacccgaacgcgaaccccaacgccaaccccaacgccaaccccaacgccaacccgaacgccaaccccaacgcgaaccccaacgccaaccccaacgccaacccgaacgccaaccccaacgccaaccccaacgcgaaccccaacgccaacccgaacgccaaccccaacguggaccccaacgccaaccccaacgccaacccgaacgcgaaccccaacgccaaccccaacgccaacccgaacgccaaccccaacgccaaccccaacgcgaaccccaacgccaacccgaacgccaaccccaacgccaaccccaacgcgaaccccaacgccaacccgaacgccaaccccaacgccaaccccaacgccaaccccaacgcgaacccgaacgccaaccccgccgcguauaucaagcccggcuccgcgaacaagcccaaggacgagcuggacuacgccaacgacaucgaggcggccuaccaguacaucaaggccaacagcaaguucaucggcaucaccgagcugugaggacuagucccuguucccagagcccacuuuuuuuucuuuuuuugaaauaaaauagccugucuuucagaucuaaaaaaaaaaaaaaaaaaaaaaaaaaaaaaaaaaaaaaaaaaaaaaaaaaaaaaaaaaaaaaaaugcaucccccccccccccccccccccccccccccccaaaggcucuuuucagagccaccagaauu

SEQ ID NO: 6330 - RNA, 1309 nt, Artificial Sequence
  mRNA Design a-3 (A64-N5-C30-hSL-N5) comprising derived and/or modified sequence from Pf(3D7)__XP_001351122.1__HsALB_Pf-CSP(19-272)_L(AAY)_Pf-CSP(346-3 65)_L(AAY)_PADRE (opt1)
aggagagggcgcuuggcuugcaaggacccugagcugcggcauugaagcacacccaacccaacucgacugaagucagccucacugaaccggaucugagaaucuucucucucugggcuugccagggcucuccgaaccuagcuagcauccucuucaauuccaacuagaaagcuuaccaugaagugggugaccuucaucagccugcucuuccuguucuccagcgccuacucccuguuccaggaguaccagugcuacggcuccagcuccaacacccgggugcucaacgagcugaacuacgacaacgcggggaccaaccuguacaacgagcucgagaugaacuacuacggcaagcaggagaacugguacagccugaagaagaacucccgcagccugggggagaacgacgacggcaacaacgaggacaacgagaagcuccggaagcccaagcacaagaagcugaagcagccggccgacgggaaccccgaccccaacgccaaccccaacguggacccgaacgccaaccccaacgucgaccccaacgccaaccccaacguggacccgaacgcgaaccccaacgccaaccccaacgccaaccccaacgccaacccgaacgcgaaccccaacgccaaccccaacgccaaccccaacgccaacccgaacgccaaccccaacgcgaaccccaacgccaaccccaacgccaacccgaacgccaaccccaacgccaaccccaacgcgaaccccaacgccaacccgaacgccaaccccaacguggaccccaacgccaaccccaacgccaacccgaacgcgaaccccaacgccaaccccaacgccaacccgaacgccaaccccaacgccaaccccaacgcgaaccccaacgccaacccgaacgccaaccccaacgccaaccccaacgcgaaccccaacgccaacccgaacgccaaccccaacgccaaccccaacgccaaccccaacgcgaacccgaacgccaaccccgccgcguauaucaagcccggcuccgcgaacaagcccaaggacgagcuggacuacgccaacgacaucgaggcggccuacgccaaguucguggccgccuggacccugaaggcggccgccugaggacuagucccuguucccagagcccacuuuuuuuucuuuuuuugaaauaaaauagccugucuuucagaucuaaaaaaaaaaaaaaaaaaaaaaaaaaaaaaaaaaaaaaaaaaaaaaaaaaaaaaaaaaaaaaaaugcaucccccccccccccccccccccccccccccccaaaggcucuuuucagagccaccagaauu

SEQ ID NO: 6331 - RNA, 1366 nt, Artificial Sequence
  mRNA Design a-3 (A64-N5-C30-hSL-N5) comprising derived and/or modified sequence from Pf(3D7)__XP_001351122.1__HsALB_Pf-CSP(19-272)_L(G4S)_Pf-CSP(310-3 27)_L(G4S)_Pf-CSP(346-375) (opt1)
aggagagggcgcuuggcuugcaaggacccugagcugcggcauugaagcacacccaacccaacucgacugaagucagccucacugaaccggaucugagaaucuucucucucugggcuugccagggcucuccgaaccuagcuagcauccucuucaauuccaacuagaaagcuuaccaugaagugggugaccuucaucagccugcucuuccuguucuccagcgccuacucccuguuccaggaguaccagugcuacggcuccagcuccaacacccgggugcucaacgagcugaacuacgacaacgcggggaccaaccuguacaacgagcucgagaugaacuacuacggcaagcaggagaacugguacagccugaagaagaacucccgcagccugggggagaacgacgacggcaacaacgaggacaacgagaagcuccggaagcccaagcacaagaagcugaagcagccggccgacgggaaccccgaccccaacgccaaccccaacguggacccgaacgccaaccccaacgucgaccccaacgccaaccccaacguggacccgaacgcgaaccccaacgccaaccccaacgccaaccccaacgccaacccgaacgcgaaccccaacgccaaccccaacgccaaccccaacgccaacccgaacgccaaccccaacgcgaaccccaacgccaaccccaacgccaacccgaacgccaaccccaacgccaaccccaacgcgaaccccaacgccaacccgaacgccaaccccaacguggaccccaacgccaaccccaacgccaacccgaacgcgaaccccaacgccaaccccaacgccaacccgaacgccaaccccaacgccaaccccaacgcgaaccccaacgccaacccgaacgccaaccccaacgccaaccccaacgcgaaccccaacgccaacccgaacgccaaccccaacgccaaccccaacgccaaccccaacgcgaacccgaacgccaaccccggaggcggaggaucugagccgagcgacaagcacaucaaggaguaccugaacaagauccagaacucccucggcggagguggaaguaucaagcccggcuccgcgaacaagcccaaggacgagcuggacuacgccaacgacaucgagaagaagaucugcaagauggagaagugcagcugaggacuagucccuguucccagagcccacuuuuuuuucuuuuuuugaaauaaaauagccugucuuucagaucuaaaaaaaaaaaaaaaaaaaaaaaaaaaaaaaaaaaaaaaaaaaaaaaaaaaaaaaaaaaaaaaaugcaucccccccccccccccccccccccccccccccaaaggcucuuuucagagccaccagaauu

SEQ ID NO: 6332 - RNA, 1351 nt, Artificial Sequence
  mRNA Design a-3 (A64-N5-C30-hSL-N5) comprising derived and/or modified sequence from Pf(3D7)__XP_001351122.1__HsALB_Pf-CSP(19-272)_L(G4S)_Pf-CSP(310-3 27)_Pf-CSP(346-375) (opt1)
aggagagggcgcuuggcuugcaaggacccugagcugcggcauugaagcacacccaacccaacucgacugaagucagccucacugaaccggaucugagaaucuucucucucugggcuugccagggcucuccgaaccuagcuagcauccucuucaauuccaacuagaaagcuuaccaugaagugggugaccuucaucagccugcucuuccuguucuccagcgccuacucccuguuccaggaguaccagugcuacggcuccagcuccaacacccgggugcucaacgagcugaacuacgacaacgcggggaccaaccuguacaacgagcucgagaugaacuacuacggcaagcaggagaacugguacagccugaagaagaacucccgcagccugggggagaacgacgacggcaacaacgaggacaacgagaagcuccggaagcccaagcacaagaagcugaagcagccggccgacgggaaccccgaccccaacgccaaccccaacguggacccgaacgccaaccccaacgucgaccccaacgccaaccccaacguggacccgaacgcgaaccccaacgccaaccccaacgccaaccccaacgccaacccgaacgcgaaccccaacgccaaccccaacgccaaccccaacgccaacccgaacgccaaccccaacgcgaaccccaacgccaaccccaacgccaacccgaacgccaaccccaacgccaaccccaacgcgaaccccaacgccaacccgaacgccaaccccaacguggaccccaacgccaaccccaacgccaacccgaacgcgaaccccaacgccaaccccaacgccaacccgaacgccaaccccaacgccaaccccaacgcgaaccccaacgccaacccgaacgccaaccccaacgccaaccccaacgcgaaccccaacgccaacccgaacgccaaccccaacgccaaccccaacgccaaccccaacgcgaacccgaacgccaaccccggaggcggaggaucugagccgagcgacaagcacaucaaggaguaccugaacaagauccagaacucccucaucaagcccggcuccgcgaacaagcccaaggacgagcuggacuacgccaacgacaucgagaagaagaucugcaagauggagaagugcagcugaggacuagucccuguucccagagcccacuuuuuuuucuuuuuuugaaauaaaauagccugucuuucagaucuaaaaaaaaaaaaaaaaaaaaaaaaaaaaaaaaaaaaaaaaaaaaaaaaaaaaaaaaaaaaaaaaugcaucccccccccccccccccccccccccccccccaaaggcucuuuucagagccaccagaauu

SEQ ID NO: 6333 - RNA, 1351 nt, Artificial Sequence
  mRNA Design a-3 (A64-N5-C30-hSL-N5) comprising derived and/or modified sequence from Pf(3D7)__XP_001351122.1__HsALB_Pf-CSP(19-325) (opt1)
aggagagggcgcuuggcuugcaaggacccugagcugcggcauugaagcacacccaacccaacucgacugaagucagccucacugaaccggaucugagaaucuucucucucugggcuugccagggcucuccgaaccuagcuagcauccucuucaauuccaacuagaaagcuuaccaugaagugggugaccuucaucagccugcucuuccuguucuccagcgccuacucccuguuccaggaguaccagugcuacggcuccagcuccaacacccgggugcucaacgagcugaacuacgacaacgcggggaccaaccuguacaacgagcucgagaugaacuacuacggcaagcaggagaacugguacagccugaagaagaacucccgcagccugggggagaacgacgacggcaacaacgaggacaacgagaagcuccggaagcccaagcacaagaagcugaagcagccggccgacgggaaccccgaccccaacgccaaccccaacguggacccgaacgccaaccccaacgucgaccccaacgccaaccccaacguggacccgaacgcgaaccccaacgccaaccccaacgccaaccccaacgccaacccgaacgcgaaccccaacgccaaccccaacgccaaccccaacgccaacccgaacgccaaccccaacgcgaaccccaacgccaaccccaacgccaacccgaacgccaaccccaacgccaaccccaacgcgaaccccaacgccaacccgaacgccaaccccaacguggaccccaacgccaaccccaacgccaacccgaacgcgaaccccaacgccaaccccaacgccaacccgaacgccaaccccaacgccaaccccaacgcgaaccccaacgccaacccgaacgccaaccccaacgccaaccccaacgcgaaccccaacgccaacccgaacgccaaccccaacgccaaccccaacgccaaccccaacgcgaacccgaacgccaaccccaacaagaacaaccagggcaacggccaggggcacaacaugcccaacgaccccaaccgcaacgucgacgagaacgccaacgccaacuccgccgugaagaacaacaacaacgaggagccgagcgacaagcacaucaaggaguaccugaacaagauccagaacugaggacuagucccuguucccagagcccacuuuuuuuucuuuuuuugaaauaaaauagccugucuuucagaucuaaaaaaaaaaaaaaaaaaaaaaaaaaaaaaaaaaaaaaaaaaaaaaaaaaaaaaaaaaaaaaaaugcaucccccccccccccccccccccccccccccccaaaggcucuuuucagagccaccagaauu

SEQ ID NO: 6334 - RNA, 1528 nt, Artificial Sequence
  mRNA Design a-3 (A64-N5-C30-hSL-N5) comprising derived and/or modified sequence from Pf(3D7)__XP_001351122.1__HsALB_Pf-CSP(19-384) (opt1)
aggagagggcgcuuggcuugcaaggacccugagcugcggcauugaagcacacccaacccaacucgacugaagucagccucacugaaccggaucugagaaucuucucucucugggcuugccagggcucuccgaaccuagcuagcauccucuucaauuccaacuagaaagcuuaccaugaagugggugaccuucaucagccugcucuuccuguucuccagcgccuacucccuguuccaggaguaccagugcuacggcuccagcuccaacacccgggugcucaacgagcugaacuacgacaacgcggggaccaaccuguacaacgagcucgagaugaacuacuacggcaagcaggagaacugguacagccugaagaagaacucccgcagccugggggagaacgacgacggcaacaacgaggacaacgagaagcuccggaagcccaagcacaagaagcugaagcagccggccgacgggaaccccgaccccaacgccaaccccaacguggacccgaacgccaaccccaacgucgaccccaacgccaaccccaacguggacccgaacgcgaaccccaacgccaaccccaacgccaaccccaacgccaacccgaacgcgaaccccaacgccaaccccaacgccaaccccaacgccaacccgaacgccaaccccaacgcgaaccccaacgccaaccccaacgccaacccgaacgccaaccccaacgccaaccccaacgcgaaccccaacgccaacccgaacgccaaccccaacguggaccccaacgccaaccccaacgccaacccgaacgcgaaccccaacgccaaccccaacgccaacccgaacgccaaccccaacgccaaccccaacgcgaaccccaacgccaacccgaacgccaaccccaacgccaaccccaacgcgaaccccaacgccaacccgaacgccaaccccaacgccaaccccaacgccaaccccaacgcgaacccgaacgccaaccccaacaagaacaaccagggcaacggccaggggcacaacaugcccaacgaccccaaccgcaacgucgacgagaacgccaacgccaacuccgccgugaagaacaacaacaacgaggagccgagcgacaagcacaucaaggaguaccugaacaagauccagaacucccucagcacggaguggucccccugcagcgugaccugcggcaacgggauccagguccggaucaagcccggcuccgcgaacaagcccaaggacgagcuggacuacgccaacgacaucgagaagaagaucugcaagauggagaagugcagcuccguguucaacguggucaacagcuccugaggacuagucccuguucccagagcccacuuuuuuuucuuuuuuugaaauaaaauagccugucuuucagaucuaaaaaaaaaaaaaaaaaaaaaaaaaaaaaaaaaaaaaaaaaaaaaaaaaaaaaaaaaaaaaaaaugcaucccccccccccccccccccccccccccccccaaaggcucuuuucagagccaccagaauu

SEQ ID NO: 6335 - RNA, 1666 nt, Artificial Sequence
  mRNA Design a-3 (A64-N5-C30-hSL-N5) comprising derived and/or modified sequence from Pf(3D7)__XP_001351122.1__HsALB_Pf-CSP(19-384)_TM domain HA (opt1)
aggagagggcgcuuggcuugcaaggacccugagcugcggcauugaagcacacccaacccaacucgacugaagucagccucacugaaccggaucugagaaucuucucucucugggcuugccagggcucuccgaaccuagcuagcauccucuucaauuccaacuagaaagcuuaccaugaagugggugaccuucaucagccugcucuuccuguucuccagcgccuacucccuguuccaggaguaccagugcuacggcuccagcuccaacacccgggugcucaacgagcugaacuacgacaacgcggggaccaaccuguacaacgagcucgagaugaacuacuacggcaagcaggagaacugguacagccugaagaagaacucccgcagccugggggagaacgacgacggcaacaacgaggacaacgagaagcuccggaagcccaagcacaagaagcugaagcagccggccgacgggaaccccgaccccaacgccaaccccaacguggacccgaacgccaaccccaacgucgaccccaacgccaaccccaacguggacccgaacgcgaaccccaacgccaaccccaacgccaaccccaacgccaacccgaacgcgaaccccaacgccaaccccaacgccaaccccaacgccaacccgaacgccaaccccaacgcgaaccccaacgccaaccccaacgccaacccgaacgccaaccccaacgccaaccccaacgcgaaccccaacgccaacccgaacgccaaccccaacguggaccccaacgccaaccccaacgccaacccgaacgcgaaccccaacgccaaccccaacgccaacccgaacgccaaccccaacgccaaccccaacgcgaaccccaacgccaacccgaacgccaaccccaacgccaaccccaacgcgaaccccaacgccaacccgaacgccaaccccaacgccaaccccaacgccaaccccaacgcgaacccgaacgccaaccccaacaagaacaaccagggcaacggccaggggcacaacaugcccaacgaccccaaccgcaacgucgacgagaacgccaacgccaacuccgccgugaagaacaacaacaacgaggagccgagcgacaagcacaucaaggaguaccugaacaagauccagaacucccucagcacggaguggucccccugcagcgugaccugcggcaacgggauccagguccggaucaagcccggcuccgcgaacaagcccaaggacgagcuggacuacgccaacgacaucgagaagaagaucugcaagauggagaagugcagcuccguguucaacguggucaacagcuccaagcucgaguccacgcggaucuaccagauccuggcgaucuacagcaccgucgccagcucccuggugcucguggucagccugggggccaucuccuucuggaugugcagcaacggcucccugcagugccgcaucugcaucugaggacuagucccuguucccagagcccacuuuuuuuucuuuuuuugaaauaaaauagccugucuuucagaucuaaaaaaaaaaaaaaaaaaaaaaaaaaaaaaaaaaaaaaaaaaaaaaaaaaaaaaaaaaaaaaaaugcaucccccccccccccccccccccccccccccccaaaggcucuuuucagagccaccagaauu

SEQ ID NO: 6336 - RNA, 1378 nt, Artificial Sequence
  mRNA Design a-3 (A64-N5-C30-hSL-N5) comprising derived and/or modified sequence from Pf(3D7)__XP_001351122.1__HsALB_Pf-CSP(82-397) (opt1)
aggagagggcgcuuggcuugcaaggacccugagcugcggcauugaagcacacccaacccaacucgacugaagucagccucacugaaccggaucugagaaucuucucucucugggcuugccagggcucuccgaaccuagcuagcauccucuucaauuccaacuagaaagcuuaccaugaagugggugaccuucaucagccugcucuuccuguucuccagcgccuacuccgacaacgagaagcuccggaagcccaagcacaagaagcugaagcagccggccgacgggaaccccgaccccaacgccaaccccaacguggacccgaacgccaaccccaacgucgaccccaacgccaaccccaacguggacccgaacgcgaaccccaacgccaaccccaacgccaaccccaacgccaacccgaacgcgaaccccaacgccaaccccaacgccaaccccaacgccaacccgaacgccaaccccaacgcgaaccccaacgccaaccccaacgccaacccgaacgccaaccccaacgccaaccccaacgcgaaccccaacgccaacccgaacgccaaccccaacguggaccccaacgccaaccccaacgccaacccgaacgcgaaccccaacgccaaccccaacgccaacccgaacgccaaccccaacgccaaccccaacgcgaaccccaacgccaacccgaacgccaaccccaacgccaaccccaacgcgaaccccaacgccaacccgaacgccaaccccaacgccaaccccaacgccaaccccaacgcgaacccgaacgccaaccccaacaagaacaaccagggcaacggccaggggcacaacaugcccaacgaccccaaccgcaacgucgacgagaacgccaacgccaacuccgccgugaagaacaacaacaacgaggagccgagcgacaagcacaucaaggaguaccugaacaagauccagaacucccucagcacggaguggucccccugcagcgugaccugcggcaacgggauccagguccggaucaagcccggcuccgcgaacaagcccaaggacgagcuggacuacgccaacgacaucgagaagaagaucugcaagauggagaagugcagcuccguguucaacguggucaacagcuccaucgggcugaucauggugcucagcuuccuguuccugaacugaggacuagucccuguucccagagcccacuuuuuuuucuuuuuuugaaauaaaauagccugucuuucagaucuaaaaaaaaaaaaaaaaaaaaaaaaaaaaaaaaaaaaaaaaaaaaaaaaaaaaaaaaaaaaaaaaugcaucccccccccccccccccccccccccccccccaaaggcucuuuucagagccaccagaauu

SEQ ID NO: 6337 - RNA, 730 nt, Artificial Sequence
  mRNA Design a-3 (A64-N5-C30-hSL-N5) comprising derived and/or modified sequence from Pf(3D7)__XP_001351122.1__HsALB_Pf-CSP(93-192) (opt1)
aggagagggcgcuuggcuugcaaggacccugagcugcggcauugaagcacacccaacccaacucgacugaagucagccucacugaaccggaucugagaaucuucucucucugggcuugccagggcucuccgaaccuagcuagcauccucuucaauuccaacuagaaagcuuaccaugaagugggugaccuucaucagccugcucuuccuguucuccagcgccuacuccaagcugaagcagccggccgacgggaaccccgaccccaacgccaaccccaacguggacccgaacgccaaccccaacgucgaccccaacgccaaccccaacguggacccgaacgcgaaccccaacgccaaccccaacgccaaccccaacgccaacccgaacgcgaaccccaacgccaaccccaacgccaaccccaacgccaacccgaacgccaaccccaacgcgaaccccaacgccaaccccaacgccaacccgaacgccaaccccaacgccaaccccaacgcgaaccccaacgccaacccgugaggacuagucccuguucccagagcccacuuuuuuuucuuuuuuugaaauaaaauagccugucuuucagaucuaaaaaaaaaaaaaaaaaaaaaaaaaaaaaaaaaaaaaaaaaaaaaaaaaaaaaaaaaaaaaaaaugcaucccccccccccccccccccccccccccccccaaaggcucuuuucagagccaccagaauu

SEQ ID NO: 6338 - RNA, 970 nt, Artificial Sequence
  mRNA Design a-3 (A64-N5-C30-hSL-N5) comprising derived and/or modified sequence from Pf(3D7)__XP_001351122.1__HsALB_Pf-CSP(93-272) (opt1)
aggagagggcgcuuggcuugcaaggacccugagcugcggcauugaagcacacccaacccaacucgacugaagucagccucacugaaccggaucugagaaucuucucucucugggcuugccagggcucuccgaaccuagcuagcauccucuucaauuccaacuagaaagcuuaccaugaagugggugaccuucaucagccugcucuuccuguucuccagcgccuacuccaagcugaagcagccggccgacgggaaccccgaccccaacgccaaccccaacguggacccgaacgccaaccccaacgucgaccccaacgccaaccccaacguggacccgaacgcgaaccccaacgccaaccccaacgccaaccccaacgccaacccgaacgcgaaccccaacgccaaccccaacgccaaccccaacgccaacccgaacgccaaccccaacgcgaaccccaacgccaaccccaacgccaacccgaacgccaaccccaacgccaaccccaacgcgaaccccaacgccaacccgaacgccaaccccaacguggaccccaacgccaaccccaacgccaacccgaacgcgaaccccaacgccaaccccaacgccaacccgaacgccaaccccaacgccaaccccaacgcgaaccccaacgccaacccgaacgccaaccccaacgccaaccccaacgcgaaccccaacgccaacccgaacgccaaccccaacgccaaccccaacgccaaccccaacgcgaacccgaacgccaaccccugaggacuagucccuguucccagagcccacuuuuuuuucuuuuuuugaaauaaaauagccugucuuucagaucuaaaaaaaaaaaaaaaaaaaaaaaaaaaaaaaaaaaaaaaaaaaaaaaaaaaaaaaaaaaaaaaaugcaucccccccccccccccccccccccccccccccaaaggcucuuuucagagccaccagaauu

SEQ ID NO: 6339 - RNA, 1345 nt, Artificial Sequence
  mRNA Design a-3 (A64-N5-C30-hSL-N5) comprising derived and/or modified sequence from Pf(3D7)__XP_001351122.1__HsALB_Pf-CSP(93-397) (opt1)
aggagagggcgcuuggcuugcaaggacccugagcugcggcauugaagcacacccaacccaacucgacugaagucagccucacugaaccggaucugagaaucuucucucucugggcuugccagggcucuccgaaccuagcuagcauccucuucaauuccaacuagaaagcuuaccaugaagugggugaccuucaucagccugcucuuccuguucuccagcgccuacuccaagcugaagcagccggccgacgggaaccccgaccccaacgccaaccccaacguggacccgaacgccaaccccaacgucgaccccaacgccaaccccaacguggacccgaacgcgaaccccaacgccaaccccaacgccaaccccaacgccaacccgaacgcgaaccccaacgccaaccccaacgccaaccccaacgccaacccgaacgccaaccccaacgcgaaccccaacgccaaccccaacgccaacccgaacgccaaccccaacgccaaccccaacgcgaaccccaacgccaacccgaacgccaaccccaacguggaccccaacgccaaccccaacgccaacccgaacgcgaaccccaacgccaaccccaacgccaacccgaacgccaaccccaacgccaaccccaacgcgaaccccaacgccaacccgaacgccaaccccaacgccaaccccaacgcgaaccccaacgccaacccgaacgccaaccccaacgccaaccccaacgccaaccccaacgcgaacccgaacgccaaccccaacaagaacaaccagggcaacggccaggggcacaacaugcccaacgaccccaaccgcaacgucgacgagaacgccaacgccaacuccgccgugaagaacaacaacaacgaggagccgagcgacaagcacaucaaggaguaccugaacaagauccagaacucccucagcacggaguggucccccugcagcgugaccugcggcaacgggauccagguccggaucaagcccggcuccgcgaacaagcccaaggacgagcuggacuacgccaacgacaucgagaagaagaucugcaagauggagaagugcagcuccguguucaacguggucaacagcuccaucgggcugaucauggugcucagcuuccuguuccugaacugaggacuagucccuguucccagagcccacuuuuuuuucuuuuuuugaaauaaaauagccugucuuucagaucuaaaaaaaaaaaaaaaaaaaaaaaaaaaaaaaaaaaaaaaaaaaaaaaaaaaaaaaaaaaaaaaaugcaucccccccccccccccccccccccccccccccaaaggcucuuuucagagccaccagaauu

SEQ ID NO: 6340 - RNA, 715 nt, Artificial Sequence
  mRNA Design a-3 (A64-N5-C30-hSL-N5) comprising derived and/or modified sequence from Pf(3D7)__XP_001351122.1__HsALB_Pf-CSP(98-192) (opt1)
aggagagggcgcuuggcuugcaaggacccugagcugcggcauugaagcacacccaacccaacucgacugaagucagccucacugaaccggaucugagaaucuucucucucugggcuugccagggcucuccgaaccuagcuagcauccucuucaauuccaacuagaaagcuuaccaugaagugggugaccuucaucagccugcucuuccuguucuccagcgccuacuccgccgacgggaaccccgaccccaacgccaaccccaacguggacccgaacgccaaccccaacgucgaccccaacgccaaccccaacguggacccgaacgcgaaccccaacgccaaccccaacgccaaccccaacgccaacccgaacgcgaaccccaacgccaaccccaacgccaaccccaacgccaacccgaacgccaaccccaacgcgaaccccaacgccaaccccaacgccaacccgaacgccaaccccaacgccaaccccaacgcgaaccccaacgccaacccgugaggacuagucccuguucccagagcccacuuuuuuuucuuuuuuugaaauaaaauagccugucuuucagaucuaaaaaaaaaaaaaaaaaaaaaaaaaaaaaaaaaaaaaaaaaaaaaaaaaaaaaaaaaaaaaaaaugcaucccccccccccccccccccccccccccccccaaaggcucuuuucagagccaccagaauu

SEQ ID NO: 6341 - RNA, 955 nt, Artificial Sequence
  mRNA Design a-3 (A64-N5-C30-hSL-N5) comprising derived and/or modified sequence from Pf(3D7)__XP_001351122.1__HsALB_Pf-CSP(98-272) (opt1)
aggagagggcgcuuggcuugcaaggacccugagcugcggcauugaagcacacccaacccaacucgacugaagucagccucacugaaccggaucugagaaucuucucucucugggcuugccagggcucuccgaaccuagcuagcauccucuucaauuccaacuagaaagcuuaccaugaagugggugaccuucaucagccugcucuuccuguucuccagcgccuacuccgccgacgggaaccccgaccccaacgccaaccccaacguggacccgaacgccaaccccaacgucgaccccaacgccaaccccaacguggacccgaacgcgaaccccaacgccaaccccaacgccaaccccaacgccaacccgaacgcgaaccccaacgccaaccccaacgccaaccccaacgccaacccgaacgccaaccccaacgcgaaccccaacgccaaccccaacgccaacccgaacgccaaccccaacgccaaccccaacgcgaaccccaacgccaacccgaacgccaaccccaacguggaccccaacgccaaccccaacgccaacccgaacgcgaaccccaacgccaaccccaacgccaacccgaacgccaaccccaacgccaaccccaacgcgaaccccaacgccaacccgaacgccaaccccaacgccaaccccaacgcgaaccccaacgccaacccgaacgccaaccccaacgccaaccccaacgccaaccccaacgcgaacccgaacgccaaccccugaggacuagucccuguucccagagcccacuuuuuuuucuuuuuuugaaauaaaauagccugucuuucagaucuaaaaaaaaaaaaaaaaaaaaaaaaaaaaaaaaaaaaaaaaaaaaaaaaaaaaaaaaaaaaaaaaugcaucccccccccccccccccccccccccccccccaaaggcucuuuucagagccaccagaauu

SEQ ID NO: 6342 - RNA, 1261 nt, Artificial Sequence
  mRNA Design a-3 (A64-N5-C30-hSL-N5) comprising derived and/or modified sequence from Pf(3D7)__XP_001351122.1__HsALB_Pf-CSP(98-374) (opt1)
aggagagggcgcuuggcuugcaaggacccugagcugcggcauugaagcacacccaacccaacucgacugaagucagccucacugaaccggaucugagaaucuucucucucugggcuugccagggcucuccgaaccuagcuagcauccucuucaauuccaacuagaaagcuuaccaugaagugggugaccuucaucagccugcucuuccuguucuccagcgccuacuccgccgacgggaaccccgaccccaacgccaaccccaacguggacccgaacgccaaccccaacgucgaccccaacgccaaccccaacguggacccgaacgcgaaccccaacgccaaccccaacgccaaccccaacgccaacccgaacgcgaaccccaacgccaaccccaacgccaaccccaacgccaacccgaacgccaaccccaacgcgaaccccaacgccaaccccaacgccaacccgaacgccaaccccaacgccaaccccaacgcgaaccccaacgccaacccgaacgccaaccccaacguggaccccaacgccaaccccaacgccaacccgaacgcgaaccccaacgccaaccccaacgccaacccgaacgccaaccccaacgccaaccccaacgcgaaccccaacgccaacccgaacgccaaccccaacgccaaccccaacgcgaaccccaacgccaacccgaacgccaaccccaacgccaaccccaacgccaaccccaacgcgaacccgaacgccaaccccaacaagaacaaccagggcaacggccaggggcacaacaugcccaacgaccccaaccgcaacgucgacgagaacgccaacgccaacuccgccgugaagaacaacaacaacgaggagccgagcgacaagcacaucaaggaguaccugaacaagauccagaacucccucagcacggaguggucccccugcagcgugaccugcggcaacgggauccagguccggaucaagcccggcuccgcgaacaagcccaaggacgagcuggacuacgccaacgacaucgagaagaagaucugcaagauggagaagugcugaggacuagucccuguucccagagcccacuuuuuuuucuuuuuuugaaauaaaauagccugucuuucagaucuaaaaaaaaaaaaaaaaaaaaaaaaaaaaaaaaaaaaaaaaaaaaaaaaaaaaaaaaaaaaaaaaugcaucccccccccccccccccccccccccccccccaaaggcucuuuucagagccaccagaauu

SEQ ID NO: 6343 - RNA, 1330 nt, Artificial Sequence
  mRNA Design a-3 (A64-N5-C30-hSL-N5) comprising derived and/or modified sequence from Pf(3D7)__XP_001351122.1__HsALB_Pf-CSP(98-397) (opt1)
aggagagggcgcuuggcuugcaaggacccugagcugcggcauugaagcacacccaacccaacucgacugaagucagccucacugaaccggaucugagaaucuucucucucugggcuugccagggcucuccgaaccuagcuagcauccucuucaauuccaacuagaaagcuuaccaugaagugggugaccuucaucagccugcucuuccuguucuccagcgccuacuccgccgacgggaaccccgaccccaacgccaaccccaacguggacccgaacgccaaccccaacgucgaccccaacgccaaccccaacguggacccgaacgcgaaccccaacgccaaccccaacgccaaccccaacgccaacccgaacgcgaaccccaacgccaaccccaacgccaaccccaacgccaacccgaacgccaaccccaacgcgaaccccaacgccaaccccaacgccaacccgaacgccaaccccaacgccaaccccaacgcgaaccccaacgccaacccgaacgccaaccccaacguggaccccaacgccaaccccaacgccaacccgaacgcgaaccccaacgccaaccccaacgccaacccgaacgccaaccccaacgccaaccccaacgcgaaccccaacgccaacccgaacgccaaccccaacgccaaccccaacgcgaaccccaacgccaacccgaacgccaaccccaacgccaaccccaacgccaaccccaacgcgaacccgaacgccaaccccaacaagaacaaccagggcaacggccaggggcacaacaugcccaacgaccccaaccgcaacgucgacgagaacgccaacgccaacuccgccgugaagaacaacaacaacgaggagccgagcgacaagcacaucaaggaguaccugaacaagauccagaacucccucagcacggaguggucccccugcagcgugaccugcggcaacgggauccagguccggaucaagcccggcuccgcgaacaagcccaaggacgagcuggacuacgccaacgacaucgagaagaagaucugcaagauggagaagugcagcuccguguucaacguggucaacagcuccaucgggcugaucauggugcucagcuuccuguuccugaacugaggacuagucccuguucccagagcccacuuuuuuuucuuuuuuugaaauaaaauagccugucuuucagaucuaaaaaaaaaaaaaaaaaaaaaaaaaaaaaaaaaaaaaaaaaaaaaaaaaaaaaaaaaaaaaaaaugcaucccccccccccccccccccccccccccccccaaaggcucuuuucagagccaccagaauu

SEQ ID NO: 6344 - RNA, 1657 nt, Artificial Sequence
  mRNA Design a-3 (A64-N5-C30-hSL-N5) comprising derived and/or modified sequence from Pf(3D7)__XP_001351122.1__HsALB_Pf-CSP(199-377)_L(PVTN)_HBsAg (opt1)
aggagagggcgcuuggcuugcaaggacccugagcugcggcauugaagcacacccaacccaacucgacugaagucagccucacugaaccggaucugagaaucuucucucucugggcuugccagggcucuccgaaccuagcuagcauccucuucaauuccaacuagaaagcuuaccaugaaguggguaaccuuuauuucccuucuuuuucucuuuagcucggcuuauuccgaccccaacgccaaccccaacgccaacccgaacgcgaaccccaacgccaaccccaacgccaacccgaacgccaaccccaacgccaaccccaacgcgaaccccaacgccaacccgaacgccaaccccaacgccaaccccaacgcgaaccccaacgccaacccgaacgccaaccccaacgccaaccccaacgccaaccccaacgcgaacccgaacgccaaccccaacaagaacaaccagggcaacggccaggggcacaacaugcccaacgaccccaaccgcaacgucgacgagaacgccaacgccaacuccgccgugaagaacaacaacaacgaggagccgagcgacaagcacaucaaggaguaccugaacaagauccagaacucccucagcacggaguggucccccugcagcgugaccugcggcaacgggauccagguccggaucaagcccggcuccgcgaacaagcccaaggacgagcuggacuacgccaacgacaucgagaagaagaucugcaagauggagaagugcagcuccgugccggugacgaacauggagaacaucaccagcggcuuccuggggccccuccuggugcugcaggccggcuucuuccuccugacccgcauccugaccaucccgcagucccucgacagcugguggaccucccugaacuuccucgggggcagccccgucugccuggggcagaacucccagagccccaccuccaaccacagccccaccuccugcccgcccaucugccccggcuaccgguggaugugccugcgccgguucaucaucuuccuguucauccuccugcugugccucaucuuccugcuggugcuccuggacuaccagggcaugcugcccgugugcccgcucauccccgggagcacgaccaccaacaccggccccugcaagacgugcaccacccccgcccaggggaacuccauguucccgagcugcugcugcaccaagcccacggacggcaacugcacgugcauccccauccccuccagcugggcguucgccaaguaccugugggagugggccuccguccgcuucagcuggcugucccuccuggugccguucgugcagugguucgucgggcugagccccaccguguggcucuccgccaucuggaugaugugguacuggggccccagccuguacagcaucgugucccccuucaucccgcugcuccccaucuucuucugccugugggucuacaucugaggacuagucccuguucccagagcccacuuuuuuuucuuuuuuugaaauaaaauagccugucuuucagaucuaaaaaaaaaaaaaaaaaaaaaaaaaaaaaaaaaaaaaaaaaaaaaaaaaaaaaaaaaaaaaaaaugcaucccccccccccccccccccccccccccccccaaaggcucuuuucagagccaccagaauu

SEQ ID NO: 6345 - RNA, 1567 nt, Artificial Sequence; identical to SEQ ID NO: 6315
  mRNA Design a-3 (A64-N5-C30-hSL-N5) comprising derived and/or modified sequence from Pf(3D7)__XP_001351122.1__Pf-CSP (opt1)

SEQ ID NO: 6346 - RNA, 1498 nt, Artificial Sequence; identical to SEQ ID NO: 6316
  mRNA Design a-3 (A64-N5-C30-hSL-N5) comprising derived and/or modified sequence from Pf(3D7)__XP_001351122.1__Pf-CSP(1-374) (opt1)

SEQ ID NO: 6347 - RNA, 1351 nt, Artificial Sequence; identical to SEQ ID NO: 6317
  mRNA Design a-3 (A64-N5-C30-hSL-N5) comprising derived and/or modified sequence from Pf(3D7)__XP_001351122.1__Pf-CSP(1-325) (opt1)

SEQ ID NO: 6348 - RNA, 1567 nt, Artificial Sequence
  mRNA Design a-3 (A64-N5-C30-hSL-N5) comprising derived and/or modified sequence from Pf(3D7)__XP_001351122.1__HsALB_Pf-CSP(19-397) (opt1)
aggagagggcgcuuggcuugcaaggacccugagcugcggcauugaagcacacccaacccaacucgacugaagucagccucacugaaccggaucugagaaucuucucucucugggcuugccagggcucuccgaaccuagcuagcauccucuucaauuccaacuagaaagcuuaccaugaagugggugaccuucaucagccuccuguuccuguucuccagcgccuacucccuguuccaggaguaccagugcuacggcagcuccagcaacacccgcguccucaacgagcugaacuacgacaacgccgggacgaaccuguacaacgagcucgagaugaacuacuacggcaagcaggagaacugguacucccugaagaagaacagccggucccugggggagaacgacgacggcaacaacgaggacaacgagaagcuccgcaagcccaagcacaagaagcugaagcagccggcggacgggaaccccgaccccaacgccaaccccaacguggacccgaacgccaaccccaacguggaccccaacgccaaccccaacgucgacccgaacgccaaccccaacgcgaaccccaacgccaaccccaacgccaacccgaacgccaaccccaacgcgaaccccaacgccaaccccaacgccaacccgaacgccaaccccaacgccaaccccaacgcgaaccccaacgccaacccgaacgccaaccccaacgccaaccccaacgccaaccccaacgcgaacccgaacgccaaccccaacguggaccccaacgccaaccccaacgccaacccgaacgccaaccccaacgcgaaccccaacgccaacccgaacgccaaccccaacgccaaccccaacgccaaccccaacgcgaacccgaacgccaaccccaacgccaaccccaacgccaaccccaacgcgaacccgaacgccaaccccaacgccaaccccaacgccaaccccaacgccaacccgaacgcgaaccccaacaagaacaaccagggcaacggccaggggcacaacaugcccaacgaccccaaccggaacguggacgagaacgccaacgccaacagcgccgucaagaacaacaacaacgaggagccguccgacaagcacaucaaggaguaccugaacaagauccagaacagccucuccaccgaguggagccccugcuccgugaccugcggcaacgggauccaggugcgcaucaagcccggcagcgccaacaagcccaaggacgagcuggacuacgcgaacgacaucgagaagaagaucugcaagauggagaagugcuccagcgucuucaacguggugaacuccagcaucgggcugaucaugguccucagcuuccuguuccugaacugaggacuagucccuguucccagagcccacuuuuuuuucuuuuuuugaaauaaaauagccugucuuucagaucuaaaaaaaaaaaaaaaaaaaaaaaaaaaaaaaaaaaaaaaaaaaaaaaaaaaaaaaaaaaaaaaaugcaucccccccccccccccccccccccccccccccaaaggcucuuuucagagccaccagaauu

SEQ ID NO: 6349 - RNA, 1585 nt, Artificial Sequence
  mRNA Design a-3 (A64-N5-C30-hSL-N5) comprising derived and/or modified sequence from Pf(3D7)__XP_001351122.1__HsIns-iso1_Pf-CSP(19-397) (opt1)
aggagagggcgcuuggcuugcaaggacccugagcugcggcauugaagcacacccaacccaacucgacugaagucagccucacugaaccggaucugagaaucuucucucucugggcuugccagggcucuccgaaccuagcuagcauccucuucaauuccaacuagaaagcuuaccauggcccuguggaugcgccuccugccccugcucgcccugcuggcgcucuggggcccggaccccgccgccgcccuguuccaggaguaccagugcuacgggagcuccagcaacacccgggugcugaacgagcucaacuacgacaacgccggcaccaaccuguacaacgagcuggagaugaacuacuacgggaagcaggagaacugguacucccucaagaagaacagccgcucccugggcgagaacgacgacgggaacaacgaggacaacgagaagcugcggaagcccaagcacaagaagcucaagcagcccgcggacggcaacccggaccccaacgccaaccccaacgucgaccccaacgccaacccgaacguggaccccaacgccaaccccaacguggaccccaacgcgaacccgaacgccaaccccaacgccaaccccaacgccaaccccaacgccaacccgaacgcgaaccccaacgccaaccccaacgccaaccccaacgccaacccgaacgccaaccccaacgcgaaccccaacgccaaccccaacgccaacccgaacgccaaccccaacgccaaccccaacgcgaaccccaacgccaacccgaacgucgaccccaacgccaaccccaacgccaacccgaacgccaaccccaacgcgaaccccaacgccaaccccaacgccaacccgaacgccaaccccaacgcgaaccccaacgccaaccccaacgccaacccgaacgccaaccccaacgccaaccccaacgcgaaccccaacgccaacccgaacgccaaccccaacgccaaccccaacgccaaccccaacgcgaacccgaacaagaacaaccagggcaacgggcagggccacaacaugcccaacgaccccaaccgcaacguggacgagaacgccaacgccaacagcgccgugaagaacaacaacaacgaggagcccuccgacaagcacaucaaggaguaccugaacaagauccagaacagccuguccacggaguggagcccgugcuccgugaccugcgggaacggcauccagguccggaucaagcccgggagcgccaacaagcccaaggacgagcucgacuacgcgaacgacaucgagaagaagaucugcaagauggagaagugcuccagcguguucaacgucgugaacuccagcaucggccugaucauggugcuguccuuccucuuccugaacugaggacuagucccuguucccagagcccacuuuuuuuucuuuuuuugaaauaaaauagccugucuuucagaucuaaaaaaaaaaaaaaaaaaaaaaaaaaaaaaaaaaaaaaaaaaaaaaaaaaaaaaaaaaaaaaaaugcaucccccccccccccccccccccccccccccccaaaggcucuuuucagagccaccagaauu

SEQ ID NO: 6350 - RNA, 1564 nt, Artificial Sequence
  mRNA Design a-3 (A64-N5-C30-hSL-N5) comprising derived and/or modified sequence from Pf(3D7)__XP_001351122.1__HsSPARC_Pf-CSP(19-397) (opt1)
aggagagggcgcuuggcuugcaaggacccugagcugcggcauugaagcacacccaacccaacucgacugaagucagccucacugaaccggaucugagaaucuucucucucugggcuugccagggcucuccgaaccuagcuagcauccucuucaauuccaacuagaaagcuuaccaugcgcgccuggaucuucuuccugcucugccuggccggccgggcgcuggcccucuuccaggaguaccagugcuacgggagcuccagcaacacccgcgugcugaacgagcugaacuacgacaacgccggcaccaaccucuacaacgagcuggagaugaacuacuacgggaagcaggagaacugguacucccugaagaagaacagccggucccucggcgagaacgacgacgggaacaacgaggacaacgagaagcugcgcaagcccaagcacaagaagcugaagcagccggccgacggcaaccccgaccccaacgccaaccccaacgucgacccgaacgcgaaccccaacguggaccccaacgccaaccccaacguggacccgaacgccaaccccaacgccaaccccaacgcgaaccccaacgccaacccgaacgccaaccccaacgccaaccccaacgccaaccccaacgcgaacccgaacgccaaccccaacgccaaccccaacgccaaccccaacgccaacccgaacgcgaaccccaacgccaaccccaacgccaaccccaacgccaacccgaacgccaaccccaacgucgaccccaacgcgaaccccaacgccaacccgaacgccaaccccaacgccaaccccaacgccaacccgaacgcgaaccccaacgccaaccccaacgccaaccccaacgccaacccgaacgcgaaccccaacgccaaccccaacgccaaccccaacgccaacccgaacgccaaccccaacgcgaaccccaacgccaaccccaacgccaacccgaacgccaaccccaacaagaacaaccagggcaacgggcagggccacaacaugcccaacgaccccaaccggaacguggacgagaacgccaacgcgaacagcgccgugaagaacaacaacaacgaggagccguccgacaagcacaucaaggaguaccucaacaagauccagaacagccuguccacggaguggagccccugcuccgugaccugcgggaacggcauccagguccgcaucaagcccgggagcgccaacaagcccaaggacgagcuggacuacgccaacgacaucgagaagaagaucugcaagauggagaagugcuccagcguguucaacgucgugaacuccagcaucggccucaucauggugcuguccuuccuguuccucaacugaggacuagucccuguucccagagcccacuuuuuuuucuuuuuuugaaauaaaauagccugucuuucagaucuaaaaaaaaaaaaaaaaaaaaaaaaaaaaaaaaaaaaaaaaaaaaaaaaaaaaaaaaaaaaaaaaugcaucccccccccccccccccccccccccccccccaaaggcucuuuucagagccaccagaauu

SEQ ID NO: 6351 - RNA, 1567 nt, Artificial Sequence
  mRNA Design a-3 (A64-N5-C30-hSL-N5) comprising derived and/or modified sequence from Pf(3D7)__XP_001351122.1__IgE_Pf-CSP(19-397) (opt1)
aggagagggcgcuuggcuugcaaggacccugagcugcggcauugaagcacacccaacccaacucgacugaagucagccucacugaaccggaucugagaaucuucucucucugggcuugccagggcucuccgaaccuagcuagcauccucuucaauuccaacuagaaagcuuaccauggacuggaccuggauccuguuccucguggccgccgcgacccgcguccacagccuguuccaggaguaccagugcuacggcuccagcuccaacacgcgggugcugaacgagcucaacuacgacaacgccgggaccaaccuguacaacgagcuggagaugaacuacuacggcaagcaggagaacugguacagccucaagaagaacucccgcagccugggggagaacgacgacggcaacaacgaggacaacgagaagcugcggaagcccaagcacaagaagcucaagcagccggccgacgggaaccccgaccccaacgccaaccccaacguggacccgaacgccaaccccaacgucgaccccaacgcgaaccccaacguggacccgaacgccaaccccaacgccaaccccaacgccaaccccaacgcgaacccgaacgccaaccccaacgccaaccccaacgccaaccccaacgccaacccgaacgcgaaccccaacgccaaccccaacgccaaccccaacgccaacccgaacgccaaccccaacgcgaaccccaacgccaaccccaacgccaacccgaacgccaaccccaacguggaccccaacgccaaccccaacgcgaacccgaacgccaaccccaacgccaaccccaacgccaacccgaacgccaaccccaacgcgaaccccaacgccaaccccaacgccaacccgaacgccaaccccaacgcgaaccccaacgccaaccccaacgccaacccgaacgccaaccccaacgccaaccccaacgcgaaccccaacgccaacccgaacgccaaccccaacaagaacaaccagggcaacggccaggggcacaacaugcccaacgaccccaaccgcaacgucgacgagaacgccaacgccaacuccgcggugaagaacaacaacaacgaggagccgagcgacaagcacaucaaggaguaccugaacaagauccagaacucccugagcaccgaguggucccccugcagcgugaccugcggcaacgggauccagguccggaucaagcccggcuccgccaacaagcccaaggacgagcucgacuacgccaacgacaucgagaagaagaucugcaagauggagaagugcagcuccguguucaacguggucaacagcuccaucgggcugaucauggugcugagcuuccucuuccugaacugaggacuagucccuguucccagagcccacuuuuuuuucuuuuuuugaaauaaaauagccugucuuucagaucuaaaaaaaaaaaaaaaaaaaaaaaaaaaaaaaaaaaaaaaaaaaaaaaaaaaaaaaaaaaaaaaaugcaucccccccccccccccccccccccccccccccaaaggcucuuuucagagccaccagaauu

SEQ ID NO: 6352 - RNA, 1732 nt, Artificial Sequence
  mRNA Design a-3 (A64-N5-C30-hSL-N5) comprising derived and/or modified sequence from Pf(3D7)__XP_001351122.1__Pf-CSP_L(G4SG4)_TM domain HA (opt1)
aggagagggcgcuuggcuugcaaggacccugagcugcggcauugaagcacacccaacccaacucgacugaagucagccucacugaaccggaucugagaaucuucucucucugggcuugccagggcucuccgaaccuagcuagcauccucuucaauuccaacuagaaagcuuaccaugaugcgcaagcuggccauccucagcguguccagcuuccuguucgucgaggcccuguuccaggaguaccagugcuacggcuccagcuccaacacccgggugcucaacgagcugaacuacgacaacgcggggaccaaccuguacaacgagcucgagaugaacuacuacggcaagcaggagaacugguacagccugaagaagaacucccgcagccugggggagaacgacgacggcaacaacgaggacaacgagaagcuccggaagcccaagcacaagaagcugaagcagccggccgacgggaaccccgaccccaacgccaaccccaacguggacccgaacgccaaccccaacgucgaccccaacgccaaccccaacguggacccgaacgcgaaccccaacgccaaccccaacgccaaccccaacgccaacccgaacgcgaaccccaacgccaaccccaacgccaaccccaacgccaacccgaacgccaaccccaacgcgaaccccaacgccaaccccaacgccaacccgaacgccaaccccaacgccaaccccaacgcgaaccccaacgccaacccgaacgccaaccccaacguggaccccaacgccaaccccaacgccaacccgaacgcgaaccccaacgccaaccccaacgccaacccgaacgccaaccccaacgccaaccccaacgcgaaccccaacgccaacccgaacgccaaccccaacgccaaccccaacgcgaaccccaacgccaacccgaacgccaaccccaacgccaaccccaacgccaaccccaacgcgaacccgaacgccaaccccaacaagaacaaccagggcaacggccaggggcacaacaugcccaacgaccccaaccgcaacgucgacgagaacgccaacgccaacuccgccgugaagaacaacaacaacgaggagccgagcgacaagcacaucaaggaguaccugaacaagauccagaacucccucagcacggaguggucccccugcagcgugaccugcggcaacgggauccagguccggaucaagcccggcuccgcgaacaagcccaaggacgagcuggacuacgccaacgacaucgagaagaagaucugcaagauggagaagugcagcuccguguucaacguggucaacagcuccaucgggcugaucauggugcucagcuuccuguuccugaacggcggcgggggcagcgggggcggcgggaagcucgaguccacccgcaucuaccagauccuggccaucuacagcaccguggccuccagccugguccucguggugucccugggcgccaucagcuucuggaugugcuccaacgggagccugcagugccggaucugcaucugaggacuagucccuguucccagagcccacuuuuuuuucuuuuuuugaaauaaaauagccugucuuucagaucuaaaaaaaaaaaaaaaaaaaaaaaaaaaaaaaaaaaaaaaaaaaaaaaaaaaaaaaaaaaaaaaaugcaucccccccccccccccccccccccccccccccaaaggcucuuuucagagccaccagaauu

SEQ ID NO: 6353 - RNA, 1606 nt, Artificial Sequence
  mRNA Design a-3 (A64-N5-C30-hSL-N5) comprising derived and/or modified sequence from Pf(3D7)__XP_001351122.1__Pf-CSP(199-377)_L(PVTN)_HBsAg (opt1)
aggagagggcgcuuggcuugcaaggacccugagcugcggcauugaagcacacccaacccaacucgacugaagucagccucacugaaccggaucugagaaucuucucucucugggcuugccagggcucuccgaaccuagcuagcauccucuucaauuccaacuagaaagcuuaccauggaccccaacgccaacccgaacgccaaccccaacgcgaaccccaacgccaaccccaacgccaacccgaacgccaaccccaacgccaaccccaacgcgaaccccaacgccaacccgaacgccaaccccaacgccaaccccaacgcgaaccccaacgccaacccgaacgccaaccccaacgccaaccccaacgccaaccccaacgcgaacccgaacgccaaccccaacaagaacaaccagggcaacgggcagggccacaacaugcccaacgaccccaaccgcaacguggacgagaacgccaacgccaacagcgccgucaagaacaacaacaacgaggagccguccgacaagcacaucaaggaguaccugaacaagauccagaacagccucuccaccgaguggagccccugcuccgugaccugcgggaacggcauccaggugcggaucaagcccgggagcgcgaacaagcccaaggacgagcuggacuacgccaacgacaucgagaagaagaucugcaagauggagaagugcuccagcgucccggugacgaacauggagaacaucaccuccggcuuccugggcccccuccuggugcugcaggccggguucuuccuccugacccgcauccugaccaucccccagagccucgacuccugguggacgagccugaacuuccugggcgggucccccgucugccucggccagaacagccaguccccgaccagcaaccacucccccaccagcugcccgcccaucugccccggguaccgguggaugugccugcgccgguucaucaucuuccuguucauccuccugcugugccucaucuuccugcuggugcuccuggacuaccagggcaugcugcccgugugcccccucaucccgggcuccaccacgaccaacaccgggcccugcaagaccugcacgacccccgcccagggcaacagcauguuccccagcugcugcugcaccaagccgaccgacgggaacugcacgugcauccccauccccuccagcugggccuucgcgaaguaccugugggagugggccuccguccgcuucagcuggcugucccuccuggugcccuucgugcagugguucgucggccugagcccgaccguguggcucuccgccaucuggaugaugugguacuggggccccagccuguacuccaucgugagccccuucaucccccugcucccgaucuucuucugccugugggucuacaucugaggacuagucccuguucccagagcccacuuuuuuuucuuuuuuugaaauaaaauagccugucuuucagaucuaaaaaaaaaaaaaaaaaaaaaaaaaaaaaaaaaaaaaaaaaaaaaaaaaaaaaaaaaaaaaaaaugcaucccccccccccccccccccccccccccccccaaaggcucuuuucagagccaccagaauu

SEQ ID NO: 6354 - RNA, 1648 nt, Artificial Sequence
  mRNA Design a-3 (A64-N5-C30-hSL-N5) comprising derived and/or modified sequence from Pf(3D7)__XP_001351122.1__Pf-CSP(199-387)_L(PVTN)_HBsAg (opt1)
aggagagggcgcuuggcuugcaaggacccugagcugcggcauugaagcacacccaacccaacucgacugaagucagccucacugaaccggaucugagaaucuucucucucugggcuugccagggcucuccgaaccuagcuagcauccucuucaauuccaacuagaaagcuuaccaugauggcccccgacccgaacgccaaccccaacgcgaaccccaacgccaaccccaacgccaacccgaacgccaaccccaacgccaaccccaacgcgaaccccaacgccaacccgaacgccaaccccaacgccaaccccaacgcgaaccccaacgccaacccgaacgccaaccccaacgccaaccccaacgccaaccccaacgcgaacccgaacgccaaccccaacgccaaccccaacaagaacaaccagggcaacgggcagggccacaacaugcccaacgacccgaaccgcaacguggacgagaacgccaacgccaacagcgcggucaagaacaacaacaacgaggagcccuccgacaagcacaucaaggaguaccugaacaagauccagaacagccucuccaccgaguggagccccugcuccgugaccugcgggaacggcauccaggugcggaucaagcccgggagcgccaacaagccgaaggacgagcuggacuacgccaacgacaucgagaagaagaucugcaagauggagaagugcuccagcgucuucaacguggugaacuccagcaucggccugggccccgucacgaacauggagaacaucaccuccggguuccucggcccccugcuggugcuccaggccggguucuuccugcugacccgcauccucaccaucccccagagccuggacuccugguggacgagccugaacuuccucggcggguccccggugugccugggccagaacagccagucccccaccagcaaccacucccccaccagcugcccgcccaucugccccggcuaccgguggaugugccugcgccgguucaucaucuuccucuucauccugcugcucugccugaucuuccugcucguccugcuggacuaccaggggaugcuccccgugugcccgcugauccccggcagcaccacgaccaacaccgggcccugcaagaccugcacgacccccgcccagggcaacuccauguucccgagcugcugcugcaccaagcccaccgacggcaacugcacgugcauccccauccccuccagcugggcguucgccaaguaccugugggagugggccuccgugcgcuucagcuggcucucccugcuggucccguucgugcagugguucguggggcucagccccaccgucuggcuguccgccaucuggaugaugugguacuggggccccagccuguacuccaucgugagccccuucaucccgcuccugcccaucuucuucugccuguggguguacaucugaggacuagucccuguucccagagcccacuuuuuuuucuuuuuuugaaauaaaauagccugucuuucagaucuaaaaaaaaaaaaaaaaaaaaaaaaaaaaaaaaaaaaaaaaaaaaaaaaaaaaaaaaaaaaaaaaugcaucccccccccccccccccccccccccccccccaaaggcucuuuucagagccaccagaauu

SEQ ID NO: 6355 - RNA, 832 nt, Artificial Sequence
  mRNA Design a-3 (A64-N5-C30-hSL-N5) comprising derived and/or modified sequence from Pf(3D7)__XP_001351122.1__HsALB_Pf-CSP(19-152) (opt1)
aggagagggcgcuuggcuugcaaggacccugagcugcggcauugaagcacacccaacccaacucgacugaagucagccucacugaaccggaucugagaaucuucucucucugggcuugccagggcucuccgaaccuagcuagcauccucuucaauuccaacuagaaagcuuaccaugaagugggugaccuucaucagccuccuguuccuguucuccagcgccuacucccuguuccaggaguaccagugcuacggcagcuccagcaacacccgcguccucaacgagcugaacuacgacaacgccgggacgaaccuguacaacgagcucgagaugaacuacuacggcaagcaggagaacugguacucccugaagaagaacagccggucccugggggagaacgacgacggcaacaacgaggacaacgagaagcuccgcaagcccaagcacaagaagcugaagcagccggcggacgggaaccccgaccccaacgccaaccccaacguggacccgaacgccaaccccaacguggaccccaacgccaaccccaacgucgacccgaacgccaaccccaacgcgaaccccaacgccaaccccaacgccaacccgaacgccaaccccaacgcgaaccccugaggacuagucccuguucccagagcccacuuuuuuuucuuuuuuugaaauaaaauagccugucuuucagaucuaaaaaaaaaaaaaaaaaaaaaaaaaaaaaaaaaaaaaaaaaaaaaaaaaaaaaaaaaaaaaaaaugcaucccccccccccccccccccccccccccccccaaaggcucuuuucagagccaccagaauu

SEQ ID NO: 6356 - RNA, 952 nt, Artificial Sequence
  mRNA Design a-3 (A64-N5-C30-hSL-N5) comprising derived and/or modified sequence from Pf(3D7)__XP_001351122.1__HsALB_Pf-CSP(19-192) (opt1)
aggagagggcgcuuggcuugcaaggacccugagcugcggcauugaagcacacccaacccaacucgacugaagucagccucacugaaccggaucugagaaucuucucucucugggcuugccagggcucuccgaaccuagcuagcauccucuucaauuccaacuagaaagcuuaccaugaagugggugaccuucaucagccuccuguuccuguucuccagcgccuacucccuguuccaggaguaccagugcuacggcagcuccagcaacacccgcguccucaacgagcugaacuacgacaacgccgggacgaaccuguacaacgagcucgagaugaacuacuacggcaagcaggagaacugguacucccugaagaagaacagccggucccugggggagaacgacgacggcaacaacgaggacaacgagaagcuccgcaagcccaagcacaagaagcugaagcagccggcggacgggaaccccgaccccaacgccaaccccaacguggacccgaacgccaaccccaacguggaccccaacgccaaccccaacgucgacccgaacgccaaccccaacgcgaaccccaacgccaaccccaacgccaacccgaacgccaaccccaacgcgaaccccaacgccaaccccaacgccaacccgaacgccaaccccaacgccaaccccaacgcgaaccccaacgccaacccgaacgccaaccccaacgccaaccccaacgccaaccccaacgcgaacccgugaggacuagucccuguucccagagcccacuuuuuuuucuuuuuuugaaauaaaauagccugucuuucagaucuaaaaaaaaaaaaaaaaaaaaaaaaaaaaaaaaaaaaaaaaaaaaaaaaaaaaaaaaaaaaaaaaugcaucccccccccccccccccccccccccccccccaaaggcucuuuucagagccaccagaauu

SEQ ID NO: 6357 - RNA, 1192 nt, Artificial Sequence
  mRNA Design a-3 (A64-N5-C30-hSL-N5) comprising derived and/or modified sequence from Pf(3D7)__XP_001351122.1__HsALB_Pf-CSP(19-272) (opt1)
aggagagggcgcuuggcuugcaaggacccugagcugcggcauugaagcacacccaacccaacucgacugaagucagccucacugaaccggaucugagaaucuucucucucugggcuugccagggcucuccgaaccuagcuagcauccucuucaauuccaacuagaaagcuuaccaugaagugggugaccuucaucagccuccuguuccuguucuccagcgccuacucccuguuccaggaguaccagugcuacggcagcuccagcaacacccgcguccucaacgagcugaacuacgacaacgccgggacgaaccuguacaacgagcucgagaugaacuacuacggcaagcaggagaacugguacucccugaagaagaacagccggucccugggggagaacgacgacggcaacaacgaggacaacgagaagcuccgcaagcccaagcacaagaagcugaagcagccggcggacgggaaccccgaccccaacgccaaccccaacguggacccgaacgccaaccccaacguggaccccaacgccaaccccaacgucgacccgaacgccaaccccaacgcgaaccccaacgccaaccccaacgccaacccgaacgccaaccccaacgcgaaccccaacgccaaccccaacgccaacccgaacgccaaccccaacgccaaccccaacgcgaaccccaacgccaacccgaacgccaaccccaacgccaaccccaacgccaaccccaacgcgaacccgaacgccaaccccaacguggaccccaacgccaaccccaacgccaacccgaacgccaaccccaacgcgaaccccaacgccaacccgaacgccaaccccaacgccaaccccaacgccaaccccaacgcgaacccgaacgccaaccccaacgccaaccccaacgccaaccccaacgcgaacccgaacgccaaccccaacgccaaccccaacgccaaccccaacgccaacccgaacgcgaaccccugaggacuagucccuguucccagagcccacuuuuuuuucuuuuuuugaaauaaaauagccugucuuucagaucuaaaaaaaaaaaaaaaaaaaaaaaaaaaaaaaaaaaaaaaaaaaaaaaaaaaaaaaaaaaaaaaaugcaucccccccccccccccccccccccccccccccaaaggcucuuuucagagccaccagaauu

SEQ ID NO: 6358 - RNA, 1354 nt, Artificial Sequence
  mRNA Design a-3 (A64-N5-C30-hSL-N5) comprising derived and/or modified sequence from Pf(3D7)__XP_001351122.1__HsALB_Pf-CSP(19-272)_L(AAY)_Pf-CSP(310-3 27)_L(AAY)_Pf-CSP(346-375) (opt1)
aggagagggcgcuuggcuugcaaggacccugagcugcggcauugaagcacacccaacccaacucgacugaagucagccucacugaaccggaucugagaaucuucucucucugggcuugccagggcucuccgaaccuagcuagcauccucuucaauuccaacuagaaagcuuaccaugaagugggugaccuucaucagccuccuguuccuguucuccagcgccuacucccuguuccaggaguaccagugcuacggcagcuccagcaacacccgcguccucaacgagcugaacuacgacaacgccgggacgaaccuguacaacgagcucgagaugaacuacuacggcaagcaggagaacugguacucccugaagaagaacagccggucccugggggagaacgacgacggcaacaacgaggacaacgagaagcuccgcaagcccaagcacaagaagcugaagcagccggcggacgggaaccccgaccccaacgccaaccccaacguggacccgaacgccaaccccaacguggaccccaacgccaaccccaacgucgacccgaacgccaaccccaacgcgaaccccaacgccaaccccaacgccaacccgaacgccaaccccaacgcgaaccccaacgccaaccccaacgccaacccgaacgccaaccccaacgccaaccccaacgcgaaccccaacgccaacccgaacgccaaccccaacgccaaccccaacgccaaccccaacgcgaacccgaacgccaaccccaacguggaccccaacgccaaccccaacgccaacccgaacgccaaccccaacgcgaaccccaacgccaacccgaacgccaaccccaacgccaaccccaacgccaaccccaacgcgaacccgaacgccaaccccaacgccaaccccaacgccaaccccaacgcgaacccgaacgccaaccccaacgccaaccccaacgccaaccccaacgccaacccgaacgcgaaccccgccgccuacgagcccagcgacaagcacaucaaggaguaccugaacaagauccagaacucccucgccgccuacaucaagcccggcagcgcgaacaagccgaaggacgagcuggacuacgccaacgacaucgagaagaagaucugcaagauggagaagugcuccugaggacuagucccuguucccagagcccacuuuuuuuucuuuuuuugaaauaaaauagccugucuuucagaucuaaaaaaaaaaaaaaaaaaaaaaaaaaaaaaaaaaaaaaaaaaaaaaaaaaaaaaaaaaaaaaaaugcaucccccccccccccccccccccccccccccccaaaggcucuuuucagagccaccagaauu

SEQ ID NO: 6359 - RNA, 1315 nt, Artificial Sequence
  mRNA Design a-3 (A64-N5-C30-hSL-N5) comprising derived and/or modified sequence from Pf(3D7)__XP_001351122.1__HsALB_Pf-CSP(19-272)_L(AAY)_Pf-CSP(346-3 65)_L(AAY)_P2 (opt1)
aggagagggcgcuuggcuugcaaggacccugagcugcggcauugaagcacacccaacccaacucgacugaagucagccucacugaaccggaucugagaaucuucucucucugggcuugccagggcucuccgaaccuagcuagcauccucuucaauuccaacuagaaagcuuaccaugaagugggugaccuucaucagccuccuguuccuguucuccagcgccuacucccuguuccaggaguaccagugcuacggcagcuccagcaacacccgcguccucaacgagcugaacuacgacaacgccgggacgaaccuguacaacgagcucgagaugaacuacuacggcaagcaggagaacugguacucccugaagaagaacagccggucccugggggagaacgacgacggcaacaacgaggacaacgagaagcuccgcaagcccaagcacaagaagcugaagcagccggcggacgggaaccccgaccccaacgccaaccccaacguggacccgaacgccaaccccaacguggaccccaacgccaaccccaacgucgacccgaacgccaaccccaacgcgaaccccaacgccaaccccaacgccaacccgaacgccaaccccaacgcgaaccccaacgccaaccccaacgccaacccgaacgccaaccccaacgccaaccccaacgcgaaccccaacgccaacccgaacgccaaccccaacgccaaccccaacgccaaccccaacgcgaacccgaacgccaaccccaacguggaccccaacgccaaccccaacgccaacccgaacgccaaccccaacgcgaaccccaacgccaacccgaacgccaaccccaacgccaaccccaacgccaaccccaacgcgaacccgaacgccaaccccaacgccaaccccaacgccaaccccaacgcgaacccgaacgccaaccccaacgccaaccccaacgccaaccccaacgccaacccgaacgcgaaccccgccgccuacaucaagcccggcagcgccaacaagcccaaggacgagcuggacuacgccaacgacaucgaggcggccuaccaguacaucaaggccaacuccaaguucaucggcaucaccgagcucugaggacuagucccuguucccagagcccacuuuuuuuucuuuuuuugaaauaaaauagccugucuuucagaucuaaaaaaaaaaaaaaaaaaaaaaaaaaaaaaaaaaaaaaaaaaaaaaaaaaaaaaaaaaaaaaaaugcaucccccccccccccccccccccccccccccccaaaggcucuuuucagagccaccagaauu

SEQ ID NO: 6360 - RNA, 1309 nt, Artificial Sequence
  mRNA Design a-3 (A64-N5-C30-hSL-N5) comprising derived and/or modified sequence from Pf(3D7)__XP_001351122.1__HsALB_Pf-CSP(19-272)_L(AAY)_Pf-CSP(346-3 65)_L(AAY)_PADRE (opt1)
aggagagggcgcuuggcuugcaaggacccugagcugcggcauugaagcacacccaacccaacucgacugaagucagccucacugaaccggaucugagaaucuucucucucugggcuugccagggcucuccgaaccuagcuagcauccucuucaauuccaacuagaaagcuuaccaugaagugggugaccuucaucagccuccuguuccuguucuccagcgccuacucccuguuccaggaguaccagugcuacggcagcuccagcaacacccgcguccucaacgagcugaacuacgacaacgccgggacgaaccuguacaacgagcucgagaugaacuacuacggcaagcaggagaacugguacucccugaagaagaacagccggucccugggggagaacgacgacggcaacaacgaggacaacgagaagcuccgcaagcccaagcacaagaagcugaagcagccggcggacgggaaccccgaccccaacgccaaccccaacguggacccgaacgccaaccccaacguggaccccaacgccaaccccaacgucgacccgaacgccaaccccaacgcgaaccccaacgccaaccccaacgccaacccgaacgccaaccccaacgcgaaccccaacgccaaccccaacgccaacccgaacgccaaccccaacgccaaccccaacgcgaaccccaacgccaacccgaacgccaaccccaacgccaaccccaacgccaaccccaacgcgaacccgaacgccaaccccaacguggaccccaacgccaaccccaacgccaacccgaacgccaaccccaacgcgaaccccaacgccaacccgaacgccaaccccaacgccaaccccaacgccaaccccaacgcgaacccgaacgccaaccccaacgccaaccccaacgccaaccccaacgcgaacccgaacgccaaccccaacgccaaccccaacgccaaccccaacgccaacccgaacgcgaaccccgccgccuacaucaagcccggcagcgccaacaagcccaaggacgagcuggacuacgccaacgacaucgaggcggccuacgccaaguucguggccgccuggacccucaaggcggccgccugaggacuagucccuguucccagagcccacuuuuuuuucuuuuuuugaaauaaaauagccugucuuucagaucuaaaaaaaaaaaaaaaaaaaaaaaaaaaaaaaaaaaaaaaaaaaaaaaaaaaaaaaaaaaaaaaaugcaucccccccccccccccccccccccccccccccaaaggcucuuuucagagccaccagaauu

SEQ ID NO: 6361 - RNA, 1366 nt, Artificial Sequence
  mRNA Design a-3 (A64-N5-C30-hSL-N5) comprising derived and/or modified sequence from Pf(3D7)__XP_001351122.1__HsALB_Pf-CSP(19-272)_L(G4S)_Pf-CSP(310-3 27)_L(G4S)_Pf-CSP(346-375) (opt1)
aggagagggcgcuuggcuugcaaggacccugagcugcggcauugaagcacacccaacccaacucgacugaagucagccucacugaaccggaucugagaaucuucucucucugggcuugccagggcucuccgaaccuagcuagcauccucuucaauuccaacuagaaagcuuaccaugaagugggugaccuucaucagccuccuguuccuguucuccagcgccuacucccuguuccaggaguaccagugcuacggcagcuccagcaacacccgcguccucaacgagcugaacuacgacaacgccgggacgaaccuguacaacgagcucgagaugaacuacuacggcaagcaggagaacugguacucccugaagaagaacagccggucccugggggagaacgacgacggcaacaacgaggacaacgagaagcuccgcaagcccaagcacaagaagcugaagcagccggcggacgggaaccccgaccccaacgccaaccccaacguggacccgaacgccaaccccaacguggaccccaacgccaaccccaacgucgacccgaacgccaaccccaacgcgaaccccaacgccaaccccaacgccaacccgaacgccaaccccaacgcgaaccccaacgccaaccccaacgccaacccgaacgccaaccccaacgccaaccccaacgcgaaccccaacgccaacccgaacgccaaccccaacgccaaccccaacgccaaccccaacgcgaacccgaacgccaaccccaacguggaccccaacgccaaccccaacgccaacccgaacgccaaccccaacgcgaaccccaacgccaacccgaacgccaaccccaacgccaaccccaacgccaaccccaacgcgaacccgaacgccaaccccaacgccaaccccaacgccaaccccaacgcgaacccgaacgccaaccccaacgccaaccccaacgccaaccccaacgccaacccgaacgcgaaccccggcggcgggggcagcgagcccuccgacaagcacaucaaggaguaccugaacaagauccagaacagccucgggggcgggggcuccaucaagcccggcagcgccaacaagccgaaggacgagcuggacuacgccaacgacaucgagaagaagaucugcaagauggagaagugcuccugaggacuagucccuguucccagagcccacuuuuuuuucuuuuuuugaaauaaaauagccugucuuucagaucuaaaaaaaaaaaaaaaaaaaaaaaaaaaaaaaaaaaaaaaaaaaaaaaaaaaaaaaaaaaaaaaaugcaucccccccccccccccccccccccccccccccaaaggcucuuuucagagccaccagaauu

SEQ ID NO: 6362 - RNA, 1351 nt, Artificial Sequence
  mRNA Design a-3 (A64-N5-C30-hSL-N5) comprising derived and/or modified sequence from Pf(3D7)__XP_001351122.1__HsALB_Pf-CSP(19-272)_L(G4S)_Pf-CSP(310-3 27)_Pf-CSP(346-375) (opt1)
aggagagggcgcuuggcuugcaaggacccugagcugcggcauugaagcacacccaacccaacucgacugaagucagccucacugaaccggaucugagaaucuucucucucugggcuugccagggcucuccgaaccuagcuagcauccucuucaauuccaacuagaaagcuuaccaugaagugggugaccuucaucagccuccuguuccuguucuccagcgccuacucccuguuccaggaguaccagugcuacggcagcuccagcaacacccgcguccucaacgagcugaacuacgacaacgccgggacgaaccuguacaacgagcucgagaugaacuacuacggcaagcaggagaacugguacucccugaagaagaacagccggucccugggggagaacgacgacggcaacaacgaggacaacgagaagcuccgcaagcccaagcacaagaagcugaagcagccggcggacgggaaccccgaccccaacgccaaccccaacguggacccgaacgccaaccccaacguggaccccaacgccaaccccaacgucgacccgaacgccaaccccaacgcgaaccccaacgccaaccccaacgccaacccgaacgccaaccccaacgcgaaccccaacgccaaccccaacgccaacccgaacgccaaccccaacgccaaccccaacgcgaaccccaacgccaacccgaacgccaaccccaacgccaaccccaacgccaaccccaacgcgaacccgaacgccaaccccaacguggaccccaacgccaaccccaacgccaacccgaacgccaaccccaacgcgaaccccaacgccaacccgaacgccaaccccaacgccaaccccaacgccaaccccaacgcgaacccgaacgccaaccccaacgccaaccccaacgccaaccccaacgcgaacccgaacgccaaccccaacgccaaccccaacgccaaccccaacgccaacccgaacgcgaaccccggcggcgggggcagcgagcccuccgacaagcacaucaaggaguaccugaacaagauccagaacagccucaucaagcccggguccgccaacaagccgaaggacgagcuggacuacgccaacgacaucgagaagaagaucugcaagauggagaagugcagcugaggacuagucccuguucccagagcccacuuuuuuuucuuuuuuugaaauaaaauagccugucuuucagaucuaaaaaaaaaaaaaaaaaaaaaaaaaaaaaaaaaaaaaaaaaaaaaaaaaaaaaaaaaaaaaaaaugcaucccccccccccccccccccccccccccccccaaaggcucuuuucagagccaccagaauu

SEQ ID NO: 6363 - RNA, 1351 nt, Artificial Sequence
  mRNA Design a-3 (A64-N5-C30-hSL-N5) comprising derived and/or modified sequence from Pf(3D7)__XP_001351122.1__HsALB_Pf-CSP(19-325) (opt1)
aggagagggcgcuuggcuugcaaggacccugagcugcggcauugaagcacacccaacccaacucgacugaagucagccucacugaaccggaucugagaaucuucucucucugggcuugccagggcucuccgaaccuagcuagcauccucuucaauuccaacuagaaagcuuaccaugaagugggugaccuucaucagccuccuguuccuguucuccagcgccuacucccuguuccaggaguaccagugcuacggcagcuccagcaacacccgcguccucaacgagcugaacuacgacaacgccgggacgaaccuguacaacgagcucgagaugaacuacuacggcaagcaggagaacugguacucccugaagaagaacagccggucccugggggagaacgacgacggcaacaacgaggacaacgagaagcuccgcaagcccaagcacaagaagcugaagcagccggcggacgggaaccccgaccccaacgccaaccccaacguggacccgaacgccaaccccaacguggaccccaacgccaaccccaacgucgacccgaacgccaaccccaacgcgaaccccaacgccaaccccaacgccaacccgaacgccaaccccaacgcgaaccccaacgccaaccccaacgccaacccgaacgccaaccccaacgccaaccccaacgcgaaccccaacgccaacccgaacgccaaccccaacgccaaccccaacgccaaccccaacgcgaacccgaacgccaaccccaacguggaccccaacgccaaccccaacgccaacccgaacgccaaccccaacgcgaaccccaacgccaacccgaacgccaaccccaacgccaaccccaacgccaaccccaacgcgaacccgaacgccaaccccaacgccaaccccaacgccaaccccaacgcgaacccgaacgccaaccccaacgccaaccccaacgccaaccccaacgccaacccgaacgcgaaccccaacaagaacaaccagggcaacggccaggggcacaacaugcccaacgaccccaaccggaacguggacgagaacgccaacgccaacagcgccgucaagaacaacaacaacgaggagccguccgacaagcacaucaaggaguaccugaacaagauccagaacugaggacuagucccuguucccagagcccacuuuuuuuucuuuuuuugaaauaaaauagccugucuuucagaucuaaaaaaaaaaaaaaaaaaaaaaaaaaaaaaaaaaaaaaaaaaaaaaaaaaaaaaaaaaaaaaaaugcaucccccccccccccccccccccccccccccccaaaggcucuuuucagagccaccagaauu

SEQ ID NO: 6364 - RNA, 1528 nt, Artificial Sequence
  mRNA Design a-3 (A64-N5-C30-hSL-N5) comprising derived and/or modified sequence from Pf(3D7)__XP_001351122.1__HsALB_Pf-CSP(19-384) (opt1)
aggagagggcgcuuggcuugcaaggacccugagcugcggcauugaagcacacccaacccaacucgacugaagucagccucacugaaccggaucugagaaucuucucucucugggcuugccagggcucuccgaaccuagcuagcauccucuucaauuccaacuagaaagcuuaccaugaagugggugaccuucaucagccuccuguuccuguucuccagcgccuacucccuguuccaggaguaccagugcuacggcagcuccagcaacacccgcguccucaacgagcugaacuacgacaacgccgggacgaaccuguacaacgagcucgagaugaacuacuacggcaagcaggagaacugguacucccugaagaagaacagccggucccugggggagaacgacgacggcaacaacgaggacaacgagaagcuccgcaagcccaagcacaagaagcugaagcagccggcggacgggaaccccgaccccaacgccaaccccaacguggacccgaacgccaaccccaacguggaccccaacgccaaccccaacgucgacccgaacgccaaccccaacgcgaaccccaacgccaaccccaacgccaacccgaacgccaaccccaacgcgaaccccaacgccaaccccaacgccaacccgaacgccaaccccaacgccaaccccaacgcgaaccccaacgccaacccgaacgccaaccccaacgccaaccccaacgccaaccccaacgcgaacccgaacgccaaccccaacguggaccccaacgccaaccccaacgccaacccgaacgccaaccccaacgcgaaccccaacgccaacccgaacgccaaccccaacgccaaccccaacgccaaccccaacgcgaacccgaacgccaaccccaacgccaaccccaacgccaaccccaacgcgaacccgaacgccaaccccaacgccaaccccaacgccaaccccaacgccaacccgaacgcgaaccccaacaagaacaaccagggcaacggccaggggcacaacaugcccaacgaccccaaccggaacguggacgagaacgccaacgccaacagcgccgucaagaacaacaacaacgaggagccguccgacaagcacaucaaggaguaccugaacaagauccagaacagccucuccaccgaguggagccccugcuccgugaccugcggcaacgggauccaggugcgcaucaagcccggcagcgccaacaagcccaaggacgagcuggacuacgcgaacgacaucgagaagaagaucugcaagauggagaagugcuccagcgucuucaacguggugaacuccagcugaggacuagucccuguucccagagcccacuuuuuuuucuuuuuuugaaauaaaauagccugucuuucagaucuaaaaaaaaaaaaaaaaaaaaaaaaaaaaaaaaaaaaaaaaaaaaaaaaaaaaaaaaaaaaaaaaugcaucccccccccccccccccccccccccccccccaaaggcucuuuucagagccaccagaauu

SEQ ID NO: 6365 - RNA, 1666 nt, Artificial Sequence
  mRNA Design a-3 (A64-N5-C30-hSL-N5) comprising derived and/or modified sequence from Pf(3D7)__XP_001351122.1__HsALB_Pf-CSP(19-384)_TM domain HA (opt1)
aggagagggcgcuuggcuugcaaggacccugagcugcggcauugaagcacacccaacccaacucgacugaagucagccucacugaaccggaucugagaaucuucucucucugggcuugccagggcucuccgaaccuagcuagcauccucuucaauuccaacuagaaagcuuaccaugaagugggugaccuucaucagccuccuguuccuguucuccagcgccuacucccuguuccaggaguaccagugcuacggcagcuccagcaacacccgcguccucaacgagcugaacuacgacaacgccgggacgaaccuguacaacgagcucgagaugaacuacuacggcaagcaggagaacugguacucccugaagaagaacagccggucccugggggagaacgacgacggcaacaacgaggacaacgagaagcuccgcaagcccaagcacaagaagcugaagcagccggcggacgggaaccccgaccccaacgccaaccccaacguggacccgaacgccaaccccaacguggaccccaacgccaaccccaacgucgacccgaacgccaaccccaacgcgaaccccaacgccaaccccaacgccaacccgaacgccaaccccaacgcgaaccccaacgccaaccccaacgccaacccgaacgccaaccccaacgccaaccccaacgcgaaccccaacgccaacccgaacgccaaccccaacgccaaccccaacgccaaccccaacgcgaacccgaacgccaaccccaacguggaccccaacgccaaccccaacgccaacccgaacgccaaccccaacgcgaaccccaacgccaacccgaacgccaaccccaacgccaaccccaacgccaaccccaacgcgaacccgaacgccaaccccaacgccaaccccaacgccaaccccaacgcgaacccgaacgccaaccccaacgccaaccccaacgccaaccccaacgccaacccgaacgcgaaccccaacaagaacaaccagggcaacggccaggggcacaacaugcccaacgaccccaaccggaacguggacgagaacgccaacgccaacagcgccgucaagaacaacaacaacgaggagccguccgacaagcacaucaaggaguaccugaacaagauccagaacagccucuccaccgaguggagccccugcuccgugaccugcggcaacgggauccaggugcgcaucaagcccggcagcgccaacaagcccaaggacgagcuggacuacgcgaacgacaucgagaagaagaucugcaagauggagaagugcuccagcgucuucaacguggugaacuccagcaagcuggagagcacccggaucuaccagauccucgccaucuacuccacggucgccagcucccuggugcugguggucagccucggggccaucuccuucuggaugugcagcaacggcucccugcagugccgcaucugcaucugaggacuagucccuguucccagagcccacuuuuuuuucuuuuuuugaaauaaaauagccugucuuucagaucuaaaaaaaaaaaaaaaaaaaaaaaaaaaaaaaaaaaaaaaaaaaaaaaaaaaaaaaaaaaaaaaaugcaucccccccccccccccccccccccccccccccaaaggcucuuuucagagccaccagaauu

SEQ ID NO: 6366 - RNA, 1378 nt, Artificial Sequence
  mRNA Design a-3 (A64-N5-C30-hSL-N5) comprising derived and/or modified sequence from Pf(3D7)__XP_001351122.1__HsALB_Pf-CSP(82-397) (opt1)
aggagagggcgcuuggcuugcaaggacccugagcugcggcauugaagcacacccaacccaacucgacugaagucagccucacugaaccggaucugagaaucuucucucucugggcuugccagggcucuccgaaccuagcuagcauccucuucaauuccaacuagaaagcuuaccaugaagugggugaccuucaucagccuccuguuccuguucuccagcgccuacuccgacaacgagaagcugcgcaagcccaagcacaagaagcucaagcagccggccgacggcaaccccgaccccaacgcgaaccccaacgucgacccgaacgccaaccccaacguggaccccaacgccaaccccaacguggacccgaacgccaaccccaacgccaaccccaacgcgaaccccaacgccaacccgaacgccaaccccaacgccaaccccaacgcgaaccccaacgccaacccgaacgccaaccccaacgccaaccccaacgccaaccccaacgcgaacccgaacgccaaccccaacgccaaccccaacgccaaccccaacgccaacccgaacgcgaaccccaacgucgaccccaacgccaaccccaacgccaacccgaacgccaaccccaacgccaaccccaacgcgaacccgaacgccaaccccaacgccaaccccaacgccaaccccaacgccaacccgaacgcgaaccccaacgccaaccccaacgccaaccccaacgccaacccgaacgcgaaccccaacgccaaccccaacgccaaccccaacgccaacccgaacgccaaccccaacaagaacaaccaggggaacggccaggggcacaacaugcccaacgaccccaaccggaacguggacgagaacgcgaacgccaacagcgccgugaagaacaacaacaacgaggagccguccgacaagcacaucaaggaguaccugaacaagauccagaacagccuguccaccgaguggagccccugcuccgucacgugcggcaacgggauccaggugcgcaucaagcccggcagcgccaacaagcccaaggacgagcucgacuacgccaacgacaucgagaagaagaucugcaagauggagaagugcuccagcguguucaacgucgugaacuccagcaucggccugaucauggugcuguccuuccucuuccugaacugaggacuagucccuguucccagagcccacuuuuuuuucuuuuuuugaaauaaaauagccugucuuucagaucuaaaaaaaaaaaaaaaaaaaaaaaaaaaaaaaaaaaaaaaaaaaaaaaaaaaaaaaaaaaaaaaaugcaucccccccccccccccccccccccccccccccaaaggcucuuuucagagccaccagaauu

SEQ ID NO: 6367 - RNA, 730 nt, Artificial Sequence
  mRNA Design a-3 (A64-N5-C30-hSL-N5) comprising derived and/or modified sequence from Pf(3D7)__XP_001351122.1__HsALB_Pf-CSP(93-192) (opt1)
aggagagggcgcuuggcuugcaaggacccugagcugcggcauugaagcacacccaacccaacucgacugaagucagccucacugaaccggaucugagaaucuucucucucugggcuugccagggcucuccgaaccuagcuagcauccucuucaauuccaacuagaaagcuuaccaugaagugggugaccuucaucagccuccuguuccuguucuccagcgccuacuccaagcugaagcagcccgccgacggcaacccggaccccaacgcgaaccccaacgucgaccccaacgccaacccgaacguggaccccaacgccaaccccaacguggaccccaacgccaacccgaacgccaaccccaacgcgaaccccaacgccaaccccaacgccaacccgaacgccaaccccaacgcgaaccccaacgccaaccccaacgccaacccgaacgccaaccccaacgccaaccccaacgcgaaccccaacgccaacccgaacgccaaccccaacgccaaccccaacgccaaccccugaggacuagucccuguucccagagcccacuuuuuuuucuuuuuuugaaauaaaauagccugucuuucagaucuaaaaaaaaaaaaaaaaaaaaaaaaaaaaaaaaaaaaaaaaaaaaaaaaaaaaaaaaaaaaaaaaugcaucccccccccccccccccccccccccccccccaaaggcucuuuucagagccaccagaauu

SEQ ID NO: 6368 - RNA, 970 nt, Artificial Sequence
  mRNA Design a-3 (A64-N5-C30-hSL-N5) comprising derived and/or modified sequence from Pf(3D7)__XP_001351122.1__HsALB_Pf-CSP(93-272) (opt1)
aggagagggcgcuuggcuugcaaggacccugagcugcggcauugaagcacacccaacccaacucgacugaagucagccucacugaaccggaucugagaaucuucucucucugggcuugccagggcucuccgaaccuagcuagcauccucuucaauuccaacuagaaagcuuaccaugaagugggugaccuucaucagccuccuguuccuguucuccagcgccuacuccaagcugaagcagcccgccgacggcaacccggaccccaacgcgaaccccaacgucgaccccaacgccaacccgaacguggaccccaacgccaaccccaacguggaccccaacgccaacccgaacgccaaccccaacgcgaaccccaacgccaaccccaacgccaacccgaacgccaaccccaacgcgaaccccaacgccaaccccaacgccaacccgaacgccaaccccaacgccaaccccaacgcgaaccccaacgccaacccgaacgccaaccccaacgccaaccccaacgccaaccccaacgcgaacccgaacgucgaccccaacgccaaccccaacgccaaccccaacgccaacccgaacgccaaccccaacgcgaaccccaacgccaacccgaacgccaaccccaacgccaaccccaacgccaaccccaacgcgaacccgaacgccaaccccaacgccaaccccaacgccaaccccaacgcgaacccgaacgccaaccccaacgccaaccccaacgccaaccccaacgccaacccgugaggacuagucccuguucccagagcccacuuuuuuuucuuuuuuugaaauaaaauagccugucuuucagaucuaaaaaaaaaaaaaaaaaaaaaaaaaaaaaaaaaaaaaaaaaaaaaaaaaaaaaaaaaaaaaaaaugcaucccccccccccccccccccccccccccccccaaaggcucuuuucagagccaccagaauu

SEQ ID NO: 6369 - RNA, 1345 nt, Artificial Sequence
  mRNA Design a-3 (A64-N5-C30-hSL-N5) comprising derived and/or modified sequence from Pf(3D7)__XP_001351122.1__HsALB_Pf-CSP(93-397) (opt1)
aggagagggcgcuuggcuugcaaggacccugagcugcggcauugaagcacacccaacccaacucgacugaagucagccucacugaaccggaucugagaaucuucucucucugggcuugccagggcucuccgaaccuagcuagcauccucuucaauuccaacuagaaagcuuaccaugaagugggugaccuucaucagccuccuguuccuguucuccagcgccuacuccaagcugaagcagcccgccgacggcaacccggaccccaacgcgaaccccaacgucgaccccaacgccaacccgaacguggaccccaacgccaaccccaacguggaccccaacgccaacccgaacgccaaccccaacgcgaaccccaacgccaaccccaacgccaacccgaacgccaaccccaacgcgaaccccaacgccaaccccaacgccaacccgaacgccaaccccaacgccaaccccaacgcgaaccccaacgccaacccgaacgccaaccccaacgccaaccccaacgccaaccccaacgcgaacccgaacgucgaccccaacgccaaccccaacgccaaccccaacgccaacccgaacgccaaccccaacgcgaaccccaacgccaacccgaacgccaaccccaacgccaaccccaacgccaaccccaacgcgaacccgaacgccaaccccaacgccaaccccaacgccaaccccaacgcgaacccgaacgccaaccccaacgccaaccccaacgccaaccccaacgccaacccgaacaagaacaaccaggggaacggccaggggcacaacaugcccaacgaccccaaccgcaacguggacgagaacgcgaacgccaacagcgccgugaagaacaacaacaacgaggagcccuccgacaagcacaucaaggaguaccucaacaagauccagaacagccuguccaccgaguggagcccgugcuccgucacgugcggcaacgggauccaggugcggaucaagcccggcagcgccaacaagcccaaggacgagcuggacuacgccaacgacaucgagaagaagaucugcaagauggagaagugcuccagcguguucaacgucgugaacuccagcaucggccucaucauggugcuguccuuccuguuccucaacugaggacuagucccuguucccagagcccacuuuuuuuucuuuuuuugaaauaaaauagccugucuuucagaucuaaaaaaaaaaaaaaaaaaaaaaaaaaaaaaaaaaaaaaaaaaaaaaaaaaaaaaaaaaaaaaaaugcaucccccccccccccccccccccccccccccccaaaggcucuuuucagagccaccagaauu

SEQ ID NO: 6370 - RNA, 715 nt, Artificial Sequence
  mRNA Design a-3 (A64-N5-C30-hSL-N5) comprising derived and/or modified sequence from Pf(3D7)__XP_001351122.1__HsALB_Pf-CSP(98-192) (opt1)
aggagagggcgcuuggcuugcaaggacccugagcugcggcauugaagcacacccaacccaacucgacugaagucagccucacugaaccggaucugagaaucuucucucucugggcuugccagggcucuccgaaccuagcuagcauccucuucaauuccaacuagaaagcuuaccaugaagugggugaccuucaucagccuccuguuccuguucuccagcgccuacuccgccgacggcaaccccgacccgaacgcgaaccccaacgucgaccccaacgccaaccccaacguggacccgaacgccaaccccaacguggaccccaacgccaaccccaacgccaacccgaacgcgaaccccaacgccaaccccaacgccaaccccaacgccaacccgaacgcgaaccccaacgccaaccccaacgccaaccccaacgccaacccgaacgccaaccccaacgcgaaccccaacgccaaccccaacgccaacccgaacgccaaccccaacgccaaccccugaggacuagucccuguucccagagcccacuuuuuuuucuuuuuuugaaauaaaauagccugucuuucagaucuaaaaaaaaaaaaaaaaaaaaaaaaaaaaaaaaaaaaaaaaaaaaaaaaaaaaaaaaaaaaaaaaugcaucccccccccccccccccccccccccccccccaaaggcucuuuucagagccaccagaauu

SEQ ID NO: 6371 - RNA, 955 nt, Artificial Sequence
  mRNA Design a-3 (A64-N5-C30-hSL-N5) comprising derived and/or modified sequence from Pf(3D7)__XP_001351122.1__HsALB_Pf-CSP(98-272) (opt1)
aggagagggcgcuuggcuugcaaggacccugagcugcggcauugaagcacacccaacccaacucgacugaagucagccucacugaaccggaucugagaaucuucucucucugggcuugccagggcucuccgaaccuagcuagcauccucuucaauuccaacuagaaagcuuaccaugaagugggugaccuucaucagccuccuguuccuguucuccagcgccuacuccgccgacggcaaccccgacccgaacgcgaaccccaacgucgaccccaacgccaaccccaacguggacccgaacgccaaccccaacguggaccccaacgccaaccccaacgccaacccgaacgcgaaccccaacgccaaccccaacgccaaccccaacgccaacccgaacgcgaaccccaacgccaaccccaacgccaaccccaacgccaacccgaacgccaaccccaacgcgaaccccaacgccaaccccaacgccaacccgaacgccaaccccaacgccaaccccaacgcgaaccccaacgucgacccgaacgccaaccccaacgccaaccccaacgccaaccccaacgccaacccgaacgcgaaccccaacgccaaccccaacgccaacccgaacgccaaccccaacgccaaccccaacgcgaaccccaacgccaacccgaacgccaaccccaacgccaaccccaacgcgaaccccaacgccaacccgaacgccaaccccaacgccaaccccaacgccaaccccugaggacuagucccuguucccagagcccacuuuuuuuucuuuuuuugaaauaaaauagccugucuuucagaucuaaaaaaaaaaaaaaaaaaaaaaaaaaaaaaaaaaaaaaaaaaaaaaaaaaaaaaaaaaaaaaaaugcaucccccccccccccccccccccccccccccccaaaggcucuuuucagagccaccagaauu

SEQ ID NO: 6372 - RNA, 1261 nt, Artificial Sequence
  mRNA Design a-3 (A64-N5-C30-hSL-N5) comprising derived and/or modified sequence from Pf(3D7)__XP_001351122.1__HsALB_Pf-CSP(98-374) (opt1)
aggagagggcgcuuggcuugcaaggacccugagcugcggcauugaagcacacccaacccaacucgacugaagucagccucacugaaccggaucugagaaucuucucucucugggcuugccagggcucuccgaaccuagcuagcauccucuucaauuccaacuagaaagcuuaccaugaagugggugaccuucaucagccuccuguuccuguucuccagcgccuacuccgccgacggcaaccccgacccgaacgcgaaccccaacgucgaccccaacgccaaccccaacguggacccgaacgccaaccccaacguggaccccaacgccaaccccaacgccaacccgaacgcgaaccccaacgccaaccccaacgccaaccccaacgccaacccgaacgcgaaccccaacgccaaccccaacgccaaccccaacgccaacccgaacgccaaccccaacgcgaaccccaacgccaaccccaacgccaacccgaacgccaaccccaacgccaaccccaacgcgaaccccaacgucgacccgaacgccaaccccaacgccaaccccaacgccaaccccaacgccaacccgaacgcgaaccccaacgccaaccccaacgccaacccgaacgccaaccccaacgccaaccccaacgcgaaccccaacgccaacccgaacgccaaccccaacgccaaccccaacgcgaaccccaacgccaacccgaacgccaaccccaacgccaaccccaacgccaaccccaacaagaacaaccaggggaacggccaggggcacaacaugccgaacgaccccaaccgcaacguggacgagaacgcgaacgccaacagcgccgugaagaacaacaacaacgaggagcccuccgacaagcacaucaaggaguaccugaacaagauccagaacagccucuccaccgaguggagccccugcuccgucacgugcggcaacgggauccaggugcggaucaagccgggcagcgccaacaagcccaaggacgagcuggacuacgccaacgacaucgagaagaagaucugcaagauggagaagugcugaggacuagucccuguucccagagcccacuuuuuuuucuuuuuuugaaauaaaauagccugucuuucagaucuaaaaaaaaaaaaaaaaaaaaaaaaaaaaaaaaaaaaaaaaaaaaaaaaaaaaaaaaaaaaaaaaugcaucccccccccccccccccccccccccccccccaaaggcucuuuucagagccaccagaauu

SEQ ID NO: 6373 - RNA, 1330 nt, Artificial Sequence
  mRNA Design a-3 (A64-N5-C30-hSL-N5) comprising derived and/or modified sequence from Pf(3D7)__XP_001351122.1__HsALB_Pf-CSP(98-397) (opt1)
aggagagggcgcuuggcuugcaaggacccugagcugcggcauugaagcacacccaacccaacucgacugaagucagccucacugaaccggaucugagaaucuucucucucugggcuugccagggcucuccgaaccuagcuagcauccucuucaauuccaacuagaaagcuuaccaugaagugggugaccuucaucagccuccuguuccuguucuccagcgccuacuccgccgacggcaaccccgacccgaacgcgaaccccaacgucgaccccaacgccaaccccaacguggacccgaacgccaaccccaacguggaccccaacgccaaccccaacgccaacccgaacgcgaaccccaacgccaaccccaacgccaaccccaacgccaacccgaacgcgaaccccaacgccaaccccaacgccaaccccaacgccaacccgaacgccaaccccaacgcgaaccccaacgccaaccccaacgccaacccgaacgccaaccccaacgccaaccccaacgcgaaccccaacgucgacccgaacgccaaccccaacgccaaccccaacgccaaccccaacgccaacccgaacgcgaaccccaacgccaaccccaacgccaacccgaacgccaaccccaacgccaaccccaacgcgaaccccaacgccaacccgaacgccaaccccaacgccaaccccaacgcgaaccccaacgccaacccgaacgccaaccccaacgccaaccccaacgccaaccccaacaagaacaaccaggggaacggccaggggcacaacaugccgaacgaccccaaccgcaacguggacgagaacgcgaacgccaacagcgccgugaagaacaacaacaacgaggagcccuccgacaagcacaucaaggaguaccugaacaagauccagaacagccucuccaccgaguggagccccugcuccgucacgugcggcaacgggauccaggugcggaucaagccgggcagcgccaacaagcccaaggacgagcuggacuacgccaacgacaucgagaagaagaucugcaagauggagaagugcuccagcguguucaacgucgugaacuccagcaucggccugaucauggugcucuccuuccuguuccugaacugaggacuagucccuguucccagagcccacuuuuuuuucuuuuuuugaaauaaaauagccugucuuucagaucuaaaaaaaaaaaaaaaaaaaaaaaaaaaaaaaaaaaaaaaaaaaaaaaaaaaaaaaaaaaaaaaaugcaucccccccccccccccccccccccccccccccaaaggcucuuuucagagccaccagaauu

SEQ ID NO: 6374 - RNA, 1657 nt, Artificial Sequence
  mRNA Design a-3 (A64-N5-C30-hSL-N5) comprising derived and/or modified sequence from Pf(3D7)__XP_001351122.1__HsALB_Pf-CSP(199-377)_L(PVTN)_HBsAg (opt1)
aggagagggcgcuuggcuugcaaggacccugagcugcggcauugaagcacacccaacccaacucgacugaagucagccucacugaaccggaucugagaaucuucucucucugggcuugccagggcucuccgaaccuagcuagcauccucuucaauuccaacuagaaagcuuaccaugaagugggugaccuucaucagccuccuguuccuguucuccagcgccuacuccgaccccaacgccaacccgaacgcgaaccccaacgccaaccccaacgccaaccccaacgccaacccgaacgccaaccccaacgcgaaccccaacgccaaccccaacgccaacccgaacgccaaccccaacgcgaaccccaacgccaaccccaacgccaacccgaacgccaaccccaacgccaaccccaacgcgaaccccaacgccaacccgaacgccaaccccaacaagaacaaccagggcaacgggcagggccacaacaugcccaacgaccccaaccgcaacgucgacgagaacgccaacgccaacagcgcggugaagaacaacaacaacgaggagccguccgacaagcacaucaaggaguaccugaacaagauccagaacagccucuccaccgaguggagccccugcuccgugaccugcgggaacggcauccagguccggaucaagcccgggagcgccaacaagcccaaggacgagcuggacuacgccaacgacaucgagaagaagaucugcaagauggagaagugcuccagcgugccggugaccaacauggagaacaucaccuccggcuuccugggcccccuccugguccugcaggccggguucuuccuccugacccgcauccugacgaucccccagagccucgacuccugguggaccagccugaacuuccugggcgggucccccgugugccucggccagaacagccaguccccgaccagcaaccacagccccaccuccugcccgcccaucugccccggguaccgguggaugugccugcgccgguucaucaucuuccuguucauccuccugcugugccucaucuuccugcuggugcuccuggacuaccagggcaugcugcccgucugcccccucaucccgggcagcacgaccaccaacaccgggcccugcaagacgugcaccacccccgcccagggcaacuccauguuccccagcugcugcugcaccaagccgacggacgggaacugcacgugcauccccauccccuccagcugggcguucgccaaguaccugugggagugggccuccgugcgcuucagcuggcugucccuccuggugcccuucguccagugguucgugggccugagcccgaccguguggcucuccgccaucuggaugaugugguacuggggccccagccuguacuccaucgucagccccuucaucccccugcucccgaucuucuucugccuguggguguacaucugaggacuagucccuguucccagagcccacuuuuuuuucuuuuuuugaaauaaaauagccugucuuucagaucuaaaaaaaaaaaaaaaaaaaaaaaaaaaaaaaaaaaaaaaaaaaaaaaaaaaaaaaaaaaaaaaaugcaucccccccccccccccccccccccccccccccaaaggcucuuuucagagccaccagaauu

SEQ ID NO: 6375 - RNA, 1567 nt, Artificial Sequence
  mRNA Design a-3 (A64-N5-C30-hSL-N5) comprising derived and/or modified sequence from Pf(3D7)__XP_001351122.1__Pf-CSP (opt2)
aggagagggcgcuuggcuugcaaggacccugagcugcggcauugaagcacacccaacccaacucgacugaagucagccucacugaaccggaucugagaaucuucucucucugggcuugccagggcucuccgaaccuagcuagcauccucuucaauuccaacuagaaagcuuaccaugaugcgcaagcucgccauccucuccgucuccuccuuccucuucgucgaggcccucuuccaggaguaccagugcuacggcuccuccuccaacacccgcguccucaacgagcucaacuacgacaacgccggcaccaaccucuacaacgagcucgagaugaacuacuacggcaagcaggagaacugguacucccucaagaagaacucccgcucccucggcgagaacgacgacggcaacaacgaggacaacgagaagcuccgcaagcccaagcacaagaagcucaagcagcccgccgacggcaaccccgaccccaacgccaaccccaacgucgaccccaacgccaaccccaacgucgaccccaacgccaaccccaacgucgaccccaacgccaaccccaacgccaaccccaacgccaaccccaacgccaaccccaacgccaaccccaacgccaaccccaacgccaaccccaacgccaaccccaacgccaaccccaacgccaaccccaacgccaaccccaacgccaaccccaacgccaaccccaacgccaaccccaacgccaaccccaacgccaaccccaacgccaaccccaacgucgaccccaacgccaaccccaacgccaaccccaacgccaaccccaacgccaaccccaacgccaaccccaacgccaaccccaacgccaaccccaacgccaaccccaacgccaaccccaacgccaaccccaacgccaaccccaacgccaaccccaacgccaaccccaacgccaaccccaacgccaaccccaacgccaaccccaacgccaaccccaacgccaaccccaacaagaacaaccagggcaacggccagggccacaacaugcccaacgaccccaaccgcaacgucgacgagaacgccaacgccaacuccgccgucaagaacaacaacaacgaggagcccuccgacaagcacaucaaggaguaccucaacaagauccagaacucccucuccaccgaguggucccccugcuccgucaccugcggcaacggcauccagguccgcaucaagcccggcuccgccaacaagcccaaggacgagcucgacuacgccaacgacaucgagaagaagaucugcaagauggagaagugcuccuccgucuucaacgucgucaacuccuccaucggccucaucaugguccucuccuuccucuuccucaacugaggacuagucccuguucccagagcccacuuuuuuuucuuuuuuugaaauaaaauagccugucuuucagaucuaaaaaaaaaaaaaaaaaaaaaaaaaaaaaaaaaaaaaaaaaaaaaaaaaaaaaaaaaaaaaaaaugcaucccccccccccccccccccccccccccccccaaaggcucuuuucagagccaccagaauu

SEQ ID NO: 6376 - RNA, 1498 nt, Artificial Sequence
  mRNA Design a-3 (A64-N5-C30-hSL-N5) comprising derived and/or modified sequence from Pf(3D7)__XP_001351122.1__Pf-CSP(1-374) (opt2)
aggagagggcgcuuggcuugcaaggacccugagcugcggcauugaagcacacccaacccaacucgacugaagucagccucacugaaccggaucugagaaucuucucucucugggcuugccagggcucuccgaaccuagcuagcauccucuucaauuccaacuagaaagcuuaccaugaugcgcaagcucgccauccucuccgucuccuccuuccucuucgucgaggcccucuuccaggaguaccagugcuacggcuccuccuccaacacccgcguccucaacgagcucaacuacgacaacgccggcaccaaccucuacaacgagcucgagaugaacuacuacggcaagcaggagaacugguacucccucaagaagaacucccgcucccucggcgagaacgacgacggcaacaacgaggacaacgagaagcuccgcaagcccaagcacaagaagcucaagcagcccgccgacggcaaccccgaccccaacgccaaccccaacgucgaccccaacgccaaccccaacgucgaccccaacgccaaccccaacgucgaccccaacgccaaccccaacgccaaccccaacgccaaccccaacgccaaccccaacgccaaccccaacgccaaccccaacgccaaccccaacgccaaccccaacgccaaccccaacgccaaccccaacgccaaccccaacgccaaccccaacgccaaccccaacgccaaccccaacgccaaccccaacgccaaccccaacgccaaccccaacgucgaccccaacgccaaccccaacgccaaccccaacgccaaccccaacgccaaccccaacgccaaccccaacgccaaccccaacgccaaccccaacgccaaccccaacgccaaccccaacgccaaccccaacgccaaccccaacgccaaccccaacgccaaccccaacgccaaccccaacgccaaccccaacgccaaccccaacgccaaccccaacgccaaccccaacaagaacaaccagggcaacggccagggccacaacaugcccaacgaccccaaccgcaacgucgacgagaacgccaacgccaacuccgccgucaagaacaacaacaacgaggagcccuccgacaagcacaucaaggaguaccucaacaagauccagaacucccucuccaccgaguggucccccugcuccgucaccugcggcaacggcauccagguccgcaucaagcccggcuccgccaacaagcccaaggacgagcucgacuacgccaacgacaucgagaagaagaucugcaagauggagaagugcugaggacuagucccuguucccagagcccacuuuuuuuucuuuuuuugaaauaaaauagccugucuuucagaucuaaaaaaaaaaaaaaaaaaaaaaaaaaaaaaaaaaaaaaaaaaaaaaaaaaaaaaaaaaaaaaaaugcaucccccccccccccccccccccccccccccccaaaggcucuuuucagagccaccagaauu

SEQ ID NO: 6377 - RNA, 1351 nt, Artificial Sequence
  mRNA Design a-3 (A64-N5-C30-hSL-N5) comprising derived and/or modified sequence from Pf(3D7)__XP_001351122.1__Pf-CSP(1-325) (opt2)
aggagagggcgcuuggcuugcaaggacccugagcugcggcauugaagcacacccaacccaacucgacugaagucagccucacugaaccggaucugagaaucuucucucucugggcuugccagggcucuccgaaccuagcuagcauccucuucaauuccaacuagaaagcuuaccaugaugcgcaagcucgccauccucuccgucuccuccuuccucuucgucgaggcccucuuccaggaguaccagugcuacggcuccuccuccaacacccgcguccucaacgagcucaacuacgacaacgccggcaccaaccucuacaacgagcucgagaugaacuacuacggcaagcaggagaacugguacucccucaagaagaacucccgcucccucggcgagaacgacgacggcaacaacgaggacaacgagaagcuccgcaagcccaagcacaagaagcucaagcagcccgccgacggcaaccccgaccccaacgccaaccccaacgucgaccccaacgccaaccccaacgucgaccccaacgccaaccccaacgucgaccccaacgccaaccccaacgccaaccccaacgccaaccccaacgccaaccccaacgccaaccccaacgccaaccccaacgccaaccccaacgccaaccccaacgccaaccccaacgccaaccccaacgccaaccccaacgccaaccccaacgccaaccccaacgccaaccccaacgccaaccccaacgccaaccccaacgccaaccccaacgucgaccccaacgccaaccccaacgccaaccccaacgccaaccccaacgccaaccccaacgccaaccccaacgccaaccccaacgccaaccccaacgccaaccccaacgccaaccccaacgccaaccccaacgccaaccccaacgccaaccccaacgccaaccccaacgccaaccccaacgccaaccccaacgccaaccccaacgccaaccccaacgccaaccccaacaagaacaaccagggcaacggccagggccacaacaugcccaacgaccccaaccgcaacgucgacgagaacgccaacgccaacuccgccgucaagaacaacaacaacgaggagcccuccgacaagcacaucaaggaguaccucaacaagauccagaacugaggacuagucccuguucccagagcccacuuuuuuuucuuuuuuugaaauaaaauagccugucuuucagaucuaaaaaaaaaaaaaaaaaaaaaaaaaaaaaaaaaaaaaaaaaaaaaaaaaaaaaaaaaaaaaaaaugcaucccccccccccccccccccccccccccccccaaaggcucuuuucagagccaccagaauu

SEQ ID NO: 6378 - RNA, 1567 nt, Artificial Sequence
  mRNA Design a-3 (A64-N5-C30-hSL-N5) comprising derived and/or modified sequence from Pf(3D7)__XP_001351122.1__HsALB_Pf-CSP(19-397) (opt2)
aggagagggcgcuuggcuugcaaggacccugagcugcggcauugaagcacacccaacccaacucgacugaagucagccucacugaaccggaucugagaaucuucucucucugggcuugccagggcucuccgaaccuagcuagcauccucuucaauuccaacuagaaagcuuaccaugaagugggucaccuucaucucccuccucuuccucuucuccuccgccuacucccucuuccaggaguaccagugcuacggcuccuccuccaacacccgcguccucaacgagcucaacuacgacaacgccggcaccaaccucuacaacgagcucgagaugaacuacuacggcaagcaggagaacugguacucccucaagaagaacucccgcucccucggcgagaacgacgacggcaacaacgaggacaacgagaagcuccgcaagcccaagcacaagaagcucaagcagcccgccgacggcaaccccgaccccaacgccaaccccaacgucgaccccaacgccaaccccaacgucgaccccaacgccaaccccaacgucgaccccaacgccaaccccaacgccaaccccaacgccaaccccaacgccaaccccaacgccaaccccaacgccaaccccaacgccaaccccaacgccaaccccaacgccaaccccaacgccaaccccaacgccaaccccaacgccaaccccaacgccaaccccaacgccaaccccaacgccaaccccaacgccaaccccaacgccaaccccaacgucgaccccaacgccaaccccaacgccaaccccaacgccaaccccaacgccaaccccaacgccaaccccaacgccaaccccaacgccaaccccaacgccaaccccaacgccaaccccaacgccaaccccaacgccaaccccaacgccaaccccaacgccaaccccaacgccaaccccaacgccaaccccaacgccaaccccaacgccaaccccaacgccaaccccaacaagaacaaccagggcaacggccagggccacaacaugcccaacgaccccaaccgcaacgucgacgagaacgccaacgccaacuccgccgucaagaacaacaacaacgaggagcccuccgacaagcacaucaaggaguaccucaacaagauccagaacucccucuccaccgaguggucccccugcuccgucaccugcggcaacggcauccagguccgcaucaagcccggcuccgccaacaagcccaaggacgagcucgacuacgccaacgacaucgagaagaagaucugcaagauggagaagugcuccuccgucuucaacgucgucaacuccuccaucggccucaucaugguccucuccuuccucuuccucaacugaggacuagucccuguucccagagcccacuuuuuuuucuuuuuuugaaauaaaauagccugucuuucagaucuaaaaaaaaaaaaaaaaaaaaaaaaaaaaaaaaaaaaaaaaaaaaaaaaaaaaaaaaaaaaaaaaugcaucccccccccccccccccccccccccccccccaaaggcucuuuucagagccaccagaauu

SEQ ID NO: 6379 - RNA, 1585 nt, Artificial Sequence
  mRNA Design a-3 (A64-N5-C30-hSL-N5) comprising derived and/or modified sequence from Pf(3D7)__XP_001351122.1__HsIns-iso1_Pf-CSP(19-397) (opt2)
aggagagggcgcuuggcuugcaaggacccugagcugcggcauugaagcacacccaacccaacucgacugaagucagccucacugaaccggaucugagaaucuucucucucugggcuugccagggcucuccgaaccuagcuagcauccucuucaauuccaacuagaaagcuuaccauggcccucuggaugcgccuccucccccuccucgcccuccucgcccucuggggccccgaccccgccgccgcccucuuccaggaguaccagugcuacggcuccuccuccaacacccgcguccucaacgagcucaacuacgacaacgccggcaccaaccucuacaacgagcucgagaugaacuacuacggcaagcaggagaacugguacucccucaagaagaacucccgcucccucggcgagaacgacgacggcaacaacgaggacaacgagaagcuccgcaagcccaagcacaagaagcucaagcagcccgccgacggcaaccccgaccccaacgccaaccccaacgucgaccccaacgccaaccccaacgucgaccccaacgccaaccccaacgucgaccccaacgccaaccccaacgccaaccccaacgccaaccccaacgccaaccccaacgccaaccccaacgccaaccccaacgccaaccccaacgccaaccccaacgccaaccccaacgccaaccccaacgccaaccccaacgccaaccccaacgccaaccccaacgccaaccccaacgccaaccccaacgccaaccccaacgccaaccccaacgucgaccccaacgccaaccccaacgccaaccccaacgccaaccccaacgccaaccccaacgccaaccccaacgccaaccccaacgccaaccccaacgccaaccccaacgccaaccccaacgccaaccccaacgccaaccccaacgccaaccccaacgccaaccccaacgccaaccccaacgccaaccccaacgccaaccccaacgccaaccccaacgccaaccccaacaagaacaaccagggcaacggccagggccacaacaugcccaacgaccccaaccgcaacgucgacgagaacgccaacgccaacuccgccgucaagaacaacaacaacgaggagcccuccgacaagcacaucaaggaguaccucaacaagauccagaacucccucuccaccgaguggucccccugcuccgucaccugcggcaacggcauccagguccgcaucaagcccggcuccgccaacaagcccaaggacgagcucgacuacgccaacgacaucgagaagaagaucugcaagauggagaagugcuccuccgucuucaacgucgucaacuccuccaucggccucaucaugguccucuccuuccucuuccucaacugaggacuagucccuguucccagagcccacuuuuuuuucuuuuuuugaaauaaaauagccugucuuucagaucuaaaaaaaaaaaaaaaaaaaaaaaaaaaaaaaaaaaaaaaaaaaaaaaaaaaaaaaaaaaaaaaaugcaucccccccccccccccccccccccccccccccaaaggcucuuuucagagccaccagaauu

SEQ ID NO: 6380 - RNA, 1564 nt, Artificial Sequence
  mRNA Design a-3 (A64-N5-C30-hSL-N5) comprising derived and/or modified sequence from Pf(3D7)__XP_001351122.1__HsSPARC_Pf-CSP(19-397) (opt2)
aggagagggcgcuuggcuugcaaggacccugagcugcggcauugaagcacacccaacccaacucgacugaagucagccucacugaaccggaucugagaaucuucucucucugggcuugccagggcucuccgaaccuagcuagcauccucuucaauuccaacuagaaagcuuaccaugcgcgccuggaucuucuuccuccucugccucgccggccgcgcccucgcccucuuccaggaguaccagugcuacggcuccuccuccaacacccgcguccucaacgagcucaacuacgacaacgccggcaccaaccucuacaacgagcucgagaugaacuacuacggcaagcaggagaacugguacucccucaagaagaacucccgcucccucggcgagaacgacgacggcaacaacgaggacaacgagaagcuccgcaagcccaagcacaagaagcucaagcagcccgccgacggcaaccccgaccccaacgccaaccccaacgucgaccccaacgccaaccccaacgucgaccccaacgccaaccccaacgucgaccccaacgccaaccccaacgccaaccccaacgccaaccccaacgccaaccccaacgccaaccccaacgccaaccccaacgccaaccccaacgccaaccccaacgccaaccccaacgccaaccccaacgccaaccccaacgccaaccccaacgccaaccccaacgccaaccccaacgccaaccccaacgccaaccccaacgccaaccccaacgucgaccccaacgccaaccccaacgccaaccccaacgccaaccccaacgccaaccccaacgccaaccccaacgccaaccccaacgccaaccccaacgccaaccccaacgccaaccccaacgccaaccccaacgccaaccccaacgccaaccccaacgccaaccccaacgccaaccccaacgccaaccccaacgccaaccccaacgccaaccccaacgccaaccccaacaagaacaaccagggcaacggccagggccacaacaugcccaacgaccccaaccgcaacgucgacgagaacgccaacgccaacuccgccgucaagaacaacaacaacgaggagcccuccgacaagcacaucaaggaguaccucaacaagauccagaacucccucuccaccgaguggucccccugcuccgucaccugcggcaacggcauccagguccgcaucaagcccggcuccgccaacaagcccaaggacgagcucgacuacgccaacgacaucgagaagaagaucugcaagauggagaagugcuccuccgucuucaacgucgucaacuccuccaucggccucaucaugguccucuccuuccucuuccucaacugaggacuagucccuguucccagagcccacuuuuuuuucuuuuuuugaaauaaaauagccugucuuucagaucuaaaaaaaaaaaaaaaaaaaaaaaaaaaaaaaaaaaaaaaaaaaaaaaaaaaaaaaaaaaaaaaaugcaucccccccccccccccccccccccccccccccaaaggcucuuuucagagccaccagaauu

SEQ ID NO: 6381 - RNA, 1567 nt, Artificial Sequence
  mRNA Design a-3 (A64-N5-C30-hSL-N5) comprising derived and/or modified sequence from Pf(3D7)__XP_001351122.1__IgE_Pf-CSP(19-397) (opt2)
aggagagggcgcuuggcuugcaaggacccugagcugcggcauugaagcacacccaacccaacucgacugaagucagccucacugaaccggaucugagaaucuucucucucugggcuugccagggcucuccgaaccuagcuagcauccucuucaauuccaacuagaaagcuuaccauggacuggaccuggauccucuuccucgucgccgccgccacccgcguccacucccucuuccaggaguaccagugcuacggcuccuccuccaacacccgcguccucaacgagcucaacuacgacaacgccggcaccaaccucuacaacgagcucgagaugaacuacuacggcaagcaggagaacugguacucccucaagaagaacucccgcucccucggcgagaacgacgacggcaacaacgaggacaacgagaagcuccgcaagcccaagcacaagaagcucaagcagcccgccgacggcaaccccgaccccaacgccaaccccaacgucgaccccaacgccaaccccaacgucgaccccaacgccaaccccaacgucgaccccaacgccaaccccaacgccaaccccaacgccaaccccaacgccaaccccaacgccaaccccaacgccaaccccaacgccaaccccaacgccaaccccaacgccaaccccaacgccaaccccaacgccaaccccaacgccaaccccaacgccaaccccaacgccaaccccaacgccaaccccaacgccaaccccaacgccaaccccaacgucgaccccaacgccaaccccaacgccaaccccaacgccaaccccaacgccaaccccaacgccaaccccaacgccaaccccaacgccaaccccaacgccaaccccaacgccaaccccaacgccaaccccaacgccaaccccaacgccaaccccaacgccaaccccaacgccaaccccaacgccaaccccaacgccaaccccaacgccaaccccaacgccaaccccaacaagaacaaccagggcaacggccagggccacaacaugcccaacgaccccaaccgcaacgucgacgagaacgccaacgccaacuccgccgucaagaacaacaacaacgaggagcccuccgacaagcacaucaaggaguaccucaacaagauccagaacucccucuccaccgaguggucccccugcuccgucaccugcggcaacggcauccagguccgcaucaagcccggcuccgccaacaagcccaaggacgagcucgacuacgccaacgacaucgagaagaagaucugcaagauggagaagugcuccuccgucuucaacgucgucaacuccuccaucggccucaucaugguccucuccuuccucuuccucaacugaggacuagucccuguucccagagcccacuuuuuuuucuuuuuuugaaauaaaauagccugucuuucagaucuaaaaaaaaaaaaaaaaaaaaaaaaaaaaaaaaaaaaaaaaaaaaaaaaaaaaaaaaaaaaaaaaugcaucccccccccccccccccccccccccccccccaaaggcucuuuucagagccaccagaauu

SEQ ID NO: 6382 - RNA, 1732 nt, Artificial Sequence
  mRNA Design a-3 (A64-N5-C30-hSL-N5) comprising derived and/or modified sequence from Pf(3D7)__XP_001351122.1__Pf-CSP_L(G4SG4)_TM domain HA (opt2)
aggagagggcgcuuggcuugcaaggacccugagcugcggcauugaagcacacccaacccaacucgacugaagucagccucacugaaccggaucugagaaucuucucucucugggcuugccagggcucuccgaaccuagcuagcauccucuucaauuccaacuagaaagcuuaccaugaugcgcaagcucgccauccucuccgucuccuccuuccucuucgucgaggcccucuuccaggaguaccagugcuacggcuccuccuccaacacccgcguccucaacgagcucaacuacgacaacgccggcaccaaccucuacaacgagcucgagaugaacuacuacggcaagcaggagaacugguacucccucaagaagaacucccgcucccucggcgagaacgacgacggcaacaacgaggacaacgagaagcuccgcaagcccaagcacaagaagcucaagcagcccgccgacggcaaccccgaccccaacgccaaccccaacgucgaccccaacgccaaccccaacgucgaccccaacgccaaccccaacgucgaccccaacgccaaccccaacgccaaccccaacgccaaccccaacgccaaccccaacgccaaccccaacgccaaccccaacgccaaccccaacgccaaccccaacgccaaccccaacgccaaccccaacgccaaccccaacgccaaccccaacgccaaccccaacgccaaccccaacgccaaccccaacgccaaccccaacgccaaccccaacgucgaccccaacgccaaccccaacgccaaccccaacgccaaccccaacgccaaccccaacgccaaccccaacgccaaccccaacgccaaccccaacgccaaccccaacgccaaccccaacgccaaccccaacgccaaccccaacgccaaccccaacgccaaccccaacgccaaccccaacgccaaccccaacgccaaccccaacgccaaccccaacgccaaccccaacaagaacaaccagggcaacggccagggccacaacaugcccaacgaccccaaccgcaacgucgacgagaacgccaacgccaacuccgccgucaagaacaacaacaacgaggagcccuccgacaagcacaucaaggaguaccucaacaagauccagaacucccucuccaccgaguggucccccugcuccgucaccugcggcaacggcauccagguccgcaucaagcccggcuccgccaacaagcccaaggacgagcucgacuacgccaacgacaucgagaagaagaucugcaagauggagaagugcuccuccgucuucaacgucgucaacuccuccaucggccucaucaugguccucuccuuccucuuccucaacggcggcggcggcuccggcggcggcggcaagcucgaguccacccgcaucuaccagauccucgccaucuacuccaccgucgccuccucccucguccucgucgucucccucggcgccaucuccuucuggaugugcuccaacggcucccuccagugccgcaucugcaucugaggacuagucccuguucccagagcccacuuuuuuuucuuuuuuugaaauaaaauagccugucuuucagaucuaaaaaaaaaaaaaaaaaaaaaaaaaaaaaaaaaaaaaaaaaaaaaaaaaaaaaaaaaaaaaaaaugcaucccccccccccccccccccccccccccccccaaaggcucuuuucagagccaccagaauu

SEQ ID NO: 6383 - RNA, 1606 nt, Artificial Sequence
  mRNA Design a-3 (A64-N5-C30-hSL-N5) comprising derived and/or modified sequence from Pf(3D7)__XP_001351122.1__Pf-CSP(199-377)_L(PVTN)_HBsAg (opt2)
aggagagggcgcuuggcuugcaaggacccugagcugcggcauugaagcacacccaacccaacucgacugaagucagccucacugaaccggaucugagaaucuucucucucugggcuugccagggcucuccgaaccuagcuagcauccucuucaauuccaacuagaaagcuuaccauggaccccaacgccaaccccaacgccaaccccaacgccaaccccaacgccaaccccaacgccaaccccaacgccaaccccaacgccaaccccaacgccaaccccaacgccaaccccaacgccaaccccaacgccaaccccaacgccaaccccaacgccaaccccaacgccaaccccaacgccaaccccaacgccaaccccaacgccaaccccaacgccaaccccaacaagaacaaccagggcaacggccagggccacaacaugcccaacgaccccaaccgcaacgucgacgagaacgccaacgccaacuccgccgucaagaacaacaacaacgaggagcccuccgacaagcacaucaaggaguaccucaacaagauccagaacucccucuccaccgaguggucccccugcuccgucaccugcggcaacggcauccagguccgcaucaagcccggcuccgccaacaagcccaaggacgagcucgacuacgccaacgacaucgagaagaagaucugcaagauggagaagugcuccuccguccccgucaccaacauggagaacaucaccuccggcuuccucggcccccuccucguccuccaggccggcuucuuccuccucacccgcauccucaccaucccccagucccucgacuccugguggaccucccucaacuuccucggcggcucccccgucugccucggccagaacucccagucccccaccuccaaccacucccccaccuccugcccccccaucugccccggcuaccgcuggaugugccuccgccgcuucaucaucuuccucuucauccuccuccucugccucaucuuccuccucguccuccucgacuaccagggcaugcuccccgucugcccccucauccccggcuccaccaccaccaacaccggccccugcaagaccugcaccacccccgcccagggcaacuccauguuccccuccugcugcugcaccaagcccaccgacggcaacugcaccugcauccccauccccuccuccugggccuucgccaaguaccucugggagugggccuccguccgcuucuccuggcucucccuccucguccccuucguccagugguucgucggccucucccccaccgucuggcucuccgccaucuggaugaugugguacuggggccccucccucuacuccaucgucucccccuucaucccccuccuccccaucuucuucugccucugggucuacaucugaggacuagucccuguucccagagcccacuuuuuuuucuuuuuuugaaauaaaauagccugucuuucagaucuaaaaaaaaaaaaaaaaaaaaaaaaaaaaaaaaaaaaaaaaaaaaaaaaaaaaaaaaaaaaaaaaugcaucccccccccccccccccccccccccccccccaaaggcucuuuucagagccaccagaauu

SEQ ID NO: 6384 - RNA, 1648 nt, Artificial Sequence
  mRNA Design a-3 (A64-N5-C30-hSL-N5) comprising derived and/or modified sequence from Pf(3D7)__XP_001351122.1__Pf-CSP(199-387)_L(PVTN)_HBsAg (opt2)
aggagagggcgcuuggcuugcaaggacccugagcugcggcauugaagcacacccaacccaacucgacugaagucagccucacugaaccggaucugagaaucuucucucucugggcuugccagggcucuccgaaccuagcuagcauccucuucaauuccaacuagaaagcuuaccaugauggcccccgaccccaacgccaaccccaacgccaaccccaacgccaaccccaacgccaaccccaacgccaaccccaacgccaaccccaacgccaaccccaacgccaaccccaacgccaaccccaacgccaaccccaacgccaaccccaacgccaaccccaacgccaaccccaacgccaaccccaacgccaaccccaacgccaaccccaacgccaaccccaacgccaaccccaacaagaacaaccagggcaacggccagggccacaacaugcccaacgaccccaaccgcaacgucgacgagaacgccaacgccaacuccgccgucaagaacaacaacaacgaggagcccuccgacaagcacaucaaggaguaccucaacaagauccagaacucccucuccaccgaguggucccccugcuccgucaccugcggcaacggcauccagguccgcaucaagcccggcuccgccaacaagcccaaggacgagcucgacuacgccaacgacaucgagaagaagaucugcaagauggagaagugcuccuccgucuucaacgucgucaacuccuccaucggccucggccccgucaccaacauggagaacaucaccuccggcuuccucggcccccuccucguccuccaggccggcuucuuccuccucacccgcauccucaccaucccccagucccucgacuccugguggaccucccucaacuuccucggcggcucccccgucugccucggccagaacucccagucccccaccuccaaccacucccccaccuccugcccccccaucugccccggcuaccgcuggaugugccuccgccgcuucaucaucuuccucuucauccuccuccucugccucaucuuccuccucguccuccucgacuaccagggcaugcuccccgucugcccccucauccccggcuccaccaccaccaacaccggccccugcaagaccugcaccacccccgcccagggcaacuccauguuccccuccugcugcugcaccaagcccaccgacggcaacugcaccugcauccccauccccuccuccugggccuucgccaaguaccucugggagugggccuccguccgcuucuccuggcucucccuccucguccccuucguccagugguucgucggccucucccccaccgucuggcucuccgccaucuggaugaugugguacuggggccccucccucuacuccaucgucucccccuucaucccccuccuccccaucuucuucugccucugggucuacaucugaggacuagucccuguucccagagcccacuuuuuuuucuuuuuuugaaauaaaauagccugucuuucagaucuaaaaaaaaaaaaaaaaaaaaaaaaaaaaaaaaaaaaaaaaaaaaaaaaaaaaaaaaaaaaaaaaugcaucccccccccccccccccccccccccccccccaaaggcucuuuucagagccaccagaauu

SEQ ID NO: 6385 - RNA, 832 nt, Artificial Sequence
  mRNA Design a-3 (A64-N5-C30-hSL-N5) comprising derived and/or modified sequence from Pf(3D7)__XP_001351122.1__HsALB_Pf-CSP(19-152) (opt2)
aggagagggcgcuuggcuugcaaggacccugagcugcggcauugaagcacacccaacccaacucgacugaagucagccucacugaaccggaucugagaaucuucucucucugggcuugccagggcucuccgaaccuagcuagcauccucuucaauuccaacuagaaagcuuaccaugaagugggucaccuucaucucccuccucuuccucuucuccuccgccuacucccucuuccaggaguaccagugcuacggcuccuccuccaacacccgcguccucaacgagcucaacuacgacaacgccggcaccaaccucuacaacgagcucgagaugaacuacuacggcaagcaggagaacugguacucccucaagaagaacucccgcucccucggcgagaacgacgacggcaacaacgaggacaacgagaagcuccgcaagcccaagcacaagaagcucaagcagcccgccgacggcaaccccgaccccaacgccaaccccaacgucgaccccaacgccaaccccaacgucgaccccaacgccaaccccaacgucgaccccaacgccaaccccaacgccaaccccaacgccaaccccaacgccaaccccaacgccaaccccaacgccaaccccugaggacuagucccuguucccagagcccacuuuuuuuucuuuuuuugaaauaaaauagccugucuuucagaucuaaaaaaaaaaaaaaaaaaaaaaaaaaaaaaaaaaaaaaaaaaaaaaaaaaaaaaaaaaaaaaaaugcaucccccccccccccccccccccccccccccccaaaggcucuuuucagagccaccagaauu

SEQ ID NO: 6386 - RNA, 952 nt, Artificial Sequence
  mRNA Design a-3 (A64-N5-C30-hSL-N5) comprising derived and/or modified sequence from Pf(3D7)__XP_001351122.1__HsALB_Pf-CSP(19-192) (opt2)
aggagagggcgcuuggcuugcaaggacccugagcugcggcauugaagcacacccaacccaacucgacugaagucagccucacugaaccggaucugagaaucuucucucucugggcuugccagggcucuccgaaccuagcuagcauccucuucaauuccaacuagaaagcuuaccaugaagugggucaccuucaucucccuccucuuccucuucuccuccgccuacucccucuuccaggaguaccagugcuacggcuccuccuccaacacccgcguccucaacgagcucaacuacgacaacgccggcaccaaccucuacaacgagcucgagaugaacuacuacggcaagcaggagaacugguacucccucaagaagaacucccgcucccucggcgagaacgacgacggcaacaacgaggacaacgagaagcuccgcaagcccaagcacaagaagcucaagcagcccgccgacggcaaccccgaccccaacgccaaccccaacgucgaccccaacgccaaccccaacgucgaccccaacgccaaccccaacgucgaccccaacgccaaccccaacgccaaccccaacgccaaccccaacgccaaccccaacgccaaccccaacgccaaccccaacgccaaccccaacgccaaccccaacgccaaccccaacgccaaccccaacgccaaccccaacgccaaccccaacgccaaccccaacgccaaccccaacgccaaccccaacgccaaccccugaggacuagucccuguucccagagcccacuuuuuuuucuuuuuuugaaauaaaauagccugucuuucagaucuaaaaaaaaaaaaaaaaaaaaaaaaaaaaaaaaaaaaaaaaaaaaaaaaaaaaaaaaaaaaaaaaugcaucccccccccccccccccccccccccccccccaaaggcucuuuucagagccaccagaauu

SEQ ID NO: 6387 - RNA, 1192 nt, Artificial Sequence
  mRNA Design a-3 (A64-N5-C30-hSL-N5) comprising derived and/or modified sequence from Pf(3D7)__XP_001351122.1__HsALB_Pf-CSP(19-272) (opt2)
aggagagggcgcuuggcuugcaaggacccugagcugcggcauugaagcacacccaacccaacucgacugaagucagccucacugaaccggaucugagaaucuucucucucugggcuugccagggcucuccgaaccuagcuagcauccucuucaauuccaacuagaaagcuuaccaugaagugggucaccuucaucucccuccucuuccucuucuccuccgccuacucccucuuccaggaguaccagugcuacggcuccuccuccaacacccgcguccucaacgagcucaacuacgacaacgccggcaccaaccucuacaacgagcucgagaugaacuacuacggcaagcaggagaacugguacucccucaagaagaacucccgcucccucggcgagaacgacgacggcaacaacgaggacaacgagaagcuccgcaagcccaagcacaagaagcucaagcagcccgccgacggcaaccccgaccccaacgccaaccccaacgucgaccccaacgccaaccccaacgucgaccccaacgccaaccccaacgucgaccccaacgccaaccccaacgccaaccccaacgccaaccccaacgccaaccccaacgccaaccccaacgccaaccccaacgccaaccccaacgccaaccccaacgccaaccccaacgccaaccccaacgccaaccccaacgccaaccccaacgccaaccccaacgccaaccccaacgccaaccccaacgccaaccccaacgccaaccccaacgucgaccccaacgccaaccccaacgccaaccccaacgccaaccccaacgccaaccccaacgccaaccccaacgccaaccccaacgccaaccccaacgccaaccccaacgccaaccccaacgccaaccccaacgccaaccccaacgccaaccccaacgccaaccccaacgccaaccccaacgccaaccccaacgccaaccccaacgccaaccccaacgccaaccccugaggacuagucccuguucccagagcccacuuuuuuuucuuuuuuugaaauaaaauagccugucuuucagaucuaaaaaaaaaaaaaaaaaaaaaaaaaaaaaaaaaaaaaaaaaaaaaaaaaaaaaaaaaaaaaaaaugcaucccccccccccccccccccccccccccccccaaaggcucuuuucagagccaccagaauu

SEQ ID NO: 6388 - RNA, 1354 nt, Artificial Sequence
  mRNA Design a-3 (A64-N5-C30-hSL-N5) comprising derived and/or modified sequence from Pf(3D7)__XP_001351122.1__HsALB_Pf-CSP(19-272)_L(AAY)_Pf-CSP(310-3 27)_L(AAY)_Pf-CSP(346-375) (opt2)
aggagagggcgcuuggcuugcaaggacccugagcugcggcauugaagcacacccaacccaacucgacugaagucagccucacugaaccggaucugagaaucuucucucucugggcuugccagggcucuccgaaccuagcuagcauccucuucaauuccaacuagaaagcuuaccaugaagugggucaccuucaucucccuccucuuccucuucuccuccgccuacucccucuuccaggaguaccagugcuacggcuccuccuccaacacccgcguccucaacgagcucaacuacgacaacgccggcaccaaccucuacaacgagcucgagaugaacuacuacggcaagcaggagaacugguacucccucaagaagaacucccgcucccucggcgagaacgacgacggcaacaacgaggacaacgagaagcuccgcaagcccaagcacaagaagcucaagcagcccgccgacggcaaccccgaccccaacgccaaccccaacgucgaccccaacgccaaccccaacgucgaccccaacgccaaccccaacgucgaccccaacgccaaccccaacgccaaccccaacgccaaccccaacgccaaccccaacgccaaccccaacgccaaccccaacgccaaccccaacgccaaccccaacgccaaccccaacgccaaccccaacgccaaccccaacgccaaccccaacgccaaccccaacgccaaccccaacgccaaccccaacgccaaccccaacgccaaccccaacgucgaccccaacgccaaccccaacgccaaccccaacgccaaccccaacgccaaccccaacgccaaccccaacgccaaccccaacgccaaccccaacgccaaccccaacgccaaccccaacgccaaccccaacgccaaccccaacgccaaccccaacgccaaccccaacgccaaccccaacgccaaccccaacgccaaccccaacgccaaccccaacgccaaccccgccgccuacgagcccuccgacaagcacaucaaggaguaccucaacaagauccagaacucccucgccgccuacaucaagcccggcuccgccaacaagcccaaggacgagcucgacuacgccaacgacaucgagaagaagaucugcaagauggagaagugcuccugaggacuagucccuguucccagagcccacuuuuuuuucuuuuuuugaaauaaaauagccugucuuucagaucuaaaaaaaaaaaaaaaaaaaaaaaaaaaaaaaaaaaaaaaaaaaaaaaaaaaaaaaaaaaaaaaaugcaucccccccccccccccccccccccccccccccaaaggcucuuuucagagccaccagaauu

SEQ ID NO: 6389 - RNA, 1315 nt, Artificial Sequence
  mRNA Design a-3 (A64-N5-C30-hSL-N5) comprising derived and/or modified sequence from Pf(3D7)__XP_001351122.1__HsALB_Pf-CSP(19-272)_L(AAY)_Pf-CSP(346-3 65)_L(AAY)_P2 (opt2)
aggagagggcgcuuggcuugcaaggacccugagcugcggcauugaagcacacccaacccaacucgacugaagucagccucacugaaccggaucugagaaucuucucucucugggcuugccagggcucuccgaaccuagcuagcauccucuucaauuccaacuagaaagcuuaccaugaagugggucaccuucaucucccuccucuuccucuucuccuccgccuacucccucuuccaggaguaccagugcuacggcuccuccuccaacacccgcguccucaacgagcucaacuacgacaacgccggcaccaaccucuacaacgagcucgagaugaacuacuacggcaagcaggagaacugguacucccucaagaagaacucccgcucccucggcgagaacgacgacggcaacaacgaggacaacgagaagcuccgcaagcccaagcacaagaagcucaagcagcccgccgacggcaaccccgaccccaacgccaaccccaacgucgaccccaacgccaaccccaacgucgaccccaacgccaaccccaacgucgaccccaacgccaaccccaacgccaaccccaacgccaaccccaacgccaaccccaacgccaaccccaacgccaaccccaacgccaaccccaacgccaaccccaacgccaaccccaacgccaaccccaacgccaaccccaacgccaaccccaacgccaaccccaacgccaaccccaacgccaaccccaacgccaaccccaacgccaaccccaacgucgaccccaacgccaaccccaacgccaaccccaacgccaaccccaacgccaaccccaacgccaaccccaacgccaaccccaacgccaaccccaacgccaaccccaacgccaaccccaacgccaaccccaacgccaaccccaacgccaaccccaacgccaaccccaacgccaaccccaacgccaaccccaacgccaaccccaacgccaaccccaacgccaaccccgccgccuacaucaagcccggcuccgccaacaagcccaaggacgagcucgacuacgccaacgacaucgaggccgccuaccaguacaucaaggccaacuccaaguucaucggcaucaccgagcucugaggacuagucccuguucccagagcccacuuuuuuuucuuuuuuugaaauaaaauagccugucuuucagaucuaaaaaaaaaaaaaaaaaaaaaaaaaaaaaaaaaaaaaaaaaaaaaaaaaaaaaaaaaaaaaaaaugcaucccccccccccccccccccccccccccccccaaaggcucuuuucagagccaccagaauu

SEQ ID NO: 6390 - RNA, 1309 nt, Artificial Sequence
  mRNA Design a-3 (A64-N5-C30-hSL-N5) comprising derived and/or modified sequence from Pf(3D7)__XP_001351122.1__HsALB_Pf-CSP(19-272)_L(AAY)_Pf-CSP(346-3 65)_L(AAY)_PADRE (opt2)
aggagagggcgcuuggcuugcaaggacccugagcugcggcauugaagcacacccaacccaacucgacugaagucagccucacugaaccggaucugagaaucuucucucucugggcuugccagggcucuccgaaccuagcuagcauccucuucaauuccaacuagaaagcuuaccaugaagugggucaccuucaucucccuccucuuccucuucuccuccgccuacucccucuuccaggaguaccagugcuacggcuccuccuccaacacccgcguccucaacgagcucaacuacgacaacgccggcaccaaccucuacaacgagcucgagaugaacuacuacggcaagcaggagaacugguacucccucaagaagaacucccgcucccucggcgagaacgacgacggcaacaacgaggacaacgagaagcuccgcaagcccaagcacaagaagcucaagcagcccgccgacggcaaccccgaccccaacgccaaccccaacgucgaccccaacgccaaccccaacgucgaccccaacgccaaccccaacgucgaccccaacgccaaccccaacgccaaccccaacgccaaccccaacgccaaccccaacgccaaccccaacgccaaccccaacgccaaccccaacgccaaccccaacgccaaccccaacgccaaccccaacgccaaccccaacgccaaccccaacgccaaccccaacgccaaccccaacgccaaccccaacgccaaccccaacgccaaccccaacgucgaccccaacgccaaccccaacgccaaccccaacgccaaccccaacgccaaccccaacgccaaccccaacgccaaccccaacgccaaccccaacgccaaccccaacgccaaccccaacgccaaccccaacgccaaccccaacgccaaccccaacgccaaccccaacgccaaccccaacgccaaccccaacgccaaccccaacgccaaccccaacgccaaccccgccgccuacaucaagcccggcuccgccaacaagcccaaggacgagcucgacuacgccaacgacaucgaggccgccuacgccaaguucgucgccgccuggacccucaaggccgccgccugaggacuagucccuguucccagagcccacuuuuuuuucuuuuuuugaaauaaaauagccugucuuucagaucuaaaaaaaaaaaaaaaaaaaaaaaaaaaaaaaaaaaaaaaaaaaaaaaaaaaaaaaaaaaaaaaaugcaucccccccccccccccccccccccccccccccaaaggcucuuuucagagccaccagaauu

SEQ ID NO: 6391 - RNA, 1366 nt, Artificial Sequence
  mRNA Design a-3 (A64-N5-C30-hSL-N5) comprising derived and/or modified sequence from Pf(3D7)__XP_001351122.1__HsALB_Pf-CSP(19-272)_L(G4S)_Pf-CSP(310-3 27)_L(G4S)_Pf-CSP(346-375) (opt2)
aggagagggcgcuuggcuugcaaggacccugagcugcggcauugaagcacacccaacccaacucgacugaagucagccucacugaaccggaucugagaaucuucucucucugggcuugccagggcucuccgaaccuagcuagcauccucuucaauuccaacuagaaagcuuaccaugaagugggucaccuucaucucccuccucuuccucuucuccuccgccuacucccucuuccaggaguaccagugcuacggcuccuccuccaacacccgcguccucaacgagcucaacuacgacaacgccggcaccaaccucuacaacgagcucgagaugaacuacuacggcaagcaggagaacugguacucccucaagaagaacucccgcucccucggcgagaacgacgacggcaacaacgaggacaacgagaagcuccgcaagcccaagcacaagaagcucaagcagcccgccgacggcaaccccgaccccaacgccaaccccaacgucgaccccaacgccaaccccaacgucgaccccaacgccaaccccaacgucgaccccaacgccaaccccaacgccaaccccaacgccaaccccaacgccaaccccaacgccaaccccaacgccaaccccaacgccaaccccaacgccaaccccaacgccaaccccaacgccaaccccaacgccaaccccaacgccaaccccaacgccaaccccaacgccaaccccaacgccaaccccaacgccaaccccaacgccaaccccaacgucgaccccaacgccaaccccaacgccaaccccaacgccaaccccaacgccaaccccaacgccaaccccaacgccaaccccaacgccaaccccaacgccaaccccaacgccaaccccaacgccaaccccaacgccaaccccaacgccaaccccaacgccaaccccaacgccaaccccaacgccaaccccaacgccaaccccaacgccaaccccaacgccaaccccggcggcggcggcuccgagcccuccgacaagcacaucaaggaguaccucaacaagauccagaacucccucggcggcggcggcuccaucaagcccggcuccgccaacaagcccaaggacgagcucgacuacgccaacgacaucgagaagaagaucugcaagauggagaagugcuccugaggacuagucccuguucccagagcccacuuuuuuuucuuuuuuugaaauaaaauagccugucuuucagaucuaaaaaaaaaaaaaaaaaaaaaaaaaaaaaaaaaaaaaaaaaaaaaaaaaaaaaaaaaaaaaaaaugcaucccccccccccccccccccccccccccccccaaaggcucuuuucagagccaccagaauu

SEQ ID NO: 6392 - RNA, 1351 nt, Artificial Sequence
  mRNA Design a-3 (A64-N5-C30-hSL-N5) comprising derived and/or modified sequence from Pf(3D7)__XP_001351122.1__HsALB_Pf-CSP(19-272)_L(G4S)_Pf-CSP(310-3 27)_Pf-CSP(346-375) (opt2)
aggagagggcgcuuggcuugcaaggacccugagcugcggcauugaagcacacccaacccaacucgacugaagucagccucacugaaccggaucugagaaucuucucucucugggcuugccagggcucuccgaaccuagcuagcauccucuucaauuccaacuagaaagcuuaccaugaagugggucaccuucaucucccuccucuuccucuucuccuccgccuacucccucuuccaggaguaccagugcuacggcuccuccuccaacacccgcguccucaacgagcucaacuacgacaacgccggcaccaaccucuacaacgagcucgagaugaacuacuacggcaagcaggagaacugguacucccucaagaagaacucccgcucccucggcgagaacgacgacggcaacaacgaggacaacgagaagcuccgcaagcccaagcacaagaagcucaagcagcccgccgacggcaaccccgaccccaacgccaaccccaacgucgaccccaacgccaaccccaacgucgaccccaacgccaaccccaacgucgaccccaacgccaaccccaacgccaaccccaacgccaaccccaacgccaaccccaacgccaaccccaacgccaaccccaacgccaaccccaacgccaaccccaacgccaaccccaacgccaaccccaacgccaaccccaacgccaaccccaacgccaaccccaacgccaaccccaacgccaaccccaacgccaaccccaacgccaaccccaacgucgaccccaacgccaaccccaacgccaaccccaacgccaaccccaacgccaaccccaacgccaaccccaacgccaaccccaacgccaaccccaacgccaaccccaacgccaaccccaacgccaaccccaacgccaaccccaacgccaaccccaacgccaaccccaacgccaaccccaacgccaaccccaacgccaaccccaacgccaaccccaacgccaaccccggcggcggcggcuccgagcccuccgacaagcacaucaaggaguaccucaacaagauccagaacucccucaucaagcccggcuccgccaacaagcccaaggacgagcucgacuacgccaacgacaucgagaagaagaucugcaagauggagaagugcuccugaggacuagucccuguucccagagcccacuuuuuuuucuuuuuuugaaauaaaauagccugucuuucagaucuaaaaaaaaaaaaaaaaaaaaaaaaaaaaaaaaaaaaaaaaaaaaaaaaaaaaaaaaaaaaaaaaugcaucccccccccccccccccccccccccccccccaaaggcucuuuucagagccaccagaauu

SEQ ID NO: 6393 - RNA, 1351 nt, Artificial Sequence
  mRNA Design a-3 (A64-N5-C30-hSL-N5) comprising derived and/or modified sequence from Pf(3D7)__XP_001351122.1__HsALB_Pf-CSP(19-325) (opt2)
aggagagggcgcuuggcuugcaaggacccugagcugcggcauugaagcacacccaacccaacucgacugaagucagccucacugaaccggaucugagaaucuucucucucugggcuugccagggcucuccgaaccuagcuagcauccucuucaauuccaacuagaaagcuuaccaugaagugggucaccuucaucucccuccucuuccucuucuccuccgccuacucccucuuccaggaguaccagugcuacggcuccuccuccaacacccgcguccucaacgagcucaacuacgacaacgccggcaccaaccucuacaacgagcucgagaugaacuacuacggcaagcaggagaacugguacucccucaagaagaacucccgcucccucggcgagaacgacgacggcaacaacgaggacaacgagaagcuccgcaagcccaagcacaagaagcucaagcagcccgccgacggcaaccccgaccccaacgccaaccccaacgucgaccccaacgccaaccccaacgucgaccccaacgccaaccccaacgucgaccccaacgccaaccccaacgccaaccccaacgccaaccccaacgccaaccccaacgccaaccccaacgccaaccccaacgccaaccccaacgccaaccccaacgccaaccccaacgccaaccccaacgccaaccccaacgccaaccccaacgccaaccccaacgccaaccccaacgccaaccccaacgccaaccccaacgccaaccccaacgucgaccccaacgccaaccccaacgccaaccccaacgccaaccccaacgccaaccccaacgccaaccccaacgccaaccccaacgccaaccccaacgccaaccccaacgccaaccccaacgccaaccccaacgccaaccccaacgccaaccccaacgccaaccccaacgccaaccccaacgccaaccccaacgccaaccccaacgccaaccccaacgccaaccccaacaagaacaaccagggcaacggccagggccacaacaugcccaacgaccccaaccgcaacgucgacgagaacgccaacgccaacuccgccgucaagaacaacaacaacgaggagcccuccgacaagcacaucaaggaguaccucaacaagauccagaacugaggacuagucccuguucccagagcccacuuuuuuuucuuuuuuugaaauaaaauagccugucuuucagaucuaaaaaaaaaaaaaaaaaaaaaaaaaaaaaaaaaaaaaaaaaaaaaaaaaaaaaaaaaaaaaaaaugcaucccccccccccccccccccccccccccccccaaaggcucuuuucagagccaccagaauu

SEQ ID NO: 6394 - RNA, 1528 nt, Artificial Sequence
  mRNA Design a-3 (A64-N5-C30-hSL-N5) comprising derived and/or modified sequence from Pf(3D7)__XP_001351122.1__HsALB_Pf-CSP(19-384) (opt2)
aggagagggcgcuuggcuugcaaggacccugagcugcggcauugaagcacacccaacccaacucgacugaagucagccucacugaaccggaucugagaaucuucucucucugggcuugccagggcucuccgaaccuagcuagcauccucuucaauuccaacuagaaagcuuaccaugaagugggucaccuucaucucccuccucuuccucuucuccuccgccuacucccucuuccaggaguaccagugcuacggcuccuccuccaacacccgcguccucaacgagcucaacuacgacaacgccggcaccaaccucuacaacgagcucgagaugaacuacuacggcaagcaggagaacugguacucccucaagaagaacucccgcucccucggcgagaacgacgacggcaacaacgaggacaacgagaagcuccgcaagcccaagcacaagaagcucaagcagcccgccgacggcaaccccgaccccaacgccaaccccaacgucgaccccaacgccaaccccaacgucgaccccaacgccaaccccaacgucgaccccaacgccaaccccaacgccaaccccaacgccaaccccaacgccaaccccaacgccaaccccaacgccaaccccaacgccaaccccaacgccaaccccaacgccaaccccaacgccaaccccaacgccaaccccaacgccaaccccaacgccaaccccaacgccaaccccaacgccaaccccaacgccaaccccaacgccaaccccaacgucgaccccaacgccaaccccaacgccaaccccaacgccaaccccaacgccaaccccaacgccaaccccaacgccaaccccaacgccaaccccaacgccaaccccaacgccaaccccaacgccaaccccaacgccaaccccaacgccaaccccaacgccaaccccaacgccaaccccaacgccaaccccaacgccaaccccaacgccaaccccaacgccaaccccaacaagaacaaccagggcaacggccagggccacaacaugcccaacgaccccaaccgcaacgucgacgagaacgccaacgccaacuccgccgucaagaacaacaacaacgaggagcccuccgacaagcacaucaaggaguaccucaacaagauccagaacucccucuccaccgaguggucccccugcuccgucaccugcggcaacggcauccagguccgcaucaagcccggcuccgccaacaagcccaaggacgagcucgacuacgccaacgacaucgagaagaagaucugcaagauggagaagugcuccuccgucuucaacgucgucaacuccuccugaggacuagucccuguucccagagcccacuuuuuuuucuuuuuuugaaauaaaauagccugucuuucagaucuaaaaaaaaaaaaaaaaaaaaaaaaaaaaaaaaaaaaaaaaaaaaaaaaaaaaaaaaaaaaaaaaugcaucccccccccccccccccccccccccccccccaaaggcucuuuucagagccaccagaauu

SEQ ID NO: 6395 - RNA, 1666 nt, Artificial Sequence
  mRNA Design a-3 (A64-N5-C30-hSL-N5) comprising derived and/or modified sequence from Pf(3D7)__XP_001351122.1__HsALB_Pf-CSP(19-384)_TM domain HA (opt2)
aggagagggcgcuuggcuugcaaggacccugagcugcggcauugaagcacacccaacccaacucgacugaagucagccucacugaaccggaucugagaaucuucucucucugggcuugccagggcucuccgaaccuagcuagcauccucuucaauuccaacuagaaagcuuaccaugaagugggucaccuucaucucccuccucuuccucuucuccuccgccuacucccucuuccaggaguaccagugcuacggcuccuccuccaacacccgcguccucaacgagcucaacuacgacaacgccggcaccaaccucuacaacgagcucgagaugaacuacuacggcaagcaggagaacugguacucccucaagaagaacucccgcucccucggcgagaacgacgacggcaacaacgaggacaacgagaagcuccgcaagcccaagcacaagaagcucaagcagcccgccgacggcaaccccgaccccaacgccaaccccaacgucgaccccaacgccaaccccaacgucgaccccaacgccaaccccaacgucgaccccaacgccaaccccaacgccaaccccaacgccaaccccaacgccaaccccaacgccaaccccaacgccaaccccaacgccaaccccaacgccaaccccaacgccaaccccaacgccaaccccaacgccaaccccaacgccaaccccaacgccaaccccaacgccaaccccaacgccaaccccaacgccaaccccaacgccaaccccaacgucgaccccaacgccaaccccaacgccaaccccaacgccaaccccaacgccaaccccaacgccaaccccaacgccaaccccaacgccaaccccaacgccaaccccaacgccaaccccaacgccaaccccaacgccaaccccaacgccaaccccaacgccaaccccaacgccaaccccaacgccaaccccaacgccaaccccaacgccaaccccaacgccaaccccaacaagaacaaccagggcaacggccagggccacaacaugcccaacgaccccaaccgcaacgucgacgagaacgccaacgccaacuccgccgucaagaacaacaacaacgaggagcccuccgacaagcacaucaaggaguaccucaacaagauccagaacucccucuccaccgaguggucccccugcuccgucaccugcggcaacggcauccagguccgcaucaagcccggcuccgccaacaagcccaaggacgagcucgacuacgccaacgacaucgagaagaagaucugcaagauggagaagugcuccuccgucuucaacgucgucaacuccuccaagcucgaguccacccgcaucuaccagauccucgccaucuacuccaccgucgccuccucccucguccucgucgucucccucggcgccaucuccuucuggaugugcuccaacggcucccuccagugccgcaucugcaucugaggacuagucccuguucccagagcccacuuuuuuuucuuuuuuugaaauaaaauagccugucuuucagaucuaaaaaaaaaaaaaaaaaaaaaaaaaaaaaaaaaaaaaaaaaaaaaaaaaaaaaaaaaaaaaaaaugcaucccccccccccccccccccccccccccccccaaaggcucuuuucagagccaccagaauu

SEQ ID NO: 6396 - RNA, 1378 nt, Artificial Sequence
  mRNA Design a-3 (A64-N5-C30-hSL-N5) comprising derived and/or modified sequence from Pf(3D7)__XP_001351122.1__HsALB_Pf-CSP(82-397) (opt2)
aggagagggcgcuuggcuugcaaggacccugagcugcggcauugaagcacacccaacccaacucgacugaagucagccucacugaaccggaucugagaaucuucucucucugggcuugccagggcucuccgaaccuagcuagcauccucuucaauuccaacuagaaagcuuaccaugaagugggucaccuucaucucccuccucuuccucuucuccuccgccuacuccgacaacgagaagcuccgcaagcccaagcacaagaagcucaagcagcccgccgacggcaaccccgaccccaacgccaaccccaacgucgaccccaacgccaaccccaacgucgaccccaacgccaaccccaacgucgaccccaacgccaaccccaacgccaaccccaacgccaaccccaacgccaaccccaacgccaaccccaacgccaaccccaacgccaaccccaacgccaaccccaacgccaaccccaacgccaaccccaacgccaaccccaacgccaaccccaacgccaaccccaacgccaaccccaacgccaaccccaacgccaaccccaacgccaaccccaacgucgaccccaacgccaaccccaacgccaaccccaacgccaaccccaacgccaaccccaacgccaaccccaacgccaaccccaacgccaaccccaacgccaaccccaacgccaaccccaacgccaaccccaacgccaaccccaacgccaaccccaacgccaaccccaacgccaaccccaacgccaaccccaacgccaaccccaacgccaaccccaacgccaaccccaacaagaacaaccagggcaacggccagggccacaacaugcccaacgaccccaaccgcaacgucgacgagaacgccaacgccaacuccgccgucaagaacaacaacaacgaggagcccuccgacaagcacaucaaggaguaccucaacaagauccagaacucccucuccaccgaguggucccccugcuccgucaccugcggcaacggcauccagguccgcaucaagcccggcuccgccaacaagcccaaggacgagcucgacuacgccaacgacaucgagaagaagaucugcaagauggagaagugcuccuccgucuucaacgucgucaacuccuccaucggccucaucaugguccucuccuuccucuuccucaacugaggacuagucccuguucccagagcccacuuuuuuuucuuuuuuugaaauaaaauagccugucuuucagaucuaaaaaaaaaaaaaaaaaaaaaaaaaaaaaaaaaaaaaaaaaaaaaaaaaaaaaaaaaaaaaaaaugcaucccccccccccccccccccccccccccccccaaaggcucuuuucagagccaccagaauu

SEQ ID NO: 6397 - RNA, 730 nt, Artificial Sequence
  mRNA Design a-3 (A64-N5-C30-hSL-N5) comprising derived and/or modified sequence from Pf(3D7)__XP_001351122.1__HsALB_Pf-CSP(93-192) (opt2)
aggagagggcgcuuggcuugcaaggacccugagcugcggcauugaagcacacccaacccaacucgacugaagucagccucacugaaccggaucugagaaucuucucucucugggcuugccagggcucuccgaaccuagcuagcauccucuucaauuccaacuagaaagcuuaccaugaagugggucaccuucaucucccuccucuuccucuucuccuccgccuacuccaagcucaagcagcccgccgacggcaaccccgaccccaacgccaaccccaacgucgaccccaacgccaaccccaacgucgaccccaacgccaaccccaacgucgaccccaacgccaaccccaacgccaaccccaacgccaaccccaacgccaaccccaacgccaaccccaacgccaaccccaacgccaaccccaacgccaaccccaacgccaaccccaacgccaaccccaacgccaaccccaacgccaaccccaacgccaaccccaacgccaaccccaacgccaaccccaacgccaaccccugaggacuagucccuguucccagagcccacuuuuuuuucuuuuuuugaaauaaaauagccugucuuucagaucuaaaaaaaaaaaaaaaaaaaaaaaaaaaaaaaaaaaaaaaaaaaaaaaaaaaaaaaaaaaaaaaaugcaucccccccccccccccccccccccccccccccaaaggcucuuuucagagccaccagaauu

SEQ ID NO: 6398 - RNA, 970 nt, Artificial Sequence
  mRNA Design a-3 (A64-N5-C30-hSL-N5) comprising derived and/or modified sequence from Pf(3D7)__XP_001351122.1__HsALB_Pf-CSP(93-272) (opt2)
aggagagggcgcuuggcuugcaaggacccugagcugcggcauugaagcacacccaacccaacucgacugaagucagccucacugaaccggaucugagaaucuucucucucugggcuugccagggcucuccgaaccuagcuagcauccucuucaauuccaacuagaaagcuuaccaugaagugggucaccuucaucucccuccucuuccucuucuccuccgccuacuccaagcucaagcagcccgccgacggcaaccccgaccccaacgccaaccccaacgucgaccccaacgccaaccccaacgucgaccccaacgccaaccccaacgucgaccccaacgccaaccccaacgccaaccccaacgccaaccccaacgccaaccccaacgccaaccccaacgccaaccccaacgccaaccccaacgccaaccccaacgccaaccccaacgccaaccccaacgccaaccccaacgccaaccccaacgccaaccccaacgccaaccccaacgccaaccccaacgccaaccccaacgccaaccccaacgucgaccccaacgccaaccccaacgccaaccccaacgccaaccccaacgccaaccccaacgccaaccccaacgccaaccccaacgccaaccccaacgccaaccccaacgccaaccccaacgccaaccccaacgccaaccccaacgccaaccccaacgccaaccccaacgccaaccccaacgccaaccccaacgccaaccccaacgccaaccccaacgccaaccccugaggacuagucccuguucccagagcccacuuuuuuuucuuuuuuugaaauaaaauagccugucuuucagaucuaaaaaaaaaaaaaaaaaaaaaaaaaaaaaaaaaaaaaaaaaaaaaaaaaaaaaaaaaaaaaaaaugcaucccccccccccccccccccccccccccccccaaaggcucuuuucagagccaccagaauu

SEQ ID NO: 6399 - RNA, 1345 nt, Artificial Sequence
  mRNA Design a-3 (A64-N5-C30-hSL-N5) comprising derived and/or modified sequence from Pf(3D7)__XP_001351122.1__HsALB_Pf-CSP(93-397) (opt2)
aggagagggcgcuuggcuugcaaggacccugagcugcggcauugaagcacacccaacccaacucgacugaagucagccucacugaaccggaucugagaaucuucucucucugggcuugccagggcucuccgaaccuagcuagcauccucuucaauuccaacuagaaagcuuaccaugaagugggucaccuucaucucccuccucuuccucuucuccuccgccuacuccaagcucaagcagcccgccgacggcaaccccgaccccaacgccaaccccaacgucgaccccaacgccaaccccaacgucgaccccaacgccaaccccaacgucgaccccaacgccaaccccaacgccaaccccaacgccaaccccaacgccaaccccaacgccaaccccaacgccaaccccaacgccaaccccaacgccaaccccaacgccaaccccaacgccaaccccaacgccaaccccaacgccaaccccaacgccaaccccaacgccaaccccaacgccaaccccaacgccaaccccaacgccaaccccaacgucgaccccaacgccaaccccaacgccaaccccaacgccaaccccaacgccaaccccaacgccaaccccaacgccaaccccaacgccaaccccaacgccaaccccaacgccaaccccaacgccaaccccaacgccaaccccaacgccaaccccaacgccaaccccaacgccaaccccaacgccaaccccaacgccaaccccaacgccaaccccaacgccaaccccaacaagaacaaccagggcaacggccagggccacaacaugcccaacgaccccaaccgcaacgucgacgagaacgccaacgccaacuccgccgucaagaacaacaacaacgaggagcccuccgacaagcacaucaaggaguaccucaacaagauccagaacucccucuccaccgaguggucccccugcuccgucaccugcggcaacggcauccagguccgcaucaagcccggcuccgccaacaagcccaaggacgagcucgacuacgccaacgacaucgagaagaagaucugcaagauggagaagugcuccuccgucuucaacgucgucaacuccuccaucggccucaucaugguccucuccuuccucuuccucaacugaggacuagucccuguucccagagcccacuuuuuuuucuuuuuuugaaauaaaauagccugucuuucagaucuaaaaaaaaaaaaaaaaaaaaaaaaaaaaaaaaaaaaaaaaaaaaaaaaaaaaaaaaaaaaaaaaugcaucccccccccccccccccccccccccccccccaaaggcucuuuucagagccaccagaauu

SEQ ID NO: 6400 - RNA, 715 nt, Artificial Sequence
  mRNA Design a-3 (A64-N5-C30-hSL-N5) comprising derived and/or modified sequence from Pf(3D7)__XP_001351122.1__HsALB_Pf-CSP(98-192) (opt2)
aggagagggcgcuuggcuugcaaggacccugagcugcggcauugaagcacacccaacccaacucgacugaagucagccucacugaaccggaucugagaaucuucucucucugggcuugccagggcucuccgaaccuagcuagcauccucuucaauuccaacuagaaagcuuaccaugaagugggucaccuucaucucccuccucuuccucuucuccuccgccuacuccgccgacggcaaccccgaccccaacgccaaccccaacgucgaccccaacgccaaccccaacgucgaccccaacgccaaccccaacgucgaccccaacgccaaccccaacgccaaccccaacgccaaccccaacgccaaccccaacgccaaccccaacgccaaccccaacgccaaccccaacgccaaccccaacgccaaccccaacgccaaccccaacgccaaccccaacgccaaccccaacgccaaccccaacgccaaccccaacgccaaccccaacgccaaccccugaggacuagucccuguucccagagcccacuuuuuuuucuuuuuuugaaauaaaauagccugucuuucagaucuaaaaaaaaaaaaaaaaaaaaaaaaaaaaaaaaaaaaaaaaaaaaaaaaaaaaaaaaaaaaaaaaugcaucccccccccccccccccccccccccccccccaaaggcucuuuucagagccaccagaauu

SEQ ID NO: 6401 - RNA, 955 nt, Artificial Sequence
  mRNA Design a-3 (A64-N5-C30-hSL-N5) comprising derived and/or modified sequence from Pf(3D7)__XP_001351122.1__HsALB_Pf-CSP(98-272) (opt2)
aggagagggcgcuuggcuugcaaggacccugagcugcggcauugaagcacacccaacccaacucgacugaagucagccucacugaaccggaucugagaaucuucucucucugggcuugccagggcucuccgaaccuagcuagcauccucuucaauuccaacuagaaagcuuaccaugaagugggucaccuucaucucccuccucuuccucuucuccuccgccuacuccgccgacggcaaccccgaccccaacgccaaccccaacgucgaccccaacgccaaccccaacgucgaccccaacgccaaccccaacgucgaccccaacgccaaccccaacgccaaccccaacgccaaccccaacgccaaccccaacgccaaccccaacgccaaccccaacgccaaccccaacgccaaccccaacgccaaccccaacgccaaccccaacgccaaccccaacgccaaccccaacgccaaccccaacgccaaccccaacgccaaccccaacgccaaccccaacgccaaccccaacgucgaccccaacgccaaccccaacgccaaccccaacgccaaccccaacgccaaccccaacgccaaccccaacgccaaccccaacgccaaccccaacgccaaccccaacgccaaccccaacgccaaccccaacgccaaccccaacgccaaccccaacgccaaccccaacgccaaccccaacgccaaccccaacgccaaccccaacgccaaccccaacgccaaccccugaggacuagucccuguucccagagcccacuuuuuuuucuuuuuuugaaauaaaauagccugucuuucagaucuaaaaaaaaaaaaaaaaaaaaaaaaaaaaaaaaaaaaaaaaaaaaaaaaaaaaaaaaaaaaaaaaugcaucccccccccccccccccccccccccccccccaaaggcucuuuucagagccaccagaauu

SEQ ID NO: 6402 - RNA, 1261 nt, Artificial Sequence
  mRNA Design a-3 (A64-N5-C30-hSL-N5) comprising derived and/or modified sequence from Pf(3D7)__XP_001351122.1__HsALB_Pf-CSP(98-374) (opt2)
aggagagggcgcuuggcuugcaaggacccugagcugcggcauugaagcacacccaacccaacucgacugaagucagccucacugaaccggaucugagaaucuucucucucugggcuugccagggcucuccgaaccuagcuagcauccucuucaauuccaacuagaaagcuuaccaugaagugggucaccuucaucucccuccucuuccucuucuccuccgccuacuccgccgacggcaaccccgaccccaacgccaaccccaacgucgaccccaacgccaaccccaacgucgaccccaacgccaaccccaacgucgaccccaacgccaaccccaacgccaaccccaacgccaaccccaacgccaaccccaacgccaaccccaacgccaaccccaacgccaaccccaacgccaaccccaacgccaaccccaacgccaaccccaacgccaaccccaacgccaaccccaacgccaaccccaacgccaaccccaacgccaaccccaacgccaaccccaacgccaaccccaacgucgaccccaacgccaaccccaacgccaaccccaacgccaaccccaacgccaaccccaacgccaaccccaacgccaaccccaacgccaaccccaacgccaaccccaacgccaaccccaacgccaaccccaacgccaaccccaacgccaaccccaacgccaaccccaacgccaaccccaacgccaaccccaacgccaaccccaacgccaaccccaacgccaaccccaacaagaacaaccagggcaacggccagggccacaacaugcccaacgaccccaaccgcaacgucgacgagaacgccaacgccaacuccgccgucaagaacaacaacaacgaggagcccuccgacaagcacaucaaggaguaccucaacaagauccagaacucccucuccaccgaguggucccccugcuccgucaccugcggcaacggcauccagguccgcaucaagcccggcuccgccaacaagcccaaggacgagcucgacuacgccaacgacaucgagaagaagaucugcaagauggagaagugcugaggacuagucccuguucccagagcccacuuuuuuuucuuuuuuugaaauaaaauagccugucuuucagaucuaaaaaaaaaaaaaaaaaaaaaaaaaaaaaaaaaaaaaaaaaaaaaaaaaaaaaaaaaaaaaaaaugcaucccccccccccccccccccccccccccccccaaaggcucuuuucagagccaccagaauu

SEQ ID NO: 6403 - RNA, 1330 nt, Artificial Sequence
  mRNA Design a-3 (A64-N5-C30-hSL-N5) comprising derived and/or modified sequence from Pf(3D7)__XP_001351122.1__HsALB_Pf-CSP(98-397) (opt2)
aggagagggcgcuuggcuugcaaggacccugagcugcggcauugaagcacacccaacccaacucgacugaagucagccucacugaaccggaucugagaaucuucucucucugggcuugccagggcucuccgaaccuagcuagcauccucuucaauuccaacuagaaagcuuaccaugaagugggucaccuucaucucccuccucuuccucuucuccuccgccuacuccgccgacggcaaccccgaccccaacgccaaccccaacgucgaccccaacgccaaccccaacgucgaccccaacgccaaccccaacgucgaccccaacgccaaccccaacgccaaccccaacgccaaccccaacgccaaccccaacgccaaccccaacgccaaccccaacgccaaccccaacgccaaccccaacgccaaccccaacgccaaccccaacgccaaccccaacgccaaccccaacgccaaccccaacgccaaccccaacgccaaccccaacgccaaccccaacgccaaccccaacgucgaccccaacgccaaccccaacgccaaccccaacgccaaccccaacgccaaccccaacgccaaccccaacgccaaccccaacgccaaccccaacgccaaccccaacgccaaccccaacgccaaccccaacgccaaccccaacgccaaccccaacgccaaccccaacgccaaccccaacgccaaccccaacgccaaccccaacgccaaccccaacgccaaccccaacaagaacaaccagggcaacggccagggccacaacaugcccaacgaccccaaccgcaacgucgacgagaacgccaacgccaacuccgccgucaagaacaacaacaacgaggagcccuccgacaagcacaucaaggaguaccucaacaagauccagaacucccucuccaccgaguggucccccugcuccgucaccugcggcaacggcauccagguccgcaucaagcccggcuccgccaacaagcccaaggacgagcucgacuacgccaacgacaucgagaagaagaucugcaagauggagaagugcuccuccgucuucaacgucgucaacuccuccaucggccucaucaugguccucuccuuccucuuccucaacugaggacuagucccuguucccagagcccacuuuuuuuucuuuuuuugaaauaaaauagccugucuuucagaucuaaaaaaaaaaaaaaaaaaaaaaaaaaaaaaaaaaaaaaaaaaaaaaaaaaaaaaaaaaaaaaaaugcaucccccccccccccccccccccccccccccccaaaggcucuuuucagagccaccagaauu

SEQ ID NO: 6404 - RNA, 1657 nt, Artificial Sequence
  mRNA Design a-3 (A64-N5-C30-hSL-N5) comprising derived and/or modified sequence from Pf(3D7)__XP_001351122.1__HsALB_Pf-CSP(199-377)_L(PVTN)_HBsAg (opt2)
aggagagggcgcuuggcuugcaaggacccugagcugcggcauugaagcacacccaacccaacucgacugaagucagccucacugaaccggaucugagaaucuucucucucugggcuugccagggcucuccgaaccuagcuagcauccucuucaauuccaacuagaaagcuuaccaugaagugggucaccuucaucucccuccucuuccucuucuccuccgccuacuccgaccccaacgccaaccccaacgccaaccccaacgccaaccccaacgccaaccccaacgccaaccccaacgccaaccccaacgccaaccccaacgccaaccccaacgccaaccccaacgccaaccccaacgccaaccccaacgccaaccccaacgccaaccccaacgccaaccccaacgccaaccccaacgccaaccccaacgccaaccccaacgccaaccccaacaagaacaaccagggcaacggccagggccacaacaugcccaacgaccccaaccgcaacgucgacgagaacgccaacgccaacuccgccgucaagaacaacaacaacgaggagcccuccgacaagcacaucaaggaguaccucaacaagauccagaacucccucuccaccgaguggucccccugcuccgucaccugcggcaacggcauccagguccgcaucaagcccggcuccgccaacaagcccaaggacgagcucgacuacgccaacgacaucgagaagaagaucugcaagauggagaagugcuccuccguccccgucaccaacauggagaacaucaccuccggcuuccucggcccccuccucguccuccaggccggcuucuuccuccucacccgcauccucaccaucccccagucccucgacuccugguggaccucccucaacuuccucggcggcucccccgucugccucggccagaacucccagucccccaccuccaaccacucccccaccuccugcccccccaucugccccggcuaccgcuggaugugccuccgccgcuucaucaucuuccucuucauccuccuccucugccucaucuuccuccucguccuccucgacuaccagggcaugcuccccgucugcccccucauccccggcuccaccaccaccaacaccggccccugcaagaccugcaccacccccgcccagggcaacuccauguuccccuccugcugcugcaccaagcccaccgacggcaacugcaccugcauccccauccccuccuccugggccuucgccaaguaccucugggagugggccuccguccgcuucuccuggcucucccuccucguccccuucguccagugguucgucggccucucccccaccgucuggcucuccgccaucuggaugaugugguacuggggccccucccucuacuccaucgucucccccuucaucccccuccuccccaucuucuucugccucugggucuacaucugaggacuagucccuguucccagagcccacuuuuuuuucuuuuuuugaaauaaaauagccugucuuucagaucuaaaaaaaaaaaaaaaaaaaaaaaaaaaaaaaaaaaaaaaaaaaaaaaaaaaaaaaaaaaaaaaaugcaucccccccccccccccccccccccccccccccaaaggcucuuuucagagccaccagaauu

SEQ ID NO: 6405 - RNA, 1567 nt, Artificial Sequence
  mRNA Design a-3 (A64-N5-C30-hSL-N5) comprising derived and/or modified sequence from Pf(3D7)__XP_001351122.1__Pf-CSP (opt3)
aggagagggcgcuuggcuugcaaggacccugagcugcggcauugaagcacacccaacccaacucgacugaagucagccucacugaaccggaucugagaaucuucucucucugggcuugccagggcucuccgaaccuagcuagcauccucuucaauuccaacuagaaagcuuaccaugaugagaaagcuggccauccucagcguguccucuuuccuuuuugucgaggcucuguuccaggaauaccaaugcuauggcucaaguagcaacaccaggguuuugaaugaguuaaacuacgacaaugcagggacaaaccuguauaaugaacuagagaugaacuacuauggaaaacaggaaaauugguacucccucaagaaaaacucucggucgcugggugagaaugaugacggcaacaaugaggauaacgaaaaacuucgcaagcccaagcacaagaaacugaagcagccugccgacgggaauccagauccgaacgcgaaucccaacguggacccuaacgcuaauccaaacguagaucccaaugccaacccuaauguggacccaaacgcaaaucccaacgccaauccuaacgcuaauccaaacgcaaauccgaacgccaaucccaacgcuaacccuaaugccaacccaaaugcgaaccccaaugcaaacccuaaugccaacccaaaugcuaaccccaaugccaacccgaaugcaaacccuaaugcuaaccccaacgccaauccaaacgcgaauccuaacgccaaucccaacgucgauccaaaugcaaaccccaaugcuaacccuaaugccaacccaaaugcuaacccgaaugccaaccccaacgcaaauccuaacgccaauccaaacgcuaaucccaacgcgaauccuaacgcaaauccaaacgccaaucccaacgcuaauccgaacgccaauccuaacgcaaauccaaacgccaaccccaaugcuaacccuaaugccaaccccaaugcaaacccaaauaaaaacaaucagggaaacggccaaggucauaauaugccuaacgaccccaaucgaaacguggaugagaaugcgaacgcuaacucagccguuaagaauaacaauaacgaggaaccaagcgacaaacacauuaaggaguauuugaauaagauacagaacagucucuccacugaauggucuccguguagcgugacgugcgggaauggaauccagguccguauuaaaccuggcuccgcaaacaagcccaaagaugagcuggacuacgccaaugacaucgaaaagaaaauuuguaagauggagaaaugcucaaguguguuuaacguaguuaauagcucuaucggccugauaauggugcucuccuucuuauuucugaacugaggacuagucccuguucccagagcccacuuuuuuuucuuuuuuugaaauaaaauagccugucuuucagaucuaaaaaaaaaaaaaaaaaaaaaaaaaaaaaaaaaaaaaaaaaaaaaaaaaaaaaaaaaaaaaaaaugcaucccccccccccccccccccccccccccccccaaaggcucuuuucagagccaccagaauu

SEQ ID NO: 6406 - RNA, 1498 nt, Artificial Sequence
  mRNA Design a-3 (A64-N5-C30-hSL-N5) comprising derived and/or modified sequence from Pf(3D7)__XP_001351122.1__Pf-CSP(1-374) (opt3)
aggagagggcgcuuggcuugcaaggacccugagcugcggcauugaagcacacccaacccaacucgacugaagucagccucacugaaccggaucugagaaucuucucucucugggcuugccagggcucuccgaaccuagcuagcauccucuucaauuccaacuagaaagcuuaccaugaugagaaagcuggccauccucagcguguccucuuuccuuuuugucgaggcucuguuccaggaauaccaaugcuauggcucaaguagcaacaccaggguuuugaaugaguuaaacuacgacaaugcagggacaaaccuguauaaugaacuagagaugaacuacuauggaaaacaggaaaauugguacucccucaagaaaaacucucggucgcugggugagaaugaugacggcaacaaugaggauaacgaaaaacuucgcaagcccaagcacaagaaacugaagcagccugccgacgggaauccagauccgaacgcgaaucccaacguggacccuaacgcuaauccaaacguagaucccaaugccaacccuaauguggacccaaacgcaaaucccaacgccaauccuaacgcuaauccaaacgcaaauccgaacgccaaucccaacgcuaacccuaaugccaacccaaaugcgaaccccaaugcaaacccuaaugccaacccaaaugcuaaccccaaugccaacccgaaugcaaacccuaaugcuaaccccaacgccaauccaaacgcgaauccuaacgccaaucccaacgucgauccaaaugcaaaccccaaugcuaacccuaaugccaacccaaaugcuaacccgaaugccaaccccaacgcaaauccuaacgccaauccaaacgcuaaucccaacgcgaauccuaacgcaaauccaaacgccaaucccaacgcuaauccgaacgccaauccuaacgcaaauccaaacgccaaccccaaugcuaacccuaaugccaaccccaaugcaaacccaaauaaaaacaaucagggaaacggccaaggucauaauaugccuaacgaccccaaucgaaacguggaugagaaugcgaacgcuaacucagccguuaagaauaacaauaacgaggaaccaagcgacaaacacauuaaggaguauuugaauaagauacagaacagucucuccacugaauggucuccguguagcgugacgugcgggaauggaauccagguccguauuaaaccuggcuccgcaaacaagcccaaagaugagcuggacuacgccaaugacaucgaaaagaaaauuuguaagauggagaaaugcugaggacuagucccuguucccagagcccacuuuuuuuucuuuuuuugaaauaaaauagccugucuuucagaucuaaaaaaaaaaaaaaaaaaaaaaaaaaaaaaaaaaaaaaaaaaaaaaaaaaaaaaaaaaaaaaaaugcaucccccccccccccccccccccccccccccccaaaggcucuuuucagagccaccagaauu

SEQ ID NO: 6407 - RNA, 1351 nt, Artificial Sequence
  mRNA Design a-3 (A64-N5-C30-hSL-N5) comprising derived and/or modified sequence from Pf(3D7)__XP_001351122.1__Pf-CSP(1-325) (opt3)
aggagagggcgcuuggcuugcaaggacccugagcugcggcauugaagcacacccaacccaacucgacugaagucagccucacugaaccggaucugagaaucuucucucucugggcuugccagggcucuccgaaccuagcuagcauccucuucaauuccaacuagaaagcuuaccaugaugagaaagcuggccauccucagcguguccucuuuccuuuuugucgaggcucuguuccaggaauaccaaugcuauggcucaaguagcaacaccaggguuuugaaugaguuaaacuacgacaaugcagggacaaaccuguauaaugaacuagagaugaacuacuauggaaaacaggaaaauugguacucccucaagaaaaacucucggucgcugggugagaaugaugacggcaacaaugaggauaacgaaaaacuucgcaagcccaagcacaagaaacugaagcagccugccgacgggaauccagauccgaacgcgaaucccaacguggacccuaacgcuaauccaaacguagaucccaaugccaacccuaauguggacccaaacgcaaaucccaacgccaauccuaacgcuaauccaaacgcaaauccgaacgccaaucccaacgcuaacccuaaugccaacccaaaugcgaaccccaaugcaaacccuaaugccaacccaaaugcuaaccccaaugccaacccgaaugcaaacccuaaugcuaaccccaacgccaauccaaacgcgaauccuaacgccaaucccaacgucgauccaaaugcaaaccccaaugcuaacccuaaugccaacccaaaugcuaacccgaaugccaaccccaacgcaaauccuaacgccaauccaaacgcuaaucccaacgcgaauccuaacgcaaauccaaacgccaaucccaacgcuaauccgaacgccaauccuaacgcaaauccaaacgccaaccccaaugcuaacccuaaugccaaccccaaugcaaacccaaauaaaaacaaucagggaaacggccaaggucauaauaugccuaacgaccccaaucgaaacguggaugagaaugcgaacgcuaacucagccguuaagaauaacaauaacgaggaaccaagcgacaaacacauuaaggaguauuugaauaagauacagaacugaggacuagucccuguucccagagcccacuuuuuuuucuuuuuuugaaauaaaauagccugucuuucagaucuaaaaaaaaaaaaaaaaaaaaaaaaaaaaaaaaaaaaaaaaaaaaaaaaaaaaaaaaaaaaaaaaugcaucccccccccccccccccccccccccccccccaaaggcucuuuucagagccaccagaauu

SEQ ID NO: 6408 - RNA, 1567 nt, Artificial Sequence
  mRNA Design a-3 (A64-N5-C30-hSL-N5) comprising derived and/or modified sequence from Pf(3D7)__XP_001351122.1__HsALB_Pf-CSP(19-397) (opt3)
aggagagggcgcuuggcuugcaaggacccugagcugcggcauugaagcacacccaacccaacucgacugaagucagccucacugaaccggaucugagaaucuucucucucugggcuugccagggcucuccgaaccuagcuagcauccucuucaauuccaacuagaaagcuuaccaugaagugggugaccuucaucagccugcucuuucuuuucuccucugccuacucacuguuucaggaguaucaaugcuacggcaguagcuccaacacaagagucuugaaugaauuaaacuaugacaaugcugggacuaaccuguacaaugagcuagaaaugaacuauuacggaaaacaggagaauugguauucucucaagaaaaacucgaggucacugggugaaaaugaugacggcaacaaugaggauaacgagaaacuucggaagcccaagcacaagaaacugaagcagccugcagacgggaauccagauccgaacgccaaucccaacguugacccuaacgcgaauccaaacguggaucccaaugcuaacccuaauguagacccaaacgccaaucccaacgcaaauccuaacgccaauccaaacgcuaauccgaacgcaaaucccaacgccaacccuaaugcuaacccaaaugccaaccccaaugcgaacccuaaugcaaacccaaaugccaaccccaaugcuaacccgaaugccaacccuaaugcaaaccccaacgcuaauccaaacgccaauccuaacgcgaaucccaacguggauccaaaugccaaccccaaugcaaacccuaaugcuaacccaaaugccaacccgaaugcuaaccccaacgccaauccuaacgcaaauccaaacgccaaucccaacgcuaauccuaacgcgaauccaaacgcaaaucccaacgccaauccgaacgcuaauccuaacgccaauccaaacgcaaaccccaaugccaacccuaaugcuaaccccaaugccaacccaaauaaaaacaaucagggaaacggccaaggucauaauaugccuaacgaccccaaucgcaacgucgaugaaaaugcaaacgcgaacagcgcugugaagaauaacaauaacgaggaaccaagugacaaacacauuaaggaguacuugaauaagauacagaacucccucucuacggaguggagcccguguuccguuaccugcgggaauggaauccaggugcgaauuaaaccuggcucagccaacaagcccaaagaugaacuggacuacgcaaaugacaucgagaagaaaauuuguaagauggaaaaaugcaguagcgucuucaacgugguaaauucuuccaucggccugauaaugguucucucauuuuuauuccugaacugaggacuagucccuguucccagagcccacuuuuuuuucuuuuuuugaaauaaaauagccugucuuucagaucuaaaaaaaaaaaaaaaaaaaaaaaaaaaaaaaaaaaaaaaaaaaaaaaaaaaaaaaaaaaaaaaaugcaucccccccccccccccccccccccccccccccaaaggcucuuuucagagccaccagaauu

SEQ ID NO: 6409 - RNA, 1585 nt, Artificial Sequence
  mRNA Design a-3 (A64-N5-C30-hSL-N5) comprising derived and/or modified sequence from Pf(3D7)__XP_001351122.1__HsIns-iso1_Pf-CSP(19-397) (opt3)
aggagagggcgcuuggcuugcaaggacccugagcugcggcauugaagcacacccaacccaacucgacugaagucagccucacugaaccggaucugagaaucuucucucucugggcuugccagggcucuccgaaccuagcuagcauccucuucaauuccaacuagaaagcuuaccauggcccuguggaugagacuccuuccccuguuggcuuuacuggcacuauggggcccugacccagccgcggcucucuuccaggaguaccaaugcuaugggagcuccucuaacaccagggugcugaaugaacuuaacuacgauaaugccggaacaaaccuguauaaugaguuggaaaugaacuacuaugguaagcaggagaauugguacucacucaaaaagaacagucggagccugggcgaaaaugacgaugggaacaaugaggacaacgagaaacugcgcaagccgaaacacaagaagcucaaacagcccgcagauggaaauccugacccaaacgccaaucccaacgucgauccuaacgcuaauccaaacguugaccccaaugcaaacccuaauguggauccaaacgccaauccgaacgcuaaucccaacgccaauccuaacgcgaauccaaacgcaaaucccaacgccaacccuaaugcuaacccaaaugccaaccccaaugcaaacccgaaugcuaacccuaaugccaaccccaaugcgaacccaaaugccaacccuaaugcaaaccccaacgcuaauccaaacgccaaucccaacgcuaauccuaacguagacccaaaugccaacccgaaugcaaaccccaaugccaacccuaaugcuaacccaaaugcgaaccccaacgcaaauccuaacgccaauccaaacgcuaaucccaacgccaauccgaacgcaaauccuaacgccaauccaaacgcuaaucccaacgccaauccuaacgcaaaucccaacgcgaacccaaaugcuaacccuaaugccaaccccaaugcaaacccaaauaagaacaaucagggcaacggucaagggcauaauaugccgaacgauccuaaucgaaacguggacgaaaaugccaacgcuaacuccgccgucaaaaauaacaauaacgaggaacccucugauaagcacaucaaagaguauuuaaauaagauucagaacucgcugucaacugaguggagcccauguagugugacgugcggaaauggcauacagguucguaucaagcccggcuccgcaaacaaaccuaaggacgaacuugacuacgcuaaugauauugagaaaaagaucuguaaaauggaaaagugcucuagcguguuuaacgucguaaauuccucaauuggguugaucauggugcugaguuuccuauuucucaacugaggacuagucccuguucccagagcccacuuuuuuuucuuuuuuugaaauaaaauagccugucuuucagaucuaaaaaaaaaaaaaaaaaaaaaaaaaaaaaaaaaaaaaaaaaaaaaaaaaaaaaaaaaaaaaaaaugcaucccccccccccccccccccccccccccccccaaaggcucuuuucagagccaccagaauu

SEQ ID NO: 6410 - RNA, 1564 nt, Artificial Sequence
  mRNA Design a-3 (A64-N5-C30-hSL-N5) comprising derived and/or modified sequence from Pf(3D7)__XP_001351122.1__HsSPARC_Pf-CSP(19-397) (opt3)
aggagagggcgcuuggcuugcaaggacccugagcugcggcauugaagcacacccaacccaacucgacugaagucagccucacugaaccggaucugagaaucuucucucucugggcuugccagggcucuccgaaccuagcuagcauccucuucaauuccaacuagaaagcuuaccaugagagccuggaucuucuuucugcucugccuugcuggcagggcacuggccuuguuccaggaguaccaauguuaugggagcuccucuaacacccggguguuaaaugaacugaacuacgacaaugcgggaacaaaccuauauaaugagcucgaaaugaacuacuaugguaagcaggagaauugguacucacugaaaaagaacagucgcagccuuggcgaaaaugaugacgggaacaaugaggauaacgagaaacugcgaaagcccaaacacaagaaguugaaacagccugcugacggaaauccagauccgaacgccaaucccaacgucgacccuaacgcaaauccaaacguugaucccaaugccaacccuaauguggacccaaacgcuaaucccaacgcaaauccuaacgccaauccaaacgcuaauccgaacgccaaucccaacgcgaacccuaaugcaaacccaaaugccaaccccaaugcuaacccuaaugccaacccaaaugcaaaccccaaugcuaacccgaaugccaacccuaaugcgaaccccaacgccaauccaaacgcaaauccuaacgcuaaucccaacguagauccaaaugccaaccccaaugcuaacccuaaugccaacccaaaugcaaacccgaaugccaaccccaacgcuaauccuaacgcgaauccaaacgcaaaucccaacgccaauccuaacgcuaauccaaacgccaaucccaacgcaaauccgaacgccaauccuaacgcuaauccaaacgccaaccccaaugcaaacccuaaugcgaaccccaaugcuaacccaaauaagaacaaucagggcaacggucaagggcauaauaugccuaacgaccccaaucguaacguggaugaaaaugccaacgcaaacuccgccgucaaaaauaacaauaacgaggaaccaucugacaagcacauuaaagaguaucucaauaagauacagaacucgcugucaacugaguggagcccgugcagugugacguguggaaauggcauccagguuagaauuaagccuggcuccgcuaacaaacccaaggaugaacuggacuacgccaaugacaucgagaaaaagauuugcaaaauggaaaaguguucuagcguguuuaacgucguaaauuccucaaucgggcucauaaugguguuaaguuuccuguuucuuaacugaggacuagucccuguucccagagcccacuuuuuuuucuuuuuuugaaauaaaauagccugucuuucagaucuaaaaaaaaaaaaaaaaaaaaaaaaaaaaaaaaaaaaaaaaaaaaaaaaaaaaaaaaaaaaaaaaugcaucccccccccccccccccccccccccccccccaaaggcucuuuucagagccaccagaauu

SEQ ID NO: 6411 - RNA, 1567 nt, Artificial Sequence
  mRNA Design a-3 (A64-N5-C30-hSL-N5) comprising derived and/or modified sequence from Pf(3D7)__XP_001351122.1__IgE_Pf-CSP(19-397) (opt3)
aggagagggcgcuuggcuugcaaggacccugagcugcggcauugaagcacacccaacccaacucgacugaagucagccucacugaaccggaucugagaaucuucucucucugggcuugccagggcucuccgaaccuagcuagcauccucuucaauuccaacuagaaagcuuaccauggacuggaccuggauccuguuccucguggccgcugcaacaagaguccacagccuuuuucaggaguaccaaugcuauggcuccucuucaaacacuaggguucugaaugaauugaacuacgauaaugccgggacgaacuuauauaaugagcuggaaaugaacuacuauggaaagcaggagaauugguacagucuaaagaagaacagccggucccucggugaaaaugacgauggcaacaaugaggacaacgagaaacugcgcaagcccaaacauaagaaacuuaaacagccugcggaugggaauccagacccgaacgcuaaucccaacguggauccuaacgccaauccaaacguagaccccaaugcaaacccuaauguggauccaaacgccaaucccaacgcuaauccuaacgcaaauccaaacgccaauccgaacgcuaaucccaacgccaacccuaaugcgaacccaaaugcaaaccccaaugccaacccuaaugcuaacccaaaugccaaccccaaugcaaacccgaaugcuaacccuaaugccaaccccaacgcgaauccaaacgccaauccuaacgcaaaucccaacgucgacccaaaugcuaaccccaaugccaacccuaaugcuaacccaaaugccaacccgaaugcaaaccccaacgccaauccuaacgcuaauccaaacgcgaaucccaacgcaaauccuaacgccaauccaaacgcuaaucccaacgccaauccgaacgcaaauccuaacgccaauccaaacgcuaaccccaaugccaacccuaaugcaaaccccaaugcgaacccaaauaagaacaaucagggaaacggccaaggucacaauaugccuaacgaucccaaucgaaacguggacgaaaaugcuaacgccaacucugcaguuaaaaauaacaauaacgaggaaccaucggauaagcauauuaaagaguaucugaauaagauacagaacucauugagcaccgaguggaguccguguuccgugacaugcgggaauggaauccagguccguauuaagccuggcucugccaacaaacccaaggacgaacucgacuacgcuaaugauaucgagaaaaagauuuguaaaauggaaaagugcagcuccguguucaacguaguuaauucaaguaucggccugauaauggugcugagcuuucucuucuuaaacugaggacuagucccuguucccagagcccacuuuuuuuucuuuuuuugaaauaaaauagccugucuuucagaucuaaaaaaaaaaaaaaaaaaaaaaaaaaaaaaaaaaaaaaaaaaaaaaaaaaaaaaaaaaaaaaaaugcaucccccccccccccccccccccccccccccccaaaggcucuuuucagagccaccagaauu

SEQ ID NO: 6412 - RNA, 1732 nt, Artificial Sequence
  mRNA Design a-3 (A64-N5-C30-hSL-N5) comprising derived and/or modified sequence from Pf(3D7)__XP_001351122.1__Pf-CSP_L(G4SG4)_TM domain HA (opt3)
aggagagggcgcuuggcuugcaaggacccugagcugcggcauugaagcacacccaacccaacucgacugaagucagccucacugaaccggaucugagaaucuucucucucugggcuugccagggcucuccgaaccuagcuagcauccucuucaauuccaacuagaaagcuuaccaugaugagaaagcuggccauccucagcguguccucuuuccuuuuugucgaggcucuguuccaggaauaccaaugcuauggcucaaguagcaacaccaggguuuugaaugaguuaaacuacgacaaugcagggacaaaccuguauaaugaacuagagaugaacuacuauggaaagcaggaaaauugguacucccucaagaaaaacucucggucgcugggugagaaugaugacggcaacaaugaggauaacgaaaaacuucgcaagcccaagcacaagaaacugaagcagccugccgacgggaauccagauccgaacgcgaaucccaacguggacccuaacgcuaauccaaacguagaucccaaugccaacccuaauguggacccaaacgcaaaucccaacgccaauccuaacgcuaauccaaacgcaaauccgaacgccaaucccaacgcuaacccuaaugccaacccaaaugcgaaccccaaugcaaacccuaaugccaacccaaaugcuaaccccaaugccaacccgaaugcaaacccuaaugcuaaccccaacgccaauccaaacgcgaauccuaacgccaaucccaacgucgauccaaaugcaaaccccaaugcuaacccuaaugccaacccaaaugcuaacccgaaugccaaccccaacgcaaauccuaacgccaauccaaacgcuaaucccaacgcgaauccuaacgcaaauccaaacgccaaucccaacgcuaauccgaacgccaauccuaacgcaaauccaaacgccaaccccaaugcuaacccuaaugccaaccccaaugcaaacccaaauaaaaacaaucagggaaacggccaaggucauaauaugccuaacgaccccaaucgaaacguggaugagaaugcgaacgcuaacucagccguuaagaauaacaauaacgaggaaccaagcgacaaacacauuaaggaguauuugaauaagauacagaacagucucuccacugaauggucuccguguagcgugacgugcgggaauggaauccagguccguauuaaaccuggcuccgcaaacaagcccaaagaugagcuggacuacgccaaugacaucgaaaagaaaauuuguaagauggagaaaugcucaaguguguuuaacguaguuaauagcucuaucggccugauaauggugcucuccuucuuauuucugaacgggggagguggcucagggggaggcgguaaacuugaaagcaccagaaucuaccagauuuuggcuaucuauaguacagucgccucuucccuggugcuaguggucagccucggggcaauuucguucuggauguguucuaauggaucccugcaaugcaggaucuguauaugaggacuagucccuguucccagagcccacuuuuuuuucuuuuuuugaaauaaaauagccugucuuucagaucuaaaaaaaaaaaaaaaaaaaaaaaaaaaaaaaaaaaaaaaaaaaaaaaaaaaaaaaaaaaaaaaaugcaucccccccccccccccccccccccccccccccaaaggcucuuuucagagccaccagaauu

SEQ ID NO: 6413 - RNA, 1606 nt, Artificial Sequence
  mRNA Design a-3 (A64-N5-C30-hSL-N5) comprising derived and/or modified sequence from Pf(3D7)__XP_001351122.1__Pf-CSP(199-377)_L(PVTN)_HBsAg (opt3)
aggagagggcgcuuggcuugcaaggacccugagcugcggcauugaagcacacccaacccaacucgacugaagucagccucacugaaccggaucugagaaucuucucucucugggcuugccagggcucuccgaaccuagcuagcauccucuucaauuccaacuagaaagcuuaccauggaccccaacgccaauccuaacgcuaauccaaacgcaaauccgaacgccaaucccaacgcgaauccuaacgcuaauccaaacgccaaucccaacgcaaauccuaacgccaacccaaaugcuaaccccaaugcaaacccuaaugccaacccaaaugcuaacccgaaugccaaccccaaugcgaacccuaaugcaaacccaaaugccaaccccaacgcuaauccuaacaagaauaaccagggcaaugggcaaggacacaacaugccaaaugaucccaacagaaauguggacgagaacgccaaugcaaacagcgcugucaaaaauaacaauaacgaggaaccguccgauaagcauaucaaagaauaccugaacaagauucaaaauucucucucaaccgaguggaguccuugcagcguuacaugugguaacggcauacaggugaggaucaaacccggguccgccaauaagccaaaggacgaacuugauuaugcgaacgacauugagaaaaagaucugcaaaauggagaaguguucuucgguaccugugacuaauauggaaaacauuacgucaggauuccugggccccuuguuaguccugcaggccggguuuuuccuacucacccggauccugacaauaccacagagccuugauaguugguggacuucccugaauuuucucgguggaucucccgugugcuugggccagaacagccaguccccuaccucaaaucacaguccaacaagcuguccgcccaucugcccuggcuaccgcuggaugugucugcgacguuucauuaucuuucuguucauucucuuacugugccuuaucuuuuugcugguucuacucgacuaucaggggaugcugccaguguguccccuuauaccuggaucuaccacuacaaacaccgguccaugcaaaacguguacuacccccgcacaaggcaauuccauguucccgucaugcugcuguacaaagccuacugaugggaacugcaccuguauuccaauccccagcaguugggcuuuugccaaguaccugugggagugggcuucugucagauucuccugguugagccuccuggugccuuuuguacagugguucguuggauuaucgcccacaguguggcugucugccauuuggaugaugugguauuggggcccaucccucuacucaaucgucaguccuuuuaucccccuucugccaauuuucuucugcuuguggguguauauaugaggacuagucccuguucccagagcccacuuuuuuuucuuuuuuugaaauaaaauagccugucuuucagaucuaaaaaaaaaaaaaaaaaaaaaaaaaaaaaaaaaaaaaaaaaaaaaaaaaaaaaaaaaaaaaaaaugcaucccccccccccccccccccccccccccccccaaaggcucuuuucagagccaccagaauu

SEQ ID NO: 6414 - RNA, 1648 nt, Artificial Sequence
  mRNA Design a-3 (A64-N5-C30-hSL-N5) comprising derived and/or modified sequence from Pf(3D7)__XP_001351122.1__Pf-CSP(199-387)_L(PVTN)_HBsAg (opt3)
aggagagggcgcuuggcuugcaaggacccugagcugcggcauugaagcacacccaacccaacucgacugaagucagccucacugaaccggaucugagaaucuucucucucugggcuugccagggcucuccgaaccuagcuagcauccucuucaauuccaacuagaaagcuuaccaugauggcccccgacccuaacgcuaauccaaacgcaaauccgaacgccaaucccaacgcgaauccuaacgcuaauccaaacgccaaucccaacgcaaauccuaacgccaauccaaacgcuaaccccaaugcaaacccuaaugccaacccaaaugcuaacccgaaugccaaccccaaugcgaacccuaaugcaaacccaaaugccaaccccaaugcuaacccuaacgccaauccaaacaagaauaaccagggcaaugggcaaggacacaacaugcccaaugauccgaacagaaauguggacgagaacgcaaaugcuaacagcgccgucaaaaauaacaauaacgaggaaccuuccgauaagcauaucaaagaauaccugaacaagauucaaaauucucucucaaccgaguggagucccugcagcguuacaugugguaacggcauacaggugaggaucaaaccaggguccgcgaauaagccuaaggacgaacuugauuaugccaacgacauugagaaaaagaucugcaaaauggagaaguguucuucgguauucaauguggucaacucaagcauuggacugggccccgugacuaauauggaaaacaucacgaguggguuuuuggguccauuacugguucuacaggcaggauucuuucuccugacccggauacuuacaaucccccagucccuggauucuugguggacuagcuugaauuuccucggcggcuccccugugugccuggggcagaacucacagaguccaaccagcaaucacucuccgacauccugucccccuauuugcccaggauaccgcuggaugugucugcgacguuuuaucauuuuccucuuuaucuuacugcuuugcuugauauuccugcuaguccuccuggacuaucaggguaugcuucccguguguccucugauuccaggcucaaccacuacaaacaccgggcccugcaaaacguguacuaccccggcucaaggaaauagcauguuuccuaguugcugcuguacaaagccaacugauggcaacugcaccuguauccccauuccuucuuccugggccuucgcuaaguacuugugggagugggccagcguaagauuuucguggcucucucuguuaguucccuucgugcagugguuugucggucuguccccaacaguguggcucucagcaaucuggaugaugugguauugggggccuagucuuuacagcaucgugucccccuucauuccacuguugccgauauucuuuugccuaugggucuauaucugaggacuagucccuguucccagagcccacuuuuuuuucuuuuuuugaaauaaaauagccugucuuucagaucuaaaaaaaaaaaaaaaaaaaaaaaaaaaaaaaaaaaaaaaaaaaaaaaaaaaaaaaaaaaaaaaaugcaucccccccccccccccccccccccccccccccaaaggcucuuuucagagccaccagaauu

SEQ ID NO: 6415 - RNA, 832 nt, Artificial Sequence
  mRNA Design a-3 (A64-N5-C30-hSL-N5) comprising derived and/or modified sequence from Pf(3D7)__XP_001351122.1__HsALB_Pf-CSP(19-152) (opt3)
aggagagggcgcuuggcuugcaaggacccugagcugcggcauugaagcacacccaacccaacucgacugaagucagccucacugaaccggaucugagaaucuucucucucugggcuugccagggcucuccgaaccuagcuagcauccucuucaauuccaacuagaaagcuuaccaugaagugggugaccuucaucagccugcucuuucuuuucuccucugccuacucacuguuucaggaguaucaaugcuacggcaguagcuccaacacaagagucuugaaugaauuaaacuaugacaaugcugggacuaaccuguacaaugagcuagaaaugaacuauuacggaaaacaggagaauugguauucucucaagaaaaacucgaggucacugggugaaaaugaugacggcaacaaugaggauaacgagaaacuucggaagcccaagcacaagaaacugaagcagccugcagacgggaauccagauccgaacgccaaucccaacguugacccuaacgcgaauccaaacguggaucccaaugcuaacccuaauguagacccaaacgccaaucccaacgcaaauccuaacgccaauccaaacgcuaauccgaacgcaaaucccaacgccaacccuugaggacuagucccuguucccagagcccacuuuuuuuucuuuuuuugaaauaaaauagccugucuuucagaucuaaaaaaaaaaaaaaaaaaaaaaaaaaaaaaaaaaaaaaaaaaaaaaaaaaaaaaaaaaaaaaaaugcaucccccccccccccccccccccccccccccccaaaggcucuuuucagagccaccagaauu

SEQ ID NO: 6416 - RNA, 952 nt, Artificial Sequence
  mRNA Design a-3 (A64-N5-C30-hSL-N5) comprising derived and/or modified sequence from Pf(3D7)__XP_001351122.1__HsALB_Pf-CSP(19-192) (opt3)
aggagagggcgcuuggcuugcaaggacccugagcugcggcauugaagcacacccaacccaacucgacugaagucagccucacugaaccggaucugagaaucuucucucucugggcuugccagggcucuccgaaccuagcuagcauccucuucaauuccaacuagaaagcuuaccaugaagugggugaccuucaucagccugcucuuucuuuucuccucugccuacucacuguuucaggaguaucaaugcuacggcaguagcuccaacacaagagucuugaaugaauuaaacuaugacaaugcugggacuaaccuguacaaugagcuagaaaugaacuauuacggaaaacaggagaauugguauucucucaagaaaaacucgaggucacugggugaaaaugaugacggcaacaaugaggauaacgagaaacuucggaagcccaagcacaagaaacugaagcagccugcagacgggaauccagauccgaacgccaaucccaacguugacccuaacgcgaauccaaacguggaucccaaugcuaacccuaauguagacccaaacgccaaucccaacgcaaauccuaacgccaauccaaacgcuaauccgaacgcaaaucccaacgccaacccuaaugcuaacccaaaugccaaccccaaugcgaacccuaaugcaaacccaaaugccaaccccaaugcuaacccgaaugccaacccuaaugcaaaccccaacgcuaauccaaacgccaauccuugaggacuagucccuguucccagagcccacuuuuuuuucuuuuuuugaaauaaaauagccugucuuucagaucuaaaaaaaaaaaaaaaaaaaaaaaaaaaaaaaaaaaaaaaaaaaaaaaaaaaaaaaaaaaaaaaaugcaucccccccccccccccccccccccccccccccaaaggcucuuuucagagccaccagaauu

SEQ ID NO: 6417 - RNA, 1192 nt, Artificial Sequence
  mRNA Design a-3 (A64-N5-C30-hSL-N5) comprising derived and/or modified sequence from Pf(3D7)__XP_001351122.1__HsALB_Pf-CSP(19-272) (opt3)
aggagagggcgcuuggcuugcaaggacccugagcugcggcauugaagcacacccaacccaacucgacugaagucagccucacugaaccggaucugagaaucuucucucucugggcuugccagggcucuccgaaccuagcuagcauccucuucaauuccaacuagaaagcuuaccaugaagugggugaccuucaucagccugcucuuucuuuucuccucugccuacucacuguuucaggaguaucaaugcuacggcaguagcuccaacacaagagucuugaaugaauuaaacuaugacaaugcugggacuaaccuguacaaugagcuagaaaugaacuauuacggaaaacaggagaauugguauucucucaagaaaaacucgaggucacugggugaaaaugaugacggcaacaaugaggauaacgagaaacuucggaagcccaagcacaagaaacugaagcagccugcagacgggaauccagauccgaacgccaaucccaacguugacccuaacgcgaauccaaacguggaucccaaugcuaacccuaauguagacccaaacgccaaucccaacgcaaauccuaacgccaauccaaacgcuaauccgaacgcaaaucccaacgccaacccuaaugcuaacccaaaugccaaccccaaugcgaacccuaaugcaaacccaaaugccaaccccaaugcuaacccgaaugccaacccuaaugcaaaccccaacgcuaauccaaacgccaauccuaacgcgaaucccaacguggauccaaaugccaaccccaaugcaaacccuaaugcuaacccaaaugccaacccgaaugcuaaccccaacgccaauccuaacgcaaauccaaacgccaaucccaacgcuaauccuaacgcgaauccaaacgcaaaucccaacgccaauccgaacgcuaauccuaacgccaauccaaacgcaaaccccaaugccaacccuaaugcuaaccccaaugccaacccaugaggacuagucccuguucccagagcccacuuuuuuuucuuuuuuugaaauaaaauagccugucuuucagaucuaaaaaaaaaaaaaaaaaaaaaaaaaaaaaaaaaaaaaaaaaaaaaaaaaaaaaaaaaaaaaaaaugcaucccccccccccccccccccccccccccccccaaaggcucuuuucagagccaccagaauu

SEQ ID NO: 6418 - RNA, 1354 nt, Artificial Sequence
  mRNA Design a-3 (A64-N5-C30-hSL-N5) comprising derived and/or modified sequence from Pf(3D7)__XP_001351122.1__HsALB_Pf-CSP(19-272)_L(AAY)_Pf-CSP(310-3 27)_L(AAY)_Pf-CSP(346-375) (opt3)
aggagagggcgcuuggcuugcaaggacccugagcugcggcauugaagcacacccaacccaacucgacugaagucagccucacugaaccggaucugagaaucuucucucucugggcuugccagggcucuccgaaccuagcuagcauccucuucaauuccaacuagaaagcuuaccaugaagugggugaccuucaucagccugcucuuucuuuucuccucugccuacucacuguuucaggaguaucaaugcuacggcaguagcuccaacacaagagucuugaaugaauuaaacuaugacaaugcugggacuaaccuguacaaugagcuagaaaugaacuauuacggaaaacaggagaauugguauucucucaagaaaaacucgaggucacugggugaaaaugaugacggcaacaaugaggauaacgagaaacuucggaagcccaagcacaagaaacugaagcagccugcagacgggaauccagauccgaacgccaaucccaacguugacccuaacgcgaauccaaacguggaucccaaugcuaacccuaauguagacccaaacgccaaucccaacgcaaauccuaacgccaauccaaacgcuaauccgaacgcaaaucccaacgccaacccuaaugcuaacccaaaugccaaccccaaugcgaacccuaaugcaaacccaaaugccaaccccaaugcuaacccgaaugccaacccuaaugcaaaccccaacgcuaauccaaacgccaauccuaacgcgaaucccaacguggauccaaaugccaaccccaaugcaaacccuaaugcuaacccaaaugccaacccgaaugcuaaccccaacgccaauccuaacgcaaauccaaacgccaaucccaacgcuaauccuaacgcgaauccaaacgcaaaucccaacgccaauccgaacgcuaauccuaacgccaauccaaacgcaaaccccaaugccaacccuaaugcuaaccccaaugccaacccagcagcguacgaaccuagcgacaaacauauuaaggaguacuugaauaaaauacagaacagucucgcugccuauaucaagcccggauccgcaaauaagccaaaagaugaacuggacuacgccaacgauauugagaagaaaaucuguaagauggagaaaugcucuugaggacuagucccuguucccagagcccacuuuuuuuucuuuuuuugaaauaaaauagccugucuuucagaucuaaaaaaaaaaaaaaaaaaaaaaaaaaaaaaaaaaaaaaaaaaaaaaaaaaaaaaaaaaaaaaaaugcaucccccccccccccccccccccccccccccccaaaggcucuuuucagagccaccagaauu

SEQ ID NO: 6419 - RNA, 1315 nt, Artificial Sequence
  mRNA Design a-3 (A64-N5-C30-hSL-N5) comprising derived and/or modified sequence from Pf(3D7)__XP_001351122.1__HsALB_Pf-CSP(19-272)_L(AAY)_Pf-CSP(346-3 65)_L(AAY)_P2 (opt3)
aggagagggcgcuuggcuugcaaggacccugagcugcggcauugaagcacacccaacccaacucgacugaagucagccucacugaaccggaucugagaaucuucucucucugggcuugccagggcucuccgaaccuagcuagcauccucuucaauuccaacuagaaagcuuaccaugaagugggugaccuucaucagccugcucuuucuuuucuccucugccuacucacuguuucaggaguaucaaugcuacggcaguagcuccaacacaagagucuugaaugaauuaaacuaugacaaugcugggacuaaccuguacaaugagcuagaaaugaacuauuacggaaaacaggagaauugguauucucucaagaaaaacucgaggucacugggugaaaaugaugacggcaacaaugaggauaacgagaaacuucggaagcccaagcacaagaaacugaagcagccugcagacgggaauccagauccgaacgccaaucccaacguugacccuaacgcgaauccaaacguggaucccaaugcuaacccuaauguagacccaaacgccaaucccaacgcaaauccuaacgccaauccaaacgcuaauccgaacgcaaaucccaacgccaacccuaaugcuaacccaaaugccaaccccaaugcgaacccuaaugcaaacccaaaugccaaccccaaugcuaacccgaaugccaacccuaaugcaaaccccaacgcuaauccaaacgccaauccuaacgcgaaucccaacguggauccaaaugccaaccccaaugcaaacccuaaugcuaacccaaaugccaacccgaaugcuaaccccaacgccaauccuaacgcaaauccaaacgccaaucccaacgcuaauccuaacgcgaauccaaacgcaaaucccaacgccaauccgaacgcuaauccuaacgccaauccaaacgcaaaccccaaugccaacccuaaugcuaaccccaaugccaacccagcagcguacauuaaaccuggaagcgcuaauaagcccaaagacgaauuggauuacgccaacgacauagaggcagccuaucaguacaucaaggcuaauaguaaguucauuggcaucacggaacucugaggacuagucccuguucccagagcccacuuuuuuuucuuuuuuugaaauaaaauagccugucuuucagaucuaaaaaaaaaaaaaaaaaaaaaaaaaaaaaaaaaaaaaaaaaaaaaaaaaaaaaaaaaaaaaaaaugcaucccccccccccccccccccccccccccccccaaaggcucuuuucagagccaccagaauu

SEQ ID NO: 6420 - RNA, 1309 nt, Artificial Sequence
  mRNA Design a-3 (A64-N5-C30-hSL-N5) comprising derived and/or modified sequence from Pf(3D7)__XP_001351122.1__HsALB_Pf-CSP(19-272)_L(AAY)_Pf-CSP(346-3 65)_L(AAY)_PADRE (opt3)
aggagagggcgcuuggcuugcaaggacccugagcugcggcauugaagcacacccaacccaacucgacugaagucagccucacugaaccggaucugagaaucuucucucucugggcuugccagggcucuccgaaccuagcuagcauccucuucaauuccaacuagaaagcuuaccaugaagugggugaccuucaucagccugcucuuucuuuucuccucugccuacucacuguuucaggaguaucaaugcuacggcaguagcuccaacacaagagucuugaaugaauuaaacuaugacaaugcugggacuaaccuguacaaugagcuagaaaugaacuauuacggaaaacaggagaauugguauucucucaagaaaaacucgaggucacugggugaaaaugaugacggcaacaaugaggauaacgagaaacuucggaagcccaagcacaagaaacugaagcagccugcagacgggaauccagauccgaacgccaaucccaacguugacccuaacgcgaauccaaacguggaucccaaugcuaacccuaauguagacccaaacgccaaucccaacgcaaauccuaacgccaauccaaacgcuaauccgaacgcaaaucccaacgccaacccuaaugcuaacccaaaugccaaccccaaugcgaacccuaaugcaaacccaaaugccaaccccaaugcuaacccgaaugccaacccuaaugcaaaccccaacgcuaauccaaacgccaauccuaacgcgaaucccaacguggauccaaaugccaaccccaaugcaaacccuaaugcuaacccaaaugccaacccgaaugcuaaccccaacgccaauccuaacgcaaauccaaacgccaaucccaacgcuaauccuaacgcgaauccaaacgcaaaucccaacgccaauccgaacgcuaauccuaacgccaauccaaacgcaaaccccaaugccaacccuaaugcuaaccccaaugccaacccagcagcguacauuaaaccuggaagcgcuaauaagcccaaagacgaauuggauuacgccaacgacauagaggcagccuaugcuaaguucgucgccgcauggacgcucaaggcugccgcgugaggacuagucccuguucccagagcccacuuuuuuuucuuuuuuugaaauaaaauagccugucuuucagaucuaaaaaaaaaaaaaaaaaaaaaaaaaaaaaaaaaaaaaaaaaaaaaaaaaaaaaaaaaaaaaaaaugcaucccccccccccccccccccccccccccccccaaaggcucuuuucagagccaccagaauu

SEQ ID NO: 6421 - RNA, 1366 nt, Artificial Sequence
  mRNA Design a-3 (A64-N5-C30-hSL-N5) comprising derived and/or modified sequence from Pf(3D7)__XP_001351122.1__HsALB_Pf-CSP(19-272)_L(G4S)_Pf-CSP(310-3 27)_L(G4S)_Pf-CSP(346-375) (opt3)
aggagagggcgcuuggcuugcaaggacccugagcugcggcauugaagcacacccaacccaacucgacugaagucagccucacugaaccggaucugagaaucuucucucucugggcuugccagggcucuccgaaccuagcuagcauccucuucaauuccaacuagaaagcuuaccaugaagugggugaccuucaucagccugcucuuucuuuucuccucugccuacucacuguuucaggaguaucaaugcuacggcaguagcuccaacacaagagucuugaaugaauuaaacuaugacaaugcugggacuaaccuguacaaugagcuagaaaugaacuauuacggaaaacaggagaauugguauucucucaagaaaaacucgaggucacugggugaaaaugaugacggcaacaaugaggauaacgagaaacuucggaagcccaagcacaagaaacugaagcagccugcagacgggaauccagauccgaacgccaaucccaacguugacccuaacgcgaauccaaacguggaucccaaugcuaacccuaauguagacccaaacgccaaucccaacgcaaauccuaacgccaauccaaacgcuaauccgaacgcaaaucccaacgccaacccuaaugcuaacccaaaugccaaccccaaugcgaacccuaaugcaaacccaaaugccaaccccaaugcuaacccgaaugccaacccuaaugcaaaccccaacgcuaauccaaacgccaauccuaacgcgaaucccaacguggauccaaaugccaaccccaaugcaaacccuaaugcuaacccaaaugccaacccgaaugcuaaccccaacgccaauccuaacgcaaauccaaacgccaaucccaacgcuaauccuaacgcgaauccaaacgcaaaucccaacgccaauccgaacgcuaauccuaacgccaauccaaacgcaaaccccaaugccaacccuaaugcuaaccccaaugccaacccaggaggcggugggagcgaaccuagugacaaacauauuaaggaguacuugaauaaaauacagaacucccucggaggcggcgggucuaucaagcccggaagcgcaaauaagccaaaagaugaacuggacuacgcgaacgauauugagaagaaaaucuguaagauggagaaaugcuccugaggacuagucccuguucccagagcccacuuuuuuuucuuuuuuugaaauaaaauagccugucuuucagaucuaaaaaaaaaaaaaaaaaaaaaaaaaaaaaaaaaaaaaaaaaaaaaaaaaaaaaaaaaaaaaaaaugcaucccccccccccccccccccccccccccccccaaaggcucuuuucagagccaccagaauu

SEQ ID NO: 6422 - RNA, 1351 nt, Artificial Sequence
  mRNA Design a-3 (A64-N5-C30-hSL-N5) comprising derived and/or modified sequence from Pf(3D7)__XP_001351122.1__HsALB_Pf-CSP(19-272)_L(G4S)_Pf-CSP(310-3 27)_Pf-CSP(346-375) (opt3)
aggagagggcgcuuggcuugcaaggacccugagcugcggcauugaagcacacccaacccaacucgacugaagucagccucacugaaccggaucugagaaucuucucucucugggcuugccagggcucuccgaaccuagcuagcauccucuucaauuccaacuagaaagcuuaccaugaagugggugaccuucaucagccugcucuuucuuuucuccucugccuacucacuguuucaggaguaucaaugcuacggcaguagcuccaacacaagagucuugaaugaauuaaacuaugacaaugcugggacuaaccuguacaaugagcuagaaaugaacuauuacggaaaacaggagaauugguauucucucaagaaaaacucgaggucacugggugaaaaugaugacggcaacaaugaggauaacgagaaacuucggaagcccaagcacaagaaacugaagcagccugcagacgggaauccagauccgaacgccaaucccaacguugacccuaacgcgaauccaaacguggaucccaaugcuaacccuaauguagacccaaacgccaaucccaacgcaaauccuaacgccaauccaaacgcuaauccgaacgcaaaucccaacgccaacccuaaugcuaacccaaaugccaaccccaaugcgaacccuaaugcaaacccaaaugccaaccccaaugcuaacccgaaugccaacccuaaugcaaaccccaacgcuaauccaaacgccaauccuaacgcgaaucccaacguggauccaaaugccaaccccaaugcaaacccuaaugcuaacccaaaugccaacccgaaugcuaaccccaacgccaauccuaacgcaaauccaaacgccaaucccaacgcuaauccuaacgcgaauccaaacgcaaaucccaacgccaauccgaacgcuaauccuaacgccaauccaaacgcaaaccccaaugccaacccuaaugcuaaccccaaugccaacccaggaggcggugggagcgaaccuagugacaaacauauuaaggaguacuugaauaaaauacagaacucccucaucaagcccggaucugcaaauaagccaaaagaugaacuggacuacgcgaacgauauugagaagaaaaucuguaagauggagaaaugcagcugaggacuagucccuguucccagagcccacuuuuuuuucuuuuuuugaaauaaaauagccugucuuucagaucuaaaaaaaaaaaaaaaaaaaaaaaaaaaaaaaaaaaaaaaaaaaaaaaaaaaaaaaaaaaaaaaaugcaucccccccccccccccccccccccccccccccaaaggcucuuuucagagccaccagaauu

SEQ ID NO: 6423 - RNA, 1351 nt, Artificial Sequence
  mRNA Design a-3 (A64-N5-C30-hSL-N5) comprising derived and/or modified sequence from Pf(3D7)__XP_001351122.1__HsALB_Pf-CSP(19-325) (opt3)
aggagagggcgcuuggcuugcaaggacccugagcugcggcauugaagcacacccaacccaacucgacugaagucagccucacugaaccggaucugagaaucuucucucucugggcuugccagggcucuccgaaccuagcuagcauccucuucaauuccaacuagaaagcuuaccaugaagugggugaccuucaucagccugcucuuucuuuucuccucugccuacucacuguuucaggaguaucaaugcuacggcaguagcuccaacacaagagucuugaaugaauuaaacuaugacaaugcugggacuaaccuguacaaugagcuagaaaugaacuauuacggaaaacaggagaauugguauucucucaagaaaaacucgaggucacugggugaaaaugaugacggcaacaaugaggauaacgagaaacuucggaagcccaagcacaagaaacugaagcagccugcagacgggaauccagauccgaacgccaaucccaacguugacccuaacgcgaauccaaacguggaucccaaugcuaacccuaauguagacccaaacgccaaucccaacgcaaauccuaacgccaauccaaacgcuaauccgaacgcaaaucccaacgccaacccuaaugcuaacccaaaugccaaccccaaugcgaacccuaaugcaaacccaaaugccaaccccaaugcuaacccgaaugccaacccuaaugcaaaccccaacgcuaauccaaacgccaauccuaacgcgaaucccaacguggauccaaaugccaaccccaaugcaaacccuaaugcuaacccaaaugccaacccgaaugcuaaccccaacgccaauccuaacgcaaauccaaacgccaaucccaacgcuaauccuaacgcgaauccaaacgcaaaucccaacgccaauccgaacgcuaauccuaacgccaauccaaacgcaaaccccaaugccaacccuaaugcuaaccccaaugccaacccaaauaaaaacaaucagggaaacggccaaggucauaauaugccuaacgaccccaaucgcaacgucgaugaaaaugcaaacgcgaacagcgcugugaagaauaacaauaacgaggaaccaagugacaaacacauuaaggaguacuugaauaagauacagaacugaggacuagucccuguucccagagcccacuuuuuuuucuuuuuuugaaauaaaauagccugucuuucagaucuaaaaaaaaaaaaaaaaaaaaaaaaaaaaaaaaaaaaaaaaaaaaaaaaaaaaaaaaaaaaaaaaugcaucccccccccccccccccccccccccccccccaaaggcucuuuucagagccaccagaauu

SEQ ID NO: 6424 - RNA, 1528 nt, Artificial Sequence
  mRNA Design a-3 (A64-N5-C30-hSL-N5) comprising derived and/or modified sequence from Pf(3D7)__XP_001351122.1__HsALB_Pf-CSP(19-384) (opt3)
aggagagggcgcuuggcuugcaaggacccugagcugcggcauugaagcacacccaacccaacucgacugaagucagccucacugaaccggaucugagaaucuucucucucugggcuugccagggcucuccgaaccuagcuagcauccucuucaauuccaacuagaaagcuuaccaugaagugggugaccuucaucagccugcucuuucuuuucuccucugccuacucacuguuucaggaguaucaaugcuacggcaguagcuccaacacaagagucuugaaugaauuaaacuaugacaaugcugggacuaaccuguacaaugagcuagaaaugaacuauuacggaaaacaggagaauugguauucucucaagaaaaacucgaggucacugggugaaaaugaugacggcaacaaugaggauaacgagaaacuucggaagcccaagcacaagaaacugaagcagccugcagacgggaauccagauccgaacgccaaucccaacguugacccuaacgcgaauccaaacguggaucccaaugcuaacccuaauguagacccaaacgccaaucccaacgcaaauccuaacgccaauccaaacgcuaauccgaacgcaaaucccaacgccaacccuaaugcuaacccaaaugccaaccccaaugcgaacccuaaugcaaacccaaaugccaaccccaaugcuaacccgaaugccaacccuaaugcaaaccccaacgcuaauccaaacgccaauccuaacgcgaaucccaacguggauccaaaugccaaccccaaugcaaacccuaaugcuaacccaaaugccaacccgaaugcuaaccccaacgccaauccuaacgcaaauccaaacgccaaucccaacgcuaauccuaacgcgaauccaaacgcaaaucccaacgccaauccgaacgcuaauccuaacgccaauccaaacgcaaaccccaaugccaacccuaaugcuaaccccaaugccaacccaaauaaaaacaaucagggaaacggccaaggucauaauaugccuaacgaccccaaucgcaacgucgaugaaaaugcaaacgcgaacagcgcugugaagaauaacaauaacgaggaaccaagugacaaacacauuaaggaguacuugaauaagauacagaacucccucucuacggaguggagcccguguuccguuaccugcgggaauggaauccaggugcgaauuaaaccuggcucagccaacaagcccaaagaugaacuggacuacgcaaaugacaucgagaagaaaauuuguaagauggaaaaaugcaguagcgucuucaacgugguaaauucuuccugaggacuagucccuguucccagagcccacuuuuuuuucuuuuuuugaaauaaaauagccugucuuucagaucuaaaaaaaaaaaaaaaaaaaaaaaaaaaaaaaaaaaaaaaaaaaaaaaaaaaaaaaaaaaaaaaaugcaucccccccccccccccccccccccccccccccaaaggcucuuuucagagccaccagaauu

SEQ ID NO: 6425 - RNA, 1666 nt, Artificial Sequence
  mRNA Design a-3 (A64-N5-C30-hSL-N5) comprising derived and/or modified sequence from Pf(3D7)__XP_001351122.1__HsALB_Pf-CSP(19-384)_TM domain HA (opt3)
aggagagggcgcuuggcuugcaaggacccugagcugcggcauugaagcacacccaacccaacucgacugaagucagccucacugaaccggaucugagaaucuucucucucugggcuugccagggcucuccgaaccuagcuagcauccucuucaauuccaacuagaaagcuuaccaugaagugggugaccuucaucagccugcucuuucuuuucuccucugccuacucacuguuucaggaguaucaaugcuacggcaguagcuccaacacaagagucuugaaugaauuaaacuaugacaaugcugggacuaaccuguacaaugagcuagaaaugaacuauuacggaaaacaggagaauugguauucucucaagaaaaacucgaggucacugggugaaaaugaugacggcaacaaugaggauaacgagaaacuucggaagcccaagcacaagaaacugaagcagccugcagacgggaauccagauccgaacgccaaucccaacguugacccuaacgcgaauccaaacguggaucccaaugcuaacccuaauguagacccaaacgccaaucccaacgcaaauccuaacgccaauccaaacgcuaauccgaacgcaaaucccaacgccaacccuaaugcuaacccaaaugccaaccccaaugcgaacccuaaugcaaacccaaaugccaaccccaaugcuaacccgaaugccaacccuaaugcaaaccccaacgcuaauccaaacgccaauccuaacgcgaaucccaacguggauccaaaugccaaccccaaugcaaacccuaaugcuaacccaaaugccaacccgaaugcuaaccccaacgccaauccuaacgcaaauccaaacgccaaucccaacgcuaauccuaacgcgaauccaaacgcaaaucccaacgccaauccgaacgcuaauccuaacgccaauccaaacgcaaaccccaaugccaacccuaaugcuaaccccaaugccaacccaaauaaaaacaaucagggaaacggccaaggucauaauaugccuaacgaccccaaucgcaacgucgaugaaaaugcaaacgcgaacagcgcugugaagaauaacaauaacgaggaaccaagugacaaacacauuaaggaguacuugaauaagauacagaacucccucucuacggaguggagcccguguuccguuaccugcgggaauggaauccaggugcgaauuaaaccuggcucagccaacaagcccaaagaugaacuggacuacgcaaaugacaucgagaagaaaauuuguaagauggaaaaaugcaguagcgucuucaacgugguaaauucuuccaagcuggagucaacacguaucuaucagauacucgccaucuacagcacuguugcuaguucuuuagugcuggucgugucccuuggcgccauuagcuuuuggauguguucgaacgggucuuugcaaugcagaaucuguauuugaggacuagucccuguucccagagcccacuuuuuuuucuuuuuuugaaauaaaauagccugucuuucagaucuaaaaaaaaaaaaaaaaaaaaaaaaaaaaaaaaaaaaaaaaaaaaaaaaaaaaaaaaaaaaaaaaugcaucccccccccccccccccccccccccccccccaaaggcucuuuucagagccaccagaauu

SEQ ID NO: 6426 - RNA, 1378 nt, Artificial Sequence
  mRNA Design a-3 (A64-N5-C30-hSL-N5) comprising derived and/or modified sequence from Pf(3D7)__XP_001351122.1__HsALB_Pf-CSP(82-397) (opt3)
aggagagggcgcuuggcuugcaaggacccugagcugcggcauugaagcacacccaacccaacucgacugaagucagccucacugaaccggaucugagaaucuucucucucugggcuugccagggcucuccgaaccuagcuagcauccucuucaauuccaacuagaaagcuuaccaugaagugggugaccuucaucagccugcucuuucuuuucuccucugccuacucagacaacgagaaacugagaaagcccaaacacaagaaauugaagcagccugcugauggcaauccagacccgaacgcaaaucccaacgucgauccuaaugccaacccaaauguugaccccaacgcgaauccuaacguggauccaaaugcuaaccccaaugccaacccuaaugcaaacccaaacgccaauccgaacgcuaaucccaacgcaaauccuaacgccaauccaaacgcuaaucccaacgccaauccuaacgcgaauccaaacgcaaaucccaacgccaacccgaaugcuaacccuaaugccaaccccaaugcaaacccaaaugcuaacccuaaugccaaccccaauguagacccaaacgcgaaucccaacgccaauccuaacgcaaacccaaaugcuaacccgaaugccaaccccaaugcuaacccuaaugccaacccaaaugcaaaccccaaugccaacccuaaugcuaacccaaaugcgaaccccaacgcaaauccgaacgccaauccuaacgcuaauccaaacgccaaucccaacgcaaauccuaacgccaaucccaacgcuaauccaaacaagaauaaccaggggaauggacagggucauaacaugccuaacgaucccaauaggaacguggacgaaaaugccaacgcaaauagugcggucaaaaacaauaacaaugaggaaccaagcgauaagcacauuaaagaguauuuaaacaagauacaaaauucccugucuacagaauggucgccgugcucagugacuuguggcaacgggauccagguucggauuaaaccuggaagcgcuaauaagcccaaggacgagcuagauuacgccaacgacaucgagaaaaagauuugcaaaauggaaaaguguaguuccguguuuaaugucgugaacucuagcaucggccucauaaugguacuguccuuccuuuuucugaacugaggacuagucccuguucccagagcccacuuuuuuuucuuuuuuugaaauaaaauagccugucuuucagaucuaaaaaaaaaaaaaaaaaaaaaaaaaaaaaaaaaaaaaaaaaaaaaaaaaaaaaaaaaaaaaaaaugcaucccccccccccccccccccccccccccccccaaaggcucuuuucagagccaccagaauu

SEQ ID NO: 6427 - RNA, 730 nt, Artificial Sequence
  mRNA Design a-3 (A64-N5-C30-hSL-N5) comprising derived and/or modified sequence from Pf(3D7)__XP_001351122.1__HsALB_Pf-CSP(93-192) (opt3)
aggagagggcgcuuggcuugcaaggacccugagcugcggcauugaagcacacccaacccaacucgacugaagucagccucacugaaccggaucugagaaucuucucucucugggcuugccagggcucuccgaaccuagcuagcauccucuucaauuccaacuagaaagcuuaccaugaagugggugaccuucaucagccugcucuuucuuuucuccucugccuacucaaaacugaagcagcccgcugacggcaacccugauccaaaugcaaacccgaaugucgaccccaacgccaauccuaacguugauccaaaugcgaaccccaauguggacccuaacgcuaauccaaacgccaaucccaacgcaaauccuaacgccaacccaaaugcuaacccgaaugcaaaccccaaugccaacccuaaugcuaacccaaaugccaaccccaaugcgaacccuaaugcaaacccaaaugccaaccccaacgcuaauccgaacgccaauccuaacgcaaaucccaacgcuaauccaugaggacuagucccuguucccagagcccacuuuuuuuucuuuuuuugaaauaaaauagccugucuuucagaucuaaaaaaaaaaaaaaaaaaaaaaaaaaaaaaaaaaaaaaaaaaaaaaaaaaaaaaaaaaaaaaaaugcaucccccccccccccccccccccccccccccccaaaggcucuuuucagagccaccagaauu

SEQ ID NO: 6428 - RNA, 970 nt, Artificial Sequence
  mRNA Design a-3 (A64-N5-C30-hSL-N5) comprising derived and/or modified sequence from Pf(3D7)__XP_001351122.1__HsALB_Pf-CSP(93-272) (opt3)
aggagagggcgcuuggcuugcaaggacccugagcugcggcauugaagcacacccaacccaacucgacugaagucagccucacugaaccggaucugagaaucuucucucucugggcuugccagggcucuccgaaccuagcuagcauccucuucaauuccaacuagaaagcuuaccaugaagugggugaccuucaucagccugcucuuucuuuucuccucugccuacucaaaacugaagcagcccgcugacggcaacccugauccaaaugcaaacccgaaugucgaccccaacgccaauccuaacguugauccaaaugcgaaccccaauguggacccuaacgcuaauccaaacgccaaucccaacgcaaauccuaacgccaacccaaaugcuaacccgaaugcaaaccccaaugccaacccuaaugcuaacccaaaugccaaccccaaugcgaacccuaaugcaaacccaaaugccaaccccaacgcuaauccgaacgccaauccuaacgcaaaucccaacgcuaauccaaacgccaauccuaacguagaucccaaugcgaacccaaaugccaaccccaaugcaaacccuaacgcuaauccaaacgccaauccgaacgcuaaucccaacgccaauccuaacgcaaauccaaacgccaaucccaacgcuaauccuaacgcgaauccaaacgcaaaccccaaugccaacccgaaugcuaacccuaaugccaacccaaaugcaaaccccaaugccaacccuaaugcuaaccccugaggacuagucccuguucccagagcccacuuuuuuuucuuuuuuugaaauaaaauagccugucuuucagaucuaaaaaaaaaaaaaaaaaaaaaaaaaaaaaaaaaaaaaaaaaaaaaaaaaaaaaaaaaaaaaaaaugcaucccccccccccccccccccccccccccccccaaaggcucuuuucagagccaccagaauu

SEQ ID NO: 6429 - RNA, 1345 nt, Artificial Sequence
  mRNA Design a-3 (A64-N5-C30-hSL-N5) comprising derived and/or modified sequence from Pf(3D7)__XP_001351122.1__HsALB_Pf-CSP(93-397) (opt3)
aggagagggcgcuuggcuugcaaggacccugagcugcggcauugaagcacacccaacccaacucgacugaagucagccucacugaaccggaucugagaaucuucucucucugggcuugccagggcucuccgaaccuagcuagcauccucuucaauuccaacuagaaagcuuaccaugaagugggugaccuucaucagccugcucuuucuuuucuccucugccuacucaaaacugaagcagcccgcugacggcaacccugauccaaaugcaaacccgaaugucgaccccaacgccaauccuaacguugauccaaaugcgaaccccaauguggacccuaacgcuaauccaaacgccaaucccaacgcaaauccuaacgccaacccaaaugcuaacccgaaugcaaaccccaaugccaacccuaaugcuaacccaaaugccaaccccaaugcgaacccuaaugcaaacccaaaugccaaccccaacgcuaauccgaacgccaauccuaacgcaaaucccaacgcuaauccaaacgccaauccuaacguagaucccaaugcgaacccaaaugccaaccccaaugcaaacccuaacgcuaauccaaacgccaauccgaacgcuaaucccaacgccaauccuaacgcaaauccaaacgccaaucccaacgcuaauccuaacgcgaauccaaacgcaaaccccaaugccaacccgaaugcuaacccuaaugccaacccaaaugcaaaccccaaugccaacccuaaugcuaaccccaauaaaaacaaucaagggaacggacagggucacaauaugccaaacgacccuaacagaaauguggaugagaacgccaaugcaaacagugcggucaagaauaacaauaacgaggaacccagcgacaaacauauuaaggaauauuugaauaagauacagaacuccuuaucuacagaguggucgccaugcucagugacuuguggcaaugggauccagguuaggauuaaaccgggaagcgcuaacaagccuaaagaugaacuggacuacgccaaugauaucgagaagaaaauuugcaagauggagaaguguaguuccguguuuaacgucguaaauucuagcaucggccuaauaauggugcucuccuuccuguuucuuaacugaggacuagucccuguucccagagcccacuuuuuuuucuuuuuuugaaauaaaauagccugucuuucagaucuaaaaaaaaaaaaaaaaaaaaaaaaaaaaaaaaaaaaaaaaaaaaaaaaaaaaaaaaaaaaaaaaugcaucccccccccccccccccccccccccccccccaaaggcucuuuucagagccaccagaauu

SEQ ID NO: 6430 - RNA, 715 nt, Artificial Sequence
  mRNA Design a-3 (A64-N5-C30-hSL-N5) comprising derived and/or modified sequence from Pf(3D7)__XP_001351122.1__HsALB_Pf-CSP(98-192) (opt3)
aggagagggcgcuuggcuugcaaggacccugagcugcggcauugaagcacacccaacccaacucgacugaagucagccucacugaaccggaucugagaaucuucucucucugggcuugccagggcucuccgaaccuagcuagcauccucuucaauuccaacuagaaagcuuaccaugaagugggugaccuucaucagccugcucuuucuuuucuccucugccuacucagcugacggcaaccccgauccuaaugcaaacccaaaugucgacccgaacgccaaucccaacguugauccuaaugcgaacccaaauguggaccccaacgcuaauccuaacgccaauccaaacgcaaaucccaacgccaacccuaaugcuaacccaaaugcaaacccgaaugccaaccccaaugcuaacccuaaugccaacccaaaugcgaaccccaaugcaaacccuaaugccaacccaaacgcuaaucccaacgccaauccgaacgcaaauccuaacgcuaaucccugaggacuagucccuguucccagagcccacuuuuuuuucuuuuuuugaaauaaaauagccugucuuucagaucuaaaaaaaaaaaaaaaaaaaaaaaaaaaaaaaaaaaaaaaaaaaaaaaaaaaaaaaaaaaaaaaaugcaucccccccccccccccccccccccccccccccaaaggcucuuuucagagccaccagaauu

SEQ ID NO: 6431 - RNA, 955 nt, Artificial Sequence
  mRNA Design a-3 (A64-N5-C30-hSL-N5) comprising derived and/or modified sequence from Pf(3D7)__XP_001351122.1__HsALB_Pf-CSP(98-272) (opt3)
aggagagggcgcuuggcuugcaaggacccugagcugcggcauugaagcacacccaacccaacucgacugaagucagccucacugaaccggaucugagaaucuucucucucugggcuugccagggcucuccgaaccuagcuagcauccucuucaauuccaacuagaaagcuuaccaugaagugggugaccuucaucagccugcucuuucuuuucuccucugccuacucagcugacggcaaccccgauccuaaugcaaacccaaaugucgacccgaacgccaaucccaacguugauccuaaugcgaacccaaauguggaccccaacgcuaauccuaacgccaauccaaacgcaaaucccaacgccaacccuaaugcuaacccaaaugcaaacccgaaugccaaccccaaugcuaacccuaaugccaacccaaaugcgaaccccaaugcaaacccuaaugccaacccaaacgcuaaucccaacgccaauccgaacgcaaauccuaacgcuaaucccaacgccaauccaaacguagauccuaaugcgaaccccaaugccaacccaaaugcaaaccccaacgcuaauccuaacgccaauccaaacgcuaauccgaacgccaaucccaacgcaaauccuaacgccaauccaaacgcuaaucccaacgcgaauccuaacgcaaacccaaaugccaaccccaaugcuaacccgaaugccaacccuaaugcaaacccaaaugccaaccccaaugcuaacccuugaggacuagucccuguucccagagcccacuuuuuuuucuuuuuuugaaauaaaauagccugucuuucagaucuaaaaaaaaaaaaaaaaaaaaaaaaaaaaaaaaaaaaaaaaaaaaaaaaaaaaaaaaaaaaaaaaugcaucccccccccccccccccccccccccccccccaaaggcucuuuucagagccaccagaauu

SEQ ID NO: 6432 - RNA, 1261 nt, Artificial Sequence
  mRNA Design a-3 (A64-N5-C30-hSL-N5) comprising derived and/or modified sequence from Pf(3D7)__XP_001351122.1__HsALB_Pf-CSP(98-374) (opt3)
aggagagggcgcuuggcuugcaaggacccugagcugcggcauugaagcacacccaacccaacucgacugaagucagccucacugaaccggaucugagaaucuucucucucugggcuugccagggcucuccgaaccuagcuagcauccucuucaauuccaacuagaaagcuuaccaugaagugggugaccuucaucagccugcucuuucuuuucuccucugccuacucagcugacggcaaccccgauccuaaugcaaacccaaaugucgacccgaacgccaaucccaacguugauccuaaugcgaacccaaauguggaccccaacgcuaauccuaacgccaauccaaacgcaaaucccaacgccaacccuaaugcuaacccaaaugcaaacccgaaugccaaccccaaugcuaacccuaaugccaacccaaaugcgaaccccaaugcaaacccuaaugccaacccaaacgcuaaucccaacgccaauccgaacgcaaauccuaacgcuaaucccaacgccaauccaaacguagauccuaaugcgaaccccaaugccaacccaaaugcaaaccccaacgcuaauccuaacgccaauccaaacgcuaauccgaacgccaaucccaacgcaaauccuaacgccaauccaaacgcuaaucccaacgcgaauccuaacgcaaacccaaaugccaaccccaaugcuaacccgaaugccaacccuaaugcaaacccaaaugccaaccccaaugcuaacccuaauaaaaacaaucaggggaacggacaaggucacaauaugcccaacgacccaaacagaaauguggaugagaacgccaaugcaaacagugcggucaagaauaacaauaacgaggaaccuagcgacaaacauauuaaggaauaucugaauaaaauacagaacuccuugucuacagaguggucgcccugcucagugacuuguggcaaugggauccagguuaggauuaagccaggaagcgcuaacaagccgaaagaugaauuagacuacgccaaugauaucgagaagaaaauuugcaagauggagaaauguugaggacuagucccuguucccagagcccacuuuuuuuucuuuuuuugaaauaaaauagccugucuuucagaucuaaaaaaaaaaaaaaaaaaaaaaaaaaaaaaaaaaaaaaaaaaaaaaaaaaaaaaaaaaaaaaaaugcaucccccccccccccccccccccccccccccccaaaggcucuuuucagagccaccagaauu

SEQ ID NO: 6433 - RNA, 1330 nt, Artificial Sequence
  mRNA Design a-3 (A64-N5-C30-hSL-N5) comprising derived and/or modified sequence from Pf(3D7)__XP_001351122.1__HsALB_Pf-CSP(98-397) (opt3)
aggagagggcgcuuggcuugcaaggacccugagcugcggcauugaagcacacccaacccaacucgacugaagucagccucacugaaccggaucugagaaucuucucucucugggcuugccagggcucuccgaaccuagcuagcauccucuucaauuccaacuagaaagcuuaccaugaagugggugaccuucaucagccugcucuuucuuuucuccucugccuacucagcugacggcaaccccgauccuaaugcaaacccaaaugucgacccgaacgccaaucccaacguugauccuaaugcgaacccaaauguggaccccaacgcuaauccuaacgccaauccaaacgcaaaucccaacgccaacccuaaugcuaacccaaaugcaaacccgaaugccaaccccaaugcuaacccuaaugccaacccaaaugcgaaccccaaugcaaacccuaaugccaacccaaacgcuaaucccaacgccaauccgaacgcaaauccuaacgcuaaucccaacgccaauccaaacguagauccuaaugcgaaccccaaugccaacccaaaugcaaaccccaacgcuaauccuaacgccaauccaaacgcuaauccgaacgccaaucccaacgcaaauccuaacgccaauccaaacgcuaaucccaacgcgaauccuaacgcaaacccaaaugccaaccccaaugcuaacccgaaugccaacccuaaugcaaacccaaaugccaaccccaaugcuaacccuaauaaaaacaaucaggggaacggacaaggucacaauaugcccaacgacccaaacagaaauguggaugagaacgccaaugcaaacagugcggucaagaauaacaauaacgaggaaccuagcgacaaacauauuaaggaauaucugaauaaaauacagaacuccuugucuacagaguggucgcccugcucagugacuuguggcaaugggauccagguuaggauuaagccaggaagcgcuaacaagccgaaagaugaauuagacuacgccaaugauaucgagaagaaaauuugcaagauggagaaauguaguuccguguuuaacgucguaaauucuagcaucggccugauaauggugcuauccuuccucuuucugaacugaggacuagucccuguucccagagcccacuuuuuuuucuuuuuuugaaauaaaauagccugucuuucagaucuaaaaaaaaaaaaaaaaaaaaaaaaaaaaaaaaaaaaaaaaaaaaaaaaaaaaaaaaaaaaaaaaugcaucccccccccccccccccccccccccccccccaaaggcucuuuucagagccaccagaauu

SEQ ID NO: 6434 - RNA, 1657 nt, Artificial Sequence
  mRNA Design a-3 (A64-N5-C30-hSL-N5) comprising derived and/or modified sequence from Pf(3D7)__XP_001351122.1__HsALB_Pf-CSP(199-377)_L(PVTN)_HBsAg (opt3)
aggagagggcgcuuggcuugcaaggacccugagcugcggcauugaagcacacccaacccaacucgacugaagucagccucacugaaccggaucugagaaucuucucucucugggcuugccagggcucuccgaaccuagcuagcauccucuucaauuccaacuagaaagcuuaccaugaagugggugaccuucaucagccugcucuuucuuuucuccucugccuacucagaccccaacgcuaauccuaacgcaaauccaaacgccaauccgaacgcgaaucccaacgcuaauccuaacgccaauccaaacgcaaaucccaacgccaauccuaacgcuaacccaaaugcaaaccccaaugccaacccuaaugcuaacccaaaugccaacccgaaugcgaaccccaaugcaaacccuaaugccaacccaaaugcuaaccccaacgccaauccuaacaaaaauaaccagggcaaugggcaaggacacaacaugccaaaugaucccaacagaaaugucgacgagaacgcaaaugcuaacagugccguuaagaauaacaauaacgaggaaccgagcgauaaacauauuaaggaauaucugaacaaaauacaaaauuccuugucuacagaguggucgccuugcucagugacuugugguaacggcauccagguaaggauuaagcccgggagcgcgaauaagccaaaagacgaauuagauuacgccaacgacaucgagaagaaaauuugcaagauggagaaauguaguuccgugccugucacgaauauggaaaacaucaccucuggauuucugggcccccuacucgugcugcaggcagguuucuuucuucugacacggauauugacuaucccacagagccucgauuccugguggaccucacugaauuuccucgggggaagucccguuugccugggccagaacagccagucuccuacauccaaucacucaccaaccagcuguccgcccauuugcccuggcuaucgcuggauguguuuacgacguuuuaucauuuuccuguuuauccuuuugcugugccuaauauuccuccuggugcuucuggacuaccaggggauguugccagucuguccccucauuccuggaaguacuacaaccaacacggguccaugcaagacuuguaccacacccgcucaaggcaauucuauguuuccguccugcugcuguacuaagccuaccgaugggaacugcacauguaucccaauucccagcucgugggccuucgcuaaauaucugugggagugggccucugugagauuuuccugguuaucacugcucguaccuuucguucagugguucgugggacuuagucccaccgucuggcugagcgcaaucuggaugaugugguacuggggcccauccuuguauucuaucgugagcccuuuuauuccccuacugccaauauucuuuugccucuggguguacaucugaggacuagucccuguucccagagcccacuuuuuuuucuuuuuuugaaauaaaauagccugucuuucagaucuaaaaaaaaaaaaaaaaaaaaaaaaaaaaaaaaaaaaaaaaaaaaaaaaaaaaaaaaaaaaaaaaugcaucccccccccccccccccccccccccccccccaaaggcucuuuucagagccaccagaauu

SEQ ID NO: 6435 - RNA, 1567 nt, Artificial Sequence
  mRNA Design a-3 (A64-N5-C30-hSL-N5) comprising derived and/or modified sequence from Pf(3D7)__XP_001351122.1__Pf-CSP (opt4)
aggagagggcgcuuggcuugcaaggacccugagcugcggcauugaagcacacccaacccaacucgacugaagucagccucacugaaccggaucugagaaucuucucucucugggcuugccagggcucuccgaaccuagcuagcauccucuucaauuccaacuagaaagcuuaccaugaugagaaagcuggccauccugagcgugagcagcuuccuguucguggaggcccuguuccaggaguaccagugcuacggcagcagcagcaacaccagagugcugaacgagcugaacuacgacaacgccggcaccaaccuguacaacgagcuggagaugaacuacuacggcaagcaggagaacugguacagccugaagaagaacagcagaagccugggcgagaacgacgacggcaacaacgaggacaacgagaagcugagaaagcccaagcacaagaagcugaagcagcccgccgacggcaaccccgaccccaacgccaaccccaacguggaccccaacgccaaccccaacguggaccccaacgccaaccccaacguggaccccaacgccaaccccaacgccaaccccaacgccaaccccaacgccaaccccaacgccaaccccaacgccaaccccaacgccaaccccaacgccaaccccaacgccaaccccaacgccaaccccaacgccaaccccaacgccaaccccaacgccaaccccaacgccaaccccaacgccaaccccaacgccaaccccaacgccaaccccaacguggaccccaacgccaaccccaacgccaaccccaacgccaaccccaacgccaaccccaacgccaaccccaacgccaaccccaacgccaaccccaacgccaaccccaacgccaaccccaacgccaaccccaacgccaaccccaacgccaaccccaacgccaaccccaacgccaaccccaacgccaaccccaacgccaaccccaacgccaaccccaacgccaaccccaacaagaacaaccagggcaacggccagggccacaacaugcccaacgaccccaacagaaacguggacgagaacgccaacgccaacagcgccgugaagaacaacaacaacgaggagcccagcgacaagcacaucaaggaguaccugaacaagauccagaacagccugagcaccgaguggagccccugcagcgugaccugcggcaacggcauccaggugagaaucaagcccggcagcgccaacaagcccaaggacgagcuggacuacgccaacgacaucgagaagaagaucugcaagauggagaagugcagcagcguguucaacguggugaacagcagcaucggccugaucauggugcugagcuuccuguuccugaacugaggacuagucccuguucccagagcccacuuuuuuuucuuuuuuugaaauaaaauagccugucuuucagaucuaaaaaaaaaaaaaaaaaaaaaaaaaaaaaaaaaaaaaaaaaaaaaaaaaaaaaaaaaaaaaaaaugcaucccccccccccccccccccccccccccccccaaaggcucuuuucagagccaccagaauu

SEQ ID NO: 6436 - RNA, 1498 nt, Artificial Sequence
  mRNA Design a-3 (A64-N5-C30-hSL-N5) comprising derived and/or modified sequence from Pf(3D7)__XP_001351122.1__Pf-CSP(1-374) (opt4)
aggagagggcgcuuggcuugcaaggacccugagcugcggcauugaagcacacccaacccaacucgacugaagucagccucacugaaccggaucugagaaucuucucucucugggcuugccagggcucuccgaaccuagcuagcauccucuucaauuccaacuagaaagcuuaccaugaugagaaagcuggccauccugagcgugagcagcuuccuguucguggaggcccuguuccaggaguaccagugcuacggcagcagcagcaacaccagagugcugaacgagcugaacuacgacaacgccggcaccaaccuguacaacgagcuggagaugaacuacuacggcaagcaggagaacugguacagccugaagaagaacagcagaagccugggcgagaacgacgacggcaacaacgaggacaacgagaagcugagaaagcccaagcacaagaagcugaagcagcccgccgacggcaaccccgaccccaacgccaaccccaacguggaccccaacgccaaccccaacguggaccccaacgccaaccccaacguggaccccaacgccaaccccaacgccaaccccaacgccaaccccaacgccaaccccaacgccaaccccaacgccaaccccaacgccaaccccaacgccaaccccaacgccaaccccaacgccaaccccaacgccaaccccaacgccaaccccaacgccaaccccaacgccaaccccaacgccaaccccaacgccaaccccaacgccaaccccaacguggaccccaacgccaaccccaacgccaaccccaacgccaaccccaacgccaaccccaacgccaaccccaacgccaaccccaacgccaaccccaacgccaaccccaacgccaaccccaacgccaaccccaacgccaaccccaacgccaaccccaacgccaaccccaacgccaaccccaacgccaaccccaacgccaaccccaacgccaaccccaacgccaaccccaacaagaacaaccagggcaacggccagggccacaacaugcccaacgaccccaacagaaacguggacgagaacgccaacgccaacagcgccgugaagaacaacaacaacgaggagcccagcgacaagcacaucaaggaguaccugaacaagauccagaacagccugagcaccgaguggagccccugcagcgugaccugcggcaacggcauccaggugagaaucaagcccggcagcgccaacaagcccaaggacgagcuggacuacgccaacgacaucgagaagaagaucugcaagauggagaagugcugaggacuagucccuguucccagagcccacuuuuuuuucuuuuuuugaaauaaaauagccugucuuucagaucuaaaaaaaaaaaaaaaaaaaaaaaaaaaaaaaaaaaaaaaaaaaaaaaaaaaaaaaaaaaaaaaaugcaucccccccccccccccccccccccccccccccaaaggcucuuuucagagccaccagaauu

SEQ ID NO: 6437 - RNA, 1351 nt, Artificial Sequence
  mRNA Design a-3 (A64-N5-C30-hSL-N5) comprising derived and/or modified sequence from Pf(3D7)__XP_001351122.1__Pf-CSP(1-325) (opt4)
aggagagggcgcuuggcuugcaaggacccugagcugcggcauugaagcacacccaacccaacucgacugaagucagccucacugaaccggaucugagaaucuucucucucugggcuugccagggcucuccgaaccuagcuagcauccucuucaauuccaacuagaaagcuuaccaugaugagaaagcuggccauccugagcgugagcagcuuccuguucguggaggcccuguuccaggaguaccagugcuacggcagcagcagcaacaccagagugcugaacgagcugaacuacgacaacgccggcaccaaccuguacaacgagcuggagaugaacuacuacggcaagcaggagaacugguacagccugaagaagaacagcagaagccugggcgagaacgacgacggcaacaacgaggacaacgagaagcugagaaagcccaagcacaagaagcugaagcagcccgccgacggcaaccccgaccccaacgccaaccccaacguggaccccaacgccaaccccaacguggaccccaacgccaaccccaacguggaccccaacgccaaccccaacgccaaccccaacgccaaccccaacgccaaccccaacgccaaccccaacgccaaccccaacgccaaccccaacgccaaccccaacgccaaccccaacgccaaccccaacgccaaccccaacgccaaccccaacgccaaccccaacgccaaccccaacgccaaccccaacgccaaccccaacgccaaccccaacguggaccccaacgccaaccccaacgccaaccccaacgccaaccccaacgccaaccccaacgccaaccccaacgccaaccccaacgccaaccccaacgccaaccccaacgccaaccccaacgccaaccccaacgccaaccccaacgccaaccccaacgccaaccccaacgccaaccccaacgccaaccccaacgccaaccccaacgccaaccccaacgccaaccccaacaagaacaaccagggcaacggccagggccacaacaugcccaacgaccccaacagaaacguggacgagaacgccaacgccaacagcgccgugaagaacaacaacaacgaggagcccagcgacaagcacaucaaggaguaccugaacaagauccagaacugaggacuagucccuguucccagagcccacuuuuuuuucuuuuuuugaaauaaaauagccugucuuucagaucuaaaaaaaaaaaaaaaaaaaaaaaaaaaaaaaaaaaaaaaaaaaaaaaaaaaaaaaaaaaaaaaaugcaucccccccccccccccccccccccccccccccaaaggcucuuuucagagccaccagaauu

SEQ ID NO: 6438 - RNA, 1567 nt, Artificial Sequence
  mRNA Design a-3 (A64-N5-C30-hSL-N5) comprising derived and/or modified sequence from Pf(3D7)__XP_001351122.1__HsALB_Pf-CSP(19-397) (opt4)
aggagagggcgcuuggcuugcaaggacccugagcugcggcauugaagcacacccaacccaacucgacugaagucagccucacugaaccggaucugagaaucuucucucucugggcuugccagggcucuccgaaccuagcuagcauccucuucaauuccaacuagaaagcuuaccaugaagugggugaccuucaucagccugcuguuccuguucagcagcgccuacagccuguuccaggaguaccagugcuacggcagcagcagcaacaccagagugcugaacgagcugaacuacgacaacgccggcaccaaccuguacaacgagcuggagaugaacuacuacggcaagcaggagaacugguacagccugaagaagaacagcagaagccugggcgagaacgacgacggcaacaacgaggacaacgagaagcugagaaagcccaagcacaagaagcugaagcagcccgccgacggcaaccccgaccccaacgccaaccccaacguggaccccaacgccaaccccaacguggaccccaacgccaaccccaacguggaccccaacgccaaccccaacgccaaccccaacgccaaccccaacgccaaccccaacgccaaccccaacgccaaccccaacgccaaccccaacgccaaccccaacgccaaccccaacgccaaccccaacgccaaccccaacgccaaccccaacgccaaccccaacgccaaccccaacgccaaccccaacgccaaccccaacgccaaccccaacguggaccccaacgccaaccccaacgccaaccccaacgccaaccccaacgccaaccccaacgccaaccccaacgccaaccccaacgccaaccccaacgccaaccccaacgccaaccccaacgccaaccccaacgccaaccccaacgccaaccccaacgccaaccccaacgccaaccccaacgccaaccccaacgccaaccccaacgccaaccccaacgccaaccccaacaagaacaaccagggcaacggccagggccacaacaugcccaacgaccccaacagaaacguggacgagaacgccaacgccaacagcgccgugaagaacaacaacaacgaggagcccagcgacaagcacaucaaggaguaccugaacaagauccagaacagccugagcaccgaguggagccccugcagcgugaccugcggcaacggcauccaggugagaaucaagcccggcagcgccaacaagcccaaggacgagcuggacuacgccaacgacaucgagaagaagaucugcaagauggagaagugcagcagcguguucaacguggugaacagcagcaucggccugaucauggugcugagcuuccuguuccugaacugaggacuagucccuguucccagagcccacuuuuuuuucuuuuuuugaaauaaaauagccugucuuucagaucuaaaaaaaaaaaaaaaaaaaaaaaaaaaaaaaaaaaaaaaaaaaaaaaaaaaaaaaaaaaaaaaaugcaucccccccccccccccccccccccccccccccaaaggcucuuuucagagccaccagaauu

SEQ ID NO: 6439 - RNA, 1585 nt, Artificial Sequence
  mRNA Design a-3 (A64-N5-C30-hSL-N5) comprising derived and/or modified sequence from Pf(3D7)__XP_001351122.1__HsIns-iso1_Pf-CSP(19-397) (opt4)
aggagagggcgcuuggcuugcaaggacccugagcugcggcauugaagcacacccaacccaacucgacugaagucagccucacugaaccggaucugagaaucuucucucucugggcuugccagggcucuccgaaccuagcuagcauccucuucaauuccaacuagaaagcuuaccauggcccuguggaugagacugcugccccugcuggcccugcuggcccuguggggccccgaccccgccgccgcccuguuccaggaguaccagugcuacggcagcagcagcaacaccagagugcugaacgagcugaacuacgacaacgccggcaccaaccuguacaacgagcuggagaugaacuacuacggcaagcaggagaacugguacagccugaagaagaacagcagaagccugggcgagaacgacgacggcaacaacgaggacaacgagaagcugagaaagcccaagcacaagaagcugaagcagcccgccgacggcaaccccgaccccaacgccaaccccaacguggaccccaacgccaaccccaacguggaccccaacgccaaccccaacguggaccccaacgccaaccccaacgccaaccccaacgccaaccccaacgccaaccccaacgccaaccccaacgccaaccccaacgccaaccccaacgccaaccccaacgccaaccccaacgccaaccccaacgccaaccccaacgccaaccccaacgccaaccccaacgccaaccccaacgccaaccccaacgccaaccccaacgccaaccccaacguggaccccaacgccaaccccaacgccaaccccaacgccaaccccaacgccaaccccaacgccaaccccaacgccaaccccaacgccaaccccaacgccaaccccaacgccaaccccaacgccaaccccaacgccaaccccaacgccaaccccaacgccaaccccaacgccaaccccaacgccaaccccaacgccaaccccaacgccaaccccaacgccaaccccaacaagaacaaccagggcaacggccagggccacaacaugcccaacgaccccaacagaaacguggacgagaacgccaacgccaacagcgccgugaagaacaacaacaacgaggagcccagcgacaagcacaucaaggaguaccugaacaagauccagaacagccugagcaccgaguggagccccugcagcgugaccugcggcaacggcauccaggugagaaucaagcccggcagcgccaacaagcccaaggacgagcuggacuacgccaacgacaucgagaagaagaucugcaagauggagaagugcagcagcguguucaacguggugaacagcagcaucggccugaucauggugcugagcuuccuguuccugaacugaggacuagucccuguucccagagcccacuuuuuuuucuuuuuuugaaauaaaauagccugucuuucagaucuaaaaaaaaaaaaaaaaaaaaaaaaaaaaaaaaaaaaaaaaaaaaaaaaaaaaaaaaaaaaaaaaugcaucccccccccccccccccccccccccccccccaaaggcucuuuucagagccaccagaauu

SEQ ID NO: 6440 - RNA, 1564 nt, Artificial Sequence
  mRNA Design a-3 (A64-N5-C30-hSL-N5) comprising derived and/or modified sequence from Pf(3D7)__XP_001351122.1__HsSPARC_Pf-CSP(19-397) (opt4)
aggagagggcgcuuggcuugcaaggacccugagcugcggcauugaagcacacccaacccaacucgacugaagucagccucacugaaccggaucugagaaucuucucucucugggcuugccagggcucuccgaaccuagcuagcauccucuucaauuccaacuagaaagcuuaccaugagagccuggaucuucuuccugcugugccuggccggcagagcccuggcccuguuccaggaguaccagugcuacggcagcagcagcaacaccagagugcugaacgagcugaacuacgacaacgccggcaccaaccuguacaacgagcuggagaugaacuacuacggcaagcaggagaacugguacagccugaagaagaacagcagaagccugggcgagaacgacgacggcaacaacgaggacaacgagaagcugagaaagcccaagcacaagaagcugaagcagcccgccgacggcaaccccgaccccaacgccaaccccaacguggaccccaacgccaaccccaacguggaccccaacgccaaccccaacguggaccccaacgccaaccccaacgccaaccccaacgccaaccccaacgccaaccccaacgccaaccccaacgccaaccccaacgccaaccccaacgccaaccccaacgccaaccccaacgccaaccccaacgccaaccccaacgccaaccccaacgccaaccccaacgccaaccccaacgccaaccccaacgccaaccccaacgccaaccccaacguggaccccaacgccaaccccaacgccaaccccaacgccaaccccaacgccaaccccaacgccaaccccaacgccaaccccaacgccaaccccaacgccaaccccaacgccaaccccaacgccaaccccaacgccaaccccaacgccaaccccaacgccaaccccaacgccaaccccaacgccaaccccaacgccaaccccaacgccaaccccaacgccaaccccaacaagaacaaccagggcaacggccagggccacaacaugcccaacgaccccaacagaaacguggacgagaacgccaacgccaacagcgccgugaagaacaacaacaacgaggagcccagcgacaagcacaucaaggaguaccugaacaagauccagaacagccugagcaccgaguggagccccugcagcgugaccugcggcaacggcauccaggugagaaucaagcccggcagcgccaacaagcccaaggacgagcuggacuacgccaacgacaucgagaagaagaucugcaagauggagaagugcagcagcguguucaacguggugaacagcagcaucggccugaucauggugcugagcuuccuguuccugaacugaggacuagucccuguucccagagcccacuuuuuuuucuuuuuuugaaauaaaauagccugucuuucagaucuaaaaaaaaaaaaaaaaaaaaaaaaaaaaaaaaaaaaaaaaaaaaaaaaaaaaaaaaaaaaaaaaugcaucccccccccccccccccccccccccccccccaaaggcucuuuucagagccaccagaauu

SEQ ID NO: 6441 - RNA, 1567 nt, Artificial Sequence
  mRNA Design a-3 (A64-N5-C30-hSL-N5) comprising derived and/or modified sequence from Pf(3D7)__XP_001351122.1__IgE_Pf-CSP(19-397) (opt4)
aggagagggcgcuuggcuugcaaggacccugagcugcggcauugaagcacacccaacccaacucgacugaagucagccucacugaaccggaucugagaaucuucucucucugggcuugccagggcucuccgaaccuagcuagcauccucuucaauuccaacuagaaagcuuaccauggacuggaccuggauccuguuccugguggccgccgccaccagagugcacagccuguuccaggaguaccagugcuacggcagcagcagcaacaccagagugcugaacgagcugaacuacgacaacgccggcaccaaccuguacaacgagcuggagaugaacuacuacggcaagcaggagaacugguacagccugaagaagaacagcagaagccugggcgagaacgacgacggcaacaacgaggacaacgagaagcugagaaagcccaagcacaagaagcugaagcagcccgccgacggcaaccccgaccccaacgccaaccccaacguggaccccaacgccaaccccaacguggaccccaacgccaaccccaacguggaccccaacgccaaccccaacgccaaccccaacgccaaccccaacgccaaccccaacgccaaccccaacgccaaccccaacgccaaccccaacgccaaccccaacgccaaccccaacgccaaccccaacgccaaccccaacgccaaccccaacgccaaccccaacgccaaccccaacgccaaccccaacgccaaccccaacgccaaccccaacguggaccccaacgccaaccccaacgccaaccccaacgccaaccccaacgccaaccccaacgccaaccccaacgccaaccccaacgccaaccccaacgccaaccccaacgccaaccccaacgccaaccccaacgccaaccccaacgccaaccccaacgccaaccccaacgccaaccccaacgccaaccccaacgccaaccccaacgccaaccccaacgccaaccccaacaagaacaaccagggcaacggccagggccacaacaugcccaacgaccccaacagaaacguggacgagaacgccaacgccaacagcgccgugaagaacaacaacaacgaggagcccagcgacaagcacaucaaggaguaccugaacaagauccagaacagccugagcaccgaguggagccccugcagcgugaccugcggcaacggcauccaggugagaaucaagcccggcagcgccaacaagcccaaggacgagcuggacuacgccaacgacaucgagaagaagaucugcaagauggagaagugcagcagcguguucaacguggugaacagcagcaucggccugaucauggugcugagcuuccuguuccugaacugaggacuagucccuguucccagagcccacuuuuuuuucuuuuuuugaaauaaaauagccugucuuucagaucuaaaaaaaaaaaaaaaaaaaaaaaaaaaaaaaaaaaaaaaaaaaaaaaaaaaaaaaaaaaaaaaaugcaucccccccccccccccccccccccccccccccaaaggcucuuuucagagccaccagaauu

SEQ ID NO: 6442 - RNA, 1732 nt, Artificial Sequence
  mRNA Design a-3 (A64-N5-C30-hSL-N5) comprising derived and/or modified sequence from Pf(3D7)__XP_001351122.1__Pf-CSP_L(G4SG4)_TM domain HA (opt4)
aggagagggcgcuuggcuugcaaggacccugagcugcggcauugaagcacacccaacccaacucgacugaagucagccucacugaaccggaucugagaaucuucucucucugggcuugccagggcucuccgaaccuagcuagcauccucuucaauuccaacuagaaagcuuaccaugaugagaaagcuggccauccugagcgugagcagcuuccuguucguggaggcccuguuccaggaguaccagugcuacggcagcagcagcaacaccagagugcugaacgagcugaacuacgacaacgccggcaccaaccuguacaacgagcuggagaugaacuacuacggcaagcaggagaacugguacagccugaagaagaacagcagaagccugggcgagaacgacgacggcaacaacgaggacaacgagaagcugagaaagcccaagcacaagaagcugaagcagcccgccgacggcaaccccgaccccaacgccaaccccaacguggaccccaacgccaaccccaacguggaccccaacgccaaccccaacguggaccccaacgccaaccccaacgccaaccccaacgccaaccccaacgccaaccccaacgccaaccccaacgccaaccccaacgccaaccccaacgccaaccccaacgccaaccccaacgccaaccccaacgccaaccccaacgccaaccccaacgccaaccccaacgccaaccccaacgccaaccccaacgccaaccccaacgccaaccccaacguggaccccaacgccaaccccaacgccaaccccaacgccaaccccaacgccaaccccaacgccaaccccaacgccaaccccaacgccaaccccaacgccaaccccaacgccaaccccaacgccaaccccaacgccaaccccaacgccaaccccaacgccaaccccaacgccaaccccaacgccaaccccaacgccaaccccaacgccaaccccaacgccaaccccaacaagaacaaccagggcaacggccagggccacaacaugcccaacgaccccaacagaaacguggacgagaacgccaacgccaacagcgccgugaagaacaacaacaacgaggagcccagcgacaagcacaucaaggaguaccugaacaagauccagaacagccugagcaccgaguggagccccugcagcgugaccugcggcaacggcauccaggugagaaucaagcccggcagcgccaacaagcccaaggacgagcuggacuacgccaacgacaucgagaagaagaucugcaagauggagaagugcagcagcguguucaacguggugaacagcagcaucggccugaucauggugcugagcuuccuguuccugaacggcggcggcggcagcggcggcggcggcaagcuggagagcaccagaaucuaccagauccuggccaucuacagcaccguggccagcagccuggugcugguggugagccugggcgccaucagcuucuggaugugcagcaacggcagccugcagugcagaaucugcaucugaggacuagucccuguucccagagcccacuuuuuuuucuuuuuuugaaauaaaauagccugucuuucagaucuaaaaaaaaaaaaaaaaaaaaaaaaaaaaaaaaaaaaaaaaaaaaaaaaaaaaaaaaaaaaaaaaugcaucccccccccccccccccccccccccccccccaaaggcucuuuucagagccaccagaauu

SEQ ID NO: 6443 - RNA, 1606 nt, Artificial Sequence
  mRNA Design a-3 (A64-N5-C30-hSL-N5) comprising derived and/or modified sequence from Pf(3D7)__XP_001351122.1__Pf-CSP(199-377)_L(PVTN)_HBsAg (opt4)
aggagagggcgcuuggcuugcaaggacccugagcugcggcauugaagcacacccaacccaacucgacugaagucagccucacugaaccggaucugagaaucuucucucucugggcuugccagggcucuccgaaccuagcuagcauccucuucaauuccaacuagaaagcuuaccauggaccccaacgccaaccccaacgccaaccccaacgccaaccccaacgccaaccccaacgccaaccccaacgccaaccccaacgccaaccccaacgccaaccccaacgccaaccccaacgccaaccccaacgccaaccccaacgccaaccccaacgccaaccccaacgccaaccccaacgccaaccccaacgccaaccccaacgccaaccccaacgccaaccccaacaagaacaaccagggcaacggccagggccacaacaugcccaacgaccccaacagaaacguggacgagaacgccaacgccaacagcgccgugaagaacaacaacaacgaggagcccagcgacaagcacaucaaggaguaccugaacaagauccagaacagccugagcaccgaguggagccccugcagcgugaccugcggcaacggcauccaggugagaaucaagcccggcagcgccaacaagcccaaggacgagcuggacuacgccaacgacaucgagaagaagaucugcaagauggagaagugcagcagcgugcccgugaccaacauggagaacaucaccagcggcuuccugggcccccugcuggugcugcaggccggcuucuuccugcugaccagaauccugaccaucccccagagccuggacagcugguggaccagccugaacuuccugggcggcagccccgugugccugggccagaacagccagagccccaccagcaaccacagccccaccagcugcccccccaucugccccggcuacagauggaugugccugagaagauucaucaucuuccuguucauccugcugcugugccugaucuuccugcuggugcugcuggacuaccagggcaugcugcccgugugcccccugauccccggcagcaccaccaccaacaccggccccugcaagaccugcaccacccccgcccagggcaacagcauguuccccagcugcugcugcaccaagcccaccgacggcaacugcaccugcauccccauccccagcagcugggccuucgccaaguaccugugggagugggccagcgugagauucagcuggcugagccugcuggugcccuucgugcagugguucgugggccugagccccaccguguggcugagcgccaucuggaugaugugguacuggggccccagccuguacagcaucgugagccccuucaucccccugcugcccaucuucuucugccuguggguguacaucugaggacuagucccuguucccagagcccacuuuuuuuucuuuuuuugaaauaaaauagccugucuuucagaucuaaaaaaaaaaaaaaaaaaaaaaaaaaaaaaaaaaaaaaaaaaaaaaaaaaaaaaaaaaaaaaaaugcaucccccccccccccccccccccccccccccccaaaggcucuuuucagagccaccagaauu

SEQ ID NO: 6444 - RNA, 1648 nt, Artificial Sequence
  mRNA Design a-3 (A64-N5-C30-hSL-N5) comprising derived and/or modified sequence from Pf(3D7)__XP_001351122.1__Pf-CSP(199-387)_L(PVTN)_HBsAg (opt4)
aggagagggcgcuuggcuugcaaggacccugagcugcggcauugaagcacacccaacccaacucgacugaagucagccucacugaaccggaucugagaaucuucucucucugggcuugccagggcucuccgaaccuagcuagcauccucuucaauuccaacuagaaagcuuaccaugauggcccccgaccccaacgccaaccccaacgccaaccccaacgccaaccccaacgccaaccccaacgccaaccccaacgccaaccccaacgccaaccccaacgccaaccccaacgccaaccccaacgccaaccccaacgccaaccccaacgccaaccccaacgccaaccccaacgccaaccccaacgccaaccccaacgccaaccccaacgccaaccccaacgccaaccccaacaagaacaaccagggcaacggccagggccacaacaugcccaacgaccccaacagaaacguggacgagaacgccaacgccaacagcgccgugaagaacaacaacaacgaggagcccagcgacaagcacaucaaggaguaccugaacaagauccagaacagccugagcaccgaguggagccccugcagcgugaccugcggcaacggcauccaggugagaaucaagcccggcagcgccaacaagcccaaggacgagcuggacuacgccaacgacaucgagaagaagaucugcaagauggagaagugcagcagcguguucaacguggugaacagcagcaucggccugggccccgugaccaacauggagaacaucaccagcggcuuccugggcccccugcuggugcugcaggccggcuucuuccugcugaccagaauccugaccaucccccagagccuggacagcugguggaccagccugaacuuccugggcggcagccccgugugccugggccagaacagccagagccccaccagcaaccacagccccaccagcugcccccccaucugccccggcuacagauggaugugccugagaagauucaucaucuuccuguucauccugcugcugugccugaucuuccugcuggugcugcuggacuaccagggcaugcugcccgugugcccccugauccccggcagcaccaccaccaacaccggccccugcaagaccugcaccacccccgcccagggcaacagcauguuccccagcugcugcugcaccaagcccaccgacggcaacugcaccugcauccccauccccagcagcugggccuucgccaaguaccugugggagugggccagcgugagauucagcuggcugagccugcuggugcccuucgugcagugguucgugggccugagccccaccguguggcugagcgccaucuggaugaugugguacuggggccccagccuguacagcaucgugagccccuucaucccccugcugcccaucuucuucugccuguggguguacaucugaggacuagucccuguucccagagcccacuuuuuuuucuuuuuuugaaauaaaauagccugucuuucagaucuaaaaaaaaaaaaaaaaaaaaaaaaaaaaaaaaaaaaaaaaaaaaaaaaaaaaaaaaaaaaaaaaugcaucccccccccccccccccccccccccccccccaaaggcucuuuucagagccaccagaauu

SEQ ID NO: 6445 - RNA, 832 nt, Artificial Sequence
  mRNA Design a-3 (A64-N5-C30-hSL-N5) comprising derived and/or modified sequence from Pf(3D7)__XP_001351122.1__HsALB_Pf-CSP(19-152) (opt4)
aggagagggcgcuuggcuugcaaggacccugagcugcggcauugaagcacacccaacccaacucgacugaagucagccucacugaaccggaucugagaaucuucucucucugggcuugccagggcucuccgaaccuagcuagcauccucuucaauuccaacuagaaagcuuaccaugaagugggugaccuucaucagccugcuguuccuguucagcagcgccuacagccuguuccaggaguaccagugcuacggcagcagcagcaacaccagagugcugaacgagcugaacuacgacaacgccggcaccaaccuguacaacgagcuggagaugaacuacuacggcaagcaggagaacugguacagccugaagaagaacagcagaagccugggcgagaacgacgacggcaacaacgaggacaacgagaagcugagaaagcccaagcacaagaagcugaagcagcccgccgacggcaaccccgaccccaacgccaaccccaacguggaccccaacgccaaccccaacguggaccccaacgccaaccccaacguggaccccaacgccaaccccaacgccaaccccaacgccaaccccaacgccaaccccaacgccaaccccaacgccaaccccugaggacuagucccuguucccagagcccacuuuuuuuucuuuuuuugaaauaaaauagccugucuuucagaucuaaaaaaaaaaaaaaaaaaaaaaaaaaaaaaaaaaaaaaaaaaaaaaaaaaaaaaaaaaaaaaaaugcaucccccccccccccccccccccccccccccccaaaggcucuuuucagagccaccagaauu

SEQ ID NO: 6446 - RNA, 952 nt, Artificial Sequence
  mRNA Design a-3 (A64-N5-C30-hSL-N5) comprising derived and/or modified sequence from Pf(3D7)__XP_001351122.1__HsALB_Pf-CSP(19-192) (opt4)
aggagagggcgcuuggcuugcaaggacccugagcugcggcauugaagcacacccaacccaacucgacugaagucagccucacugaaccggaucugagaaucuucucucucugggcuugccagggcucuccgaaccuagcuagcauccucuucaauuccaacuagaaagcuuaccaugaagugggugaccuucaucagccugcuguuccuguucagcagcgccuacagccuguuccaggaguaccagugcuacggcagcagcagcaacaccagagugcugaacgagcugaacuacgacaacgccggcaccaaccuguacaacgagcuggagaugaacuacuacggcaagcaggagaacugguacagccugaagaagaacagcagaagccugggcgagaacgacgacggcaacaacgaggacaacgagaagcugagaaagcccaagcacaagaagcugaagcagcccgccgacggcaaccccgaccccaacgccaaccccaacguggaccccaacgccaaccccaacguggaccccaacgccaaccccaacguggaccccaacgccaaccccaacgccaaccccaacgccaaccccaacgccaaccccaacgccaaccccaacgccaaccccaacgccaaccccaacgccaaccccaacgccaaccccaacgccaaccccaacgccaaccccaacgccaaccccaacgccaaccccaacgccaaccccaacgccaaccccaacgccaaccccugaggacuagucccuguucccagagcccacuuuuuuuucuuuuuuugaaauaaaauagccugucuuucagaucuaaaaaaaaaaaaaaaaaaaaaaaaaaaaaaaaaaaaaaaaaaaaaaaaaaaaaaaaaaaaaaaaugcaucccccccccccccccccccccccccccccccaaaggcucuuuucagagccaccagaauu

SEQ ID NO: 6447 - RNA, 1192 nt, Artificial Sequence
  mRNA Design a-3 (A64-N5-C30-hSL-N5) comprising derived and/or modified sequence from Pf(3D7)__XP_001351122.1__HsALB_Pf-CSP(19-272) (opt4)
aggagagggcgcuuggcuugcaaggacccugagcugcggcauugaagcacacccaacccaacucgacugaagucagccucacugaaccggaucugagaaucuucucucucugggcuugccagggcucuccgaaccuagcuagcauccucuucaauuccaacuagaaagcuuaccaugaagugggugaccuucaucagccugcuguuccuguucagcagcgccuacagccuguuccaggaguaccagugcuacggcagcagcagcaacaccagagugcugaacgagcugaacuacgacaacgccggcaccaaccuguacaacgagcuggagaugaacuacuacggcaagcaggagaacugguacagccugaagaagaacagcagaagccugggcgagaacgacgacggcaacaacgaggacaacgagaagcugagaaagcccaagcacaagaagcugaagcagcccgccgacggcaaccccgaccccaacgccaaccccaacguggaccccaacgccaaccccaacguggaccccaacgccaaccccaacguggaccccaacgccaaccccaacgccaaccccaacgccaaccccaacgccaaccccaacgccaaccccaacgccaaccccaacgccaaccccaacgccaaccccaacgccaaccccaacgccaaccccaacgccaaccccaacgccaaccccaacgccaaccccaacgccaaccccaacgccaaccccaacgccaaccccaacgccaaccccaacguggaccccaacgccaaccccaacgccaaccccaacgccaaccccaacgccaaccccaacgccaaccccaacgccaaccccaacgccaaccccaacgccaaccccaacgccaaccccaacgccaaccccaacgccaaccccaacgccaaccccaacgccaaccccaacgccaaccccaacgccaaccccaacgccaaccccaacgccaaccccaacgccaaccccugaggacuagucccuguucccagagcccacuuuuuuuucuuuuuuugaaauaaaauagccugucuuucagaucuaaaaaaaaaaaaaaaaaaaaaaaaaaaaaaaaaaaaaaaaaaaaaaaaaaaaaaaaaaaaaaaaugcaucccccccccccccccccccccccccccccccaaaggcucuuuucagagccaccagaauu

SEQ ID NO: 6448 - RNA, 1354 nt, Artificial Sequence
  mRNA Design a-3 (A64-N5-C30-hSL-N5) comprising derived and/or modified sequence from Pf(3D7)__XP_001351122.1__HsALB_Pf-CSP(19-272)_L(AAY)_Pf-CSP(310-3 27)_L(AAY)_Pf-CSP(346-375) (opt4)
aggagagggcgcuuggcuugcaaggacccugagcugcggcauugaagcacacccaacccaacucgacugaagucagccucacugaaccggaucugagaaucuucucucucugggcuugccagggcucuccgaaccuagcuagcauccucuucaauuccaacuagaaagcuuaccaugaagugggugaccuucaucagccugcuguuccuguucagcagcgccuacagccuguuccaggaguaccagugcuacggcagcagcagcaacaccagagugcugaacgagcugaacuacgacaacgccggcaccaaccuguacaacgagcuggagaugaacuacuacggcaagcaggagaacugguacagccugaagaagaacagcagaagccugggcgagaacgacgacggcaacaacgaggacaacgagaagcugagaaagcccaagcacaagaagcugaagcagcccgccgacggcaaccccgaccccaacgccaaccccaacguggaccccaacgccaaccccaacguggaccccaacgccaaccccaacguggaccccaacgccaaccccaacgccaaccccaacgccaaccccaacgccaaccccaacgccaaccccaacgccaaccccaacgccaaccccaacgccaaccccaacgccaaccccaacgccaaccccaacgccaaccccaacgccaaccccaacgccaaccccaacgccaaccccaacgccaaccccaacgccaaccccaacgccaaccccaacguggaccccaacgccaaccccaacgccaaccccaacgccaaccccaacgccaaccccaacgccaaccccaacgccaaccccaacgccaaccccaacgccaaccccaacgccaaccccaacgccaaccccaacgccaaccccaacgccaaccccaacgccaaccccaacgccaaccccaacgccaaccccaacgccaaccccaacgccaaccccaacgccaaccccgccgccuacgagcccagcgacaagcacaucaaggaguaccugaacaagauccagaacagccuggccgccuacaucaagcccggcagcgccaacaagcccaaggacgagcuggacuacgccaacgacaucgagaagaagaucugcaagauggagaagugcagcugaggacuagucccuguucccagagcccacuuuuuuuucuuuuuuugaaauaaaauagccugucuuucagaucuaaaaaaaaaaaaaaaaaaaaaaaaaaaaaaaaaaaaaaaaaaaaaaaaaaaaaaaaaaaaaaaaugcaucccccccccccccccccccccccccccccccaaaggcucuuuucagagccaccagaauu

SEQ ID NO: 6449 - RNA, 1315 nt, Artificial Sequence
  mRNA Design a-3 (A64-N5-C30-hSL-N5) comprising derived and/or modified sequence from Pf(3D7)__XP_001351122.1__HsALB_Pf-CSP(19-272)_L(AAY)_Pf-CSP(346-3 65)_L(AAY)_P2 (opt4)
aggagagggcgcuuggcuugcaaggacccugagcugcggcauugaagcacacccaacccaacucgacugaagucagccucacugaaccggaucugagaaucuucucucucugggcuugccagggcucuccgaaccuagcuagcauccucuucaauuccaacuagaaagcuuaccaugaagugggugaccuucaucagccugcuguuccuguucagcagcgccuacagccuguuccaggaguaccagugcuacggcagcagcagcaacaccagagugcugaacgagcugaacuacgacaacgccggcaccaaccuguacaacgagcuggagaugaacuacuacggcaagcaggagaacugguacagccugaagaagaacagcagaagccugggcgagaacgacgacggcaacaacgaggacaacgagaagcugagaaagcccaagcacaagaagcugaagcagcccgccgacggcaaccccgaccccaacgccaaccccaacguggaccccaacgccaaccccaacguggaccccaacgccaaccccaacguggaccccaacgccaaccccaacgccaaccccaacgccaaccccaacgccaaccccaacgccaaccccaacgccaaccccaacgccaaccccaacgccaaccccaacgccaaccccaacgccaaccccaacgccaaccccaacgccaaccccaacgccaaccccaacgccaaccccaacgccaaccccaacgccaaccccaacgccaaccccaacguggaccccaacgccaaccccaacgccaaccccaacgccaaccccaacgccaaccccaacgccaaccccaacgccaaccccaacgccaaccccaacgccaaccccaacgccaaccccaacgccaaccccaacgccaaccccaacgccaaccccaacgccaaccccaacgccaaccccaacgccaaccccaacgccaaccccaacgccaaccccaacgccaaccccgccgccuacaucaagcccggcagcgccaacaagcccaaggacgagcuggacuacgccaacgacaucgaggccgccuaccaguacaucaaggccaacagcaaguucaucggcaucaccgagcugugaggacuagucccuguucccagagcccacuuuuuuuucuuuuuuugaaauaaaauagccugucuuucagaucuaaaaaaaaaaaaaaaaaaaaaaaaaaaaaaaaaaaaaaaaaaaaaaaaaaaaaaaaaaaaaaaaugcaucccccccccccccccccccccccccccccccaaaggcucuuuucagagccaccagaauu

SEQ ID NO: 6450 - RNA, 1309 nt, Artificial Sequence
  mRNA Design a-3 (A64-N5-C30-hSL-N5) comprising derived and/or modified sequence from Pf(3D7)__XP_001351122.1__HsALB_Pf-CSP(19-272)_L(AAY)_Pf-CSP(346-3 65)_L(AAY)_PADRE (opt4)
aggagagggcgcuuggcuugcaaggacccugagcugcggcauugaagcacacccaacccaacucgacugaagucagccucacugaaccggaucugagaaucuucucucucugggcuugccagggcucuccgaaccuagcuagcauccucuucaauuccaacuagaaagcuuaccaugaagugggugaccuucaucagccugcuguuccuguucagcagcgccuacagccuguuccaggaguaccagugcuacggcagcagcagcaacaccagagugcugaacgagcugaacuacgacaacgccggcaccaaccuguacaacgagcuggagaugaacuacuacggcaagcaggagaacugguacagccugaagaagaacagcagaagccugggcgagaacgacgacggcaacaacgaggacaacgagaagcugagaaagcccaagcacaagaagcugaagcagcccgccgacggcaaccccgaccccaacgccaaccccaacguggaccccaacgccaaccccaacguggaccccaacgccaaccccaacguggaccccaacgccaaccccaacgccaaccccaacgccaaccccaacgccaaccccaacgccaaccccaacgccaaccccaacgccaaccccaacgccaaccccaacgccaaccccaacgccaaccccaacgccaaccccaacgccaaccccaacgccaaccccaacgccaaccccaacgccaaccccaacgccaaccccaacgccaaccccaacguggaccccaacgccaaccccaacgccaaccccaacgccaaccccaacgccaaccccaacgccaaccccaacgccaaccccaacgccaaccccaacgccaaccccaacgccaaccccaacgccaaccccaacgccaaccccaacgccaaccccaacgccaaccccaacgccaaccccaacgccaaccccaacgccaaccccaacgccaaccccaacgccaaccccgccgccuacaucaagcccggcagcgccaacaagcccaaggacgagcuggacuacgccaacgacaucgaggccgccuacgccaaguucguggccgccuggacccugaaggccgccgccugaggacuagucccuguucccagagcccacuuuuuuuucuuuuuuugaaauaaaauagccugucuuucagaucuaaaaaaaaaaaaaaaaaaaaaaaaaaaaaaaaaaaaaaaaaaaaaaaaaaaaaaaaaaaaaaaaugcaucccccccccccccccccccccccccccccccaaaggcucuuuucagagccaccagaauu

SEQ ID NO: 6451 - RNA, 1366 nt, Artificial Sequence
  mRNA Design a-3 (A64-N5-C30-hSL-N5) comprising derived and/or modified sequence from Pf(3D7)__XP_001351122.1__HsALB_Pf-CSP(19-272)_L(G4S)_Pf-CSP(310-3 27)_L(G4S)_Pf-CSP(346-375) (opt4)
aggagagggcgcuuggcuugcaaggacccugagcugcggcauugaagcacacccaacccaacucgacugaagucagccucacugaaccggaucugagaaucuucucucucugggcuugccagggcucuccgaaccuagcuagcauccucuucaauuccaacuagaaagcuuaccaugaagugggugaccuucaucagccugcuguuccuguucagcagcgccuacagccuguuccaggaguaccagugcuacggcagcagcagcaacaccagagugcugaacgagcugaacuacgacaacgccggcaccaaccuguacaacgagcuggagaugaacuacuacggcaagcaggagaacugguacagccugaagaagaacagcagaagccugggcgagaacgacgacggcaacaacgaggacaacgagaagcugagaaagcccaagcacaagaagcugaagcagcccgccgacggcaaccccgaccccaacgccaaccccaacguggaccccaacgccaaccccaacguggaccccaacgccaaccccaacguggaccccaacgccaaccccaacgccaaccccaacgccaaccccaacgccaaccccaacgccaaccccaacgccaaccccaacgccaaccccaacgccaaccccaacgccaaccccaacgccaaccccaacgccaaccccaacgccaaccccaacgccaaccccaacgccaaccccaacgccaaccccaacgccaaccccaacgccaaccccaacguggaccccaacgccaaccccaacgccaaccccaacgccaaccccaacgccaaccccaacgccaaccccaacgccaaccccaacgccaaccccaacgccaaccccaacgccaaccccaacgccaaccccaacgccaaccccaacgccaaccccaacgccaaccccaacgccaaccccaacgccaaccccaacgccaaccccaacgccaaccccaacgccaaccccggcggcggcggcagcgagcccagcgacaagcacaucaaggaguaccugaacaagauccagaacagccugggcggcggcggcagcaucaagcccggcagcgccaacaagcccaaggacgagcuggacuacgccaacgacaucgagaagaagaucugcaagauggagaagugcagcugaggacuagucccuguucccagagcccacuuuuuuuucuuuuuuugaaauaaaauagccugucuuucagaucuaaaaaaaaaaaaaaaaaaaaaaaaaaaaaaaaaaaaaaaaaaaaaaaaaaaaaaaaaaaaaaaaugcaucccccccccccccccccccccccccccccccaaaggcucuuuucagagccaccagaauu

SEQ ID NO: 6452 - RNA, 1351 nt, Artificial Sequence
  mRNA Design a-3 (A64-N5-C30-hSL-N5) comprising derived and/or modified sequence from Pf(3D7)__XP_001351122.1__HsALB_Pf-CSP(19-272)_L(G4S)_Pf-CSP(310-3 27)_Pf-CSP(346-375) (opt4)
aggagagggcgcuuggcuugcaaggacccugagcugcggcauugaagcacacccaacccaacucgacugaagucagccucacugaaccggaucugagaaucuucucucucugggcuugccagggcucuccgaaccuagcuagcauccucuucaauuccaacuagaaagcuuaccaugaagugggugaccuucaucagccugcuguuccuguucagcagcgccuacagccuguuccaggaguaccagugcuacggcagcagcagcaacaccagagugcugaacgagcugaacuacgacaacgccggcaccaaccuguacaacgagcuggagaugaacuacuacggcaagcaggagaacugguacagccugaagaagaacagcagaagccugggcgagaacgacgacggcaacaacgaggacaacgagaagcugagaaagcccaagcacaagaagcugaagcagcccgccgacggcaaccccgaccccaacgccaaccccaacguggaccccaacgccaaccccaacguggaccccaacgccaaccccaacguggaccccaacgccaaccccaacgccaaccccaacgccaaccccaacgccaaccccaacgccaaccccaacgccaaccccaacgccaaccccaacgccaaccccaacgccaaccccaacgccaaccccaacgccaaccccaacgccaaccccaacgccaaccccaacgccaaccccaacgccaaccccaacgccaaccccaacgccaaccccaacguggaccccaacgccaaccccaacgccaaccccaacgccaaccccaacgccaaccccaacgccaaccccaacgccaaccccaacgccaaccccaacgccaaccccaacgccaaccccaacgccaaccccaacgccaaccccaacgccaaccccaacgccaaccccaacgccaaccccaacgccaaccccaacgccaaccccaacgccaaccccaacgccaaccccggcggcggcggcagcgagcccagcgacaagcacaucaaggaguaccugaacaagauccagaacagccugaucaagcccggcagcgccaacaagcccaaggacgagcuggacuacgccaacgacaucgagaagaagaucugcaagauggagaagugcagcugaggacuagucccuguucccagagcccacuuuuuuuucuuuuuuugaaauaaaauagccugucuuucagaucuaaaaaaaaaaaaaaaaaaaaaaaaaaaaaaaaaaaaaaaaaaaaaaaaaaaaaaaaaaaaaaaaugcaucccccccccccccccccccccccccccccccaaaggcucuuuucagagccaccagaauu

SEQ ID NO: 6453 - RNA, 1351 nt, Artificial Sequence
  mRNA Design a-3 (A64-N5-C30-hSL-N5) comprising derived and/or modified sequence from Pf(3D7)__XP_001351122.1__HsALB_Pf-CSP(19-325) (opt4)
aggagagggcgcuuggcuugcaaggacccugagcugcggcauugaagcacacccaacccaacucgacugaagucagccucacugaaccggaucugagaaucuucucucucugggcuugccagggcucuccgaaccuagcuagcauccucuucaauuccaacuagaaagcuuaccaugaagugggugaccuucaucagccugcuguuccuguucagcagcgccuacagccuguuccaggaguaccagugcuacggcagcagcagcaacaccagagugcugaacgagcugaacuacgacaacgccggcaccaaccuguacaacgagcuggagaugaacuacuacggcaagcaggagaacugguacagccugaagaagaacagcagaagccugggcgagaacgacgacggcaacaacgaggacaacgagaagcugagaaagcccaagcacaagaagcugaagcagcccgccgacggcaaccccgaccccaacgccaaccccaacguggaccccaacgccaaccccaacguggaccccaacgccaaccccaacguggaccccaacgccaaccccaacgccaaccccaacgccaaccccaacgccaaccccaacgccaaccccaacgccaaccccaacgccaaccccaacgccaaccccaacgccaaccccaacgccaaccccaacgccaaccccaacgccaaccccaacgccaaccccaacgccaaccccaacgccaaccccaacgccaaccccaacgccaaccccaacguggaccccaacgccaaccccaacgccaaccccaacgccaaccccaacgccaaccccaacgccaaccccaacgccaaccccaacgccaaccccaacgccaaccccaacgccaaccccaacgccaaccccaacgccaaccccaacgccaaccccaacgccaaccccaacgccaaccccaacgccaaccccaacgccaaccccaacgccaaccccaacgccaaccccaacaagaacaaccagggcaacggccagggccacaacaugcccaacgaccccaacagaaacguggacgagaacgccaacgccaacagcgccgugaagaacaacaacaacgaggagcccagcgacaagcacaucaaggaguaccugaacaagauccagaacugaggacuagucccuguucccagagcccacuuuuuuuucuuuuuuugaaauaaaauagccugucuuucagaucuaaaaaaaaaaaaaaaaaaaaaaaaaaaaaaaaaaaaaaaaaaaaaaaaaaaaaaaaaaaaaaaaugcaucccccccccccccccccccccccccccccccaaaggcucuuuucagagccaccagaauu

SEQ ID NO: 6454 - RNA, 1528 nt, Artificial Sequence
  mRNA Design a-3 (A64-N5-C30-hSL-N5) comprising derived and/or modified sequence from Pf(3D7)__XP_001351122.1__HsALB_Pf-CSP(19-384) (opt4)
aggagagggcgcuuggcuugcaaggacccugagcugcggcauugaagcacacccaacccaacucgacugaagucagccucacugaaccggaucugagaaucuucucucucugggcuugccagggcucuccgaaccuagcuagcauccucuucaauuccaacuagaaagcuuaccaugaagugggugaccuucaucagccugcuguuccuguucagcagcgccuacagccuguuccaggaguaccagugcuacggcagcagcagcaacaccagagugcugaacgagcugaacuacgacaacgccggcaccaaccuguacaacgagcuggagaugaacuacuacggcaagcaggagaacugguacagccugaagaagaacagcagaagccugggcgagaacgacgacggcaacaacgaggacaacgagaagcugagaaagcccaagcacaagaagcugaagcagcccgccgacggcaaccccgaccccaacgccaaccccaacguggaccccaacgccaaccccaacguggaccccaacgccaaccccaacguggaccccaacgccaaccccaacgccaaccccaacgccaaccccaacgccaaccccaacgccaaccccaacgccaaccccaacgccaaccccaacgccaaccccaacgccaaccccaacgccaaccccaacgccaaccccaacgccaaccccaacgccaaccccaacgccaaccccaacgccaaccccaacgccaaccccaacgccaaccccaacguggaccccaacgccaaccccaacgccaaccccaacgccaaccccaacgccaaccccaacgccaaccccaacgccaaccccaacgccaaccccaacgccaaccccaacgccaaccccaacgccaaccccaacgccaaccccaacgccaaccccaacgccaaccccaacgccaaccccaacgccaaccccaacgccaaccccaacgccaaccccaacgccaaccccaacaagaacaaccagggcaacggccagggccacaacaugcccaacgaccccaacagaaacguggacgagaacgccaacgccaacagcgccgugaagaacaacaacaacgaggagcccagcgacaagcacaucaaggaguaccugaacaagauccagaacagccugagcaccgaguggagccccugcagcgugaccugcggcaacggcauccaggugagaaucaagcccggcagcgccaacaagcccaaggacgagcuggacuacgccaacgacaucgagaagaagaucugcaagauggagaagugcagcagcguguucaacguggugaacagcagcugaggacuagucccuguucccagagcccacuuuuuuuucuuuuuuugaaauaaaauagccugucuuucagaucuaaaaaaaaaaaaaaaaaaaaaaaaaaaaaaaaaaaaaaaaaaaaaaaaaaaaaaaaaaaaaaaaugcaucccccccccccccccccccccccccccccccaaaggcucuuuucagagccaccagaauu

SEQ ID NO: 6455 - RNA, 1666 nt, Artificial Sequence
  mRNA Design a-3 (A64-N5-C30-hSL-N5) comprising derived and/or modified sequence from Pf(3D7)__XP_001351122.1__HsALB_Pf-CSP(19-384)_TM domain HA (opt4)
aggagagggcgcuuggcuugcaaggacccugagcugcggcauugaagcacacccaacccaacucgacugaagucagccucacugaaccggaucugagaaucuucucucucugggcuugccagggcucuccgaaccuagcuagcauccucuucaauuccaacuagaaagcuuaccaugaagugggugaccuucaucagccugcuguuccuguucagcagcgccuacagccuguuccaggaguaccagugcuacggcagcagcagcaacaccagagugcugaacgagcugaacuacgacaacgccggcaccaaccuguacaacgagcuggagaugaacuacuacggcaagcaggagaacugguacagccugaagaagaacagcagaagccugggcgagaacgacgacggcaacaacgaggacaacgagaagcugagaaagcccaagcacaagaagcugaagcagcccgccgacggcaaccccgaccccaacgccaaccccaacguggaccccaacgccaaccccaacguggaccccaacgccaaccccaacguggaccccaacgccaaccccaacgccaaccccaacgccaaccccaacgccaaccccaacgccaaccccaacgccaaccccaacgccaaccccaacgccaaccccaacgccaaccccaacgccaaccccaacgccaaccccaacgccaaccccaacgccaaccccaacgccaaccccaacgccaaccccaacgccaaccccaacgccaaccccaacguggaccccaacgccaaccccaacgccaaccccaacgccaaccccaacgccaaccccaacgccaaccccaacgccaaccccaacgccaaccccaacgccaaccccaacgccaaccccaacgccaaccccaacgccaaccccaacgccaaccccaacgccaaccccaacgccaaccccaacgccaaccccaacgccaaccccaacgccaaccccaacgccaaccccaacaagaacaaccagggcaacggccagggccacaacaugcccaacgaccccaacagaaacguggacgagaacgccaacgccaacagcgccgugaagaacaacaacaacgaggagcccagcgacaagcacaucaaggaguaccugaacaagauccagaacagccugagcaccgaguggagccccugcagcgugaccugcggcaacggcauccaggugagaaucaagcccggcagcgccaacaagcccaaggacgagcuggacuacgccaacgacaucgagaagaagaucugcaagauggagaagugcagcagcguguucaacguggugaacagcagcaagcuggagagcaccagaaucuaccagauccuggccaucuacagcaccguggccagcagccuggugcugguggugagccugggcgccaucagcuucuggaugugcagcaacggcagccugcagugcagaaucugcaucugaggacuagucccuguucccagagcccacuuuuuuuucuuuuuuugaaauaaaauagccugucuuucagaucuaaaaaaaaaaaaaaaaaaaaaaaaaaaaaaaaaaaaaaaaaaaaaaaaaaaaaaaaaaaaaaaaugcaucccccccccccccccccccccccccccccccaaaggcucuuuucagagccaccagaauu

SEQ ID NO: 6456 - RNA, 1378 nt, Artificial Sequence
  mRNA Design a-3 (A64-N5-C30-hSL-N5) comprising derived and/or modified sequence from Pf(3D7)__XP_001351122.1__HsALB_Pf-CSP(82-397) (opt4)
aggagagggcgcuuggcuugcaaggacccugagcugcggcauugaagcacacccaacccaacucgacugaagucagccucacugaaccggaucugagaaucuucucucucugggcuugccagggcucuccgaaccuagcuagcauccucuucaauuccaacuagaaagcuuaccaugaagugggugaccuucaucagccugcuguuccuguucagcagcgccuacagcgacaacgagaagcugagaaagcccaagcacaagaagcugaagcagcccgccgacggcaaccccgaccccaacgccaaccccaacguggaccccaacgccaaccccaacguggaccccaacgccaaccccaacguggaccccaacgccaaccccaacgccaaccccaacgccaaccccaacgccaaccccaacgccaaccccaacgccaaccccaacgccaaccccaacgccaaccccaacgccaaccccaacgccaaccccaacgccaaccccaacgccaaccccaacgccaaccccaacgccaaccccaacgccaaccccaacgccaaccccaacgccaaccccaacguggaccccaacgccaaccccaacgccaaccccaacgccaaccccaacgccaaccccaacgccaaccccaacgccaaccccaacgccaaccccaacgccaaccccaacgccaaccccaacgccaaccccaacgccaaccccaacgccaaccccaacgccaaccccaacgccaaccccaacgccaaccccaacgccaaccccaacgccaaccccaacgccaaccccaacaagaacaaccagggcaacggccagggccacaacaugcccaacgaccccaacagaaacguggacgagaacgccaacgccaacagcgccgugaagaacaacaacaacgaggagcccagcgacaagcacaucaaggaguaccugaacaagauccagaacagccugagcaccgaguggagccccugcagcgugaccugcggcaacggcauccaggugagaaucaagcccggcagcgccaacaagcccaaggacgagcuggacuacgccaacgacaucgagaagaagaucugcaagauggagaagugcagcagcguguucaacguggugaacagcagcaucggccugaucauggugcugagcuuccuguuccugaacugaggacuagucccuguucccagagcccacuuuuuuuucuuuuuuugaaauaaaauagccugucuuucagaucuaaaaaaaaaaaaaaaaaaaaaaaaaaaaaaaaaaaaaaaaaaaaaaaaaaaaaaaaaaaaaaaaugcaucccccccccccccccccccccccccccccccaaaggcucuuuucagagccaccagaauu

SEQ ID NO: 6457 - RNA, 730 nt, Artificial Sequence
  mRNA Design a-3 (A64-N5-C30-hSL-N5) comprising derived and/or modified sequence from Pf(3D7)__XP_001351122.1__HsALB_Pf-CSP(93-192) (opt4)
aggagagggcgcuuggcuugcaaggacccugagcugcggcauugaagcacacccaacccaacucgacugaagucagccucacugaaccggaucugagaaucuucucucucugggcuugccagggcucuccgaaccuagcuagcauccucuucaauuccaacuagaaagcuuaccaugaagugggugaccuucaucagccugcuguuccuguucagcagcgccuacagcaagcugaagcagcccgccgacggcaaccccgaccccaacgccaaccccaacguggaccccaacgccaaccccaacguggaccccaacgccaaccccaacguggaccccaacgccaaccccaacgccaaccccaacgccaaccccaacgccaaccccaacgccaaccccaacgccaaccccaacgccaaccccaacgccaaccccaacgccaaccccaacgccaaccccaacgccaaccccaacgccaaccccaacgccaaccccaacgccaaccccaacgccaaccccaacgccaaccccugaggacuagucccuguucccagagcccacuuuuuuuucuuuuuuugaaauaaaauagccugucuuucagaucuaaaaaaaaaaaaaaaaaaaaaaaaaaaaaaaaaaaaaaaaaaaaaaaaaaaaaaaaaaaaaaaaugcaucccccccccccccccccccccccccccccccaaaggcucuuuucagagccaccagaauu

SEQ ID NO: 6458 - RNA, 970 nt, Artificial Sequence
  mRNA Design a-3 (A64-N5-C30-hSL-N5) comprising derived and/or modified sequence from Pf(3D7)__XP_001351122.1__HsALB_Pf-CSP(93-272) (opt4)
aggagagggcgcuuggcuugcaaggacccugagcugcggcauugaagcacacccaacccaacucgacugaagucagccucacugaaccggaucugagaaucuucucucucugggcuugccagggcucuccgaaccuagcuagcauccucuucaauuccaacuagaaagcuuaccaugaagugggugaccuucaucagccugcuguuccuguucagcagcgccuacagcaagcugaagcagcccgccgacggcaaccccgaccccaacgccaaccccaacguggaccccaacgccaaccccaacguggaccccaacgccaaccccaacguggaccccaacgccaaccccaacgccaaccccaacgccaaccccaacgccaaccccaacgccaaccccaacgccaaccccaacgccaaccccaacgccaaccccaacgccaaccccaacgccaaccccaacgccaaccccaacgccaaccccaacgccaaccccaacgccaaccccaacgccaaccccaacgccaaccccaacgccaaccccaacguggaccccaacgccaaccccaacgccaaccccaacgccaaccccaacgccaaccccaacgccaaccccaacgccaaccccaacgccaaccccaacgccaaccccaacgccaaccccaacgccaaccccaacgccaaccccaacgccaaccccaacgccaaccccaacgccaaccccaacgccaaccccaacgccaaccccaacgccaaccccaacgccaaccccugaggacuagucccuguucccagagcccacuuuuuuuucuuuuuuugaaauaaaauagccugucuuucagaucuaaaaaaaaaaaaaaaaaaaaaaaaaaaaaaaaaaaaaaaaaaaaaaaaaaaaaaaaaaaaaaaaugcaucccccccccccccccccccccccccccccccaaaggcucuuuucagagccaccagaauu

SEQ ID NO: 6459 - RNA, 1345 nt, Artificial Sequence
  mRNA Design a-3 (A64-N5-C30-hSL-N5) comprising derived and/or modified sequence from Pf(3D7)__XP_001351122.1__HsALB_Pf-CSP(93-397) (opt4)
aggagagggcgcuuggcuugcaaggacccugagcugcggcauugaagcacacccaacccaacucgacugaagucagccucacugaaccggaucugagaaucuucucucucugggcuugccagggcucuccgaaccuagcuagcauccucuucaauuccaacuagaaagcuuaccaugaagugggugaccuucaucagccugcuguuccuguucagcagcgccuacagcaagcugaagcagcccgccgacggcaaccccgaccccaacgccaaccccaacguggaccccaacgccaaccccaacguggaccccaacgccaaccccaacguggaccccaacgccaaccccaacgccaaccccaacgccaaccccaacgccaaccccaacgccaaccccaacgccaaccccaacgccaaccccaacgccaaccccaacgccaaccccaacgccaaccccaacgccaaccccaacgccaaccccaacgccaaccccaacgccaaccccaacgccaaccccaacgccaaccccaacgccaaccccaacguggaccccaacgccaaccccaacgccaaccccaacgccaaccccaacgccaaccccaacgccaaccccaacgccaaccccaacgccaaccccaacgccaaccccaacgccaaccccaacgccaaccccaacgccaaccccaacgccaaccccaacgccaaccccaacgccaaccccaacgccaaccccaacgccaaccccaacgccaaccccaacgccaaccccaacaagaacaaccagggcaacggccagggccacaacaugcccaacgaccccaacagaaacguggacgagaacgccaacgccaacagcgccgugaagaacaacaacaacgaggagcccagcgacaagcacaucaaggaguaccugaacaagauccagaacagccugagcaccgaguggagccccugcagcgugaccugcggcaacggcauccaggugagaaucaagcccggcagcgccaacaagcccaaggacgagcuggacuacgccaacgacaucgagaagaagaucugcaagauggagaagugcagcagcguguucaacguggugaacagcagcaucggccugaucauggugcugagcuuccuguuccugaacugaggacuagucccuguucccagagcccacuuuuuuuucuuuuuuugaaauaaaauagccugucuuucagaucuaaaaaaaaaaaaaaaaaaaaaaaaaaaaaaaaaaaaaaaaaaaaaaaaaaaaaaaaaaaaaaaaugcaucccccccccccccccccccccccccccccccaaaggcucuuuucagagccaccagaauu

SEQ ID NO: 6460 - RNA, 715 nt, Artificial Sequence
  mRNA Design a-3 (A64-N5-C30-hSL-N5) comprising derived and/or modified sequence from Pf(3D7)__XP_001351122.1__HsALB_Pf-CSP(98-192) (opt4)
aggagagggcgcuuggcuugcaaggacccugagcugcggcauugaagcacacccaacccaacucgacugaagucagccucacugaaccggaucugagaaucuucucucucugggcuugccagggcucuccgaaccuagcuagcauccucuucaauuccaacuagaaagcuuaccaugaagugggugaccuucaucagccugcuguuccuguucagcagcgccuacagcgccgacggcaaccccgaccccaacgccaaccccaacguggaccccaacgccaaccccaacguggaccccaacgccaaccccaacguggaccccaacgccaaccccaacgccaaccccaacgccaaccccaacgccaaccccaacgccaaccccaacgccaaccccaacgccaaccccaacgccaaccccaacgccaaccccaacgccaaccccaacgccaaccccaacgccaaccccaacgccaaccccaacgccaaccccaacgccaaccccaacgccaaccccugaggacuagucccuguucccagagcccacuuuuuuuucuuuuuuugaaauaaaauagccugucuuucagaucuaaaaaaaaaaaaaaaaaaaaaaaaaaaaaaaaaaaaaaaaaaaaaaaaaaaaaaaaaaaaaaaaugcaucccccccccccccccccccccccccccccccaaaggcucuuuucagagccaccagaauu

SEQ ID NO: 6461 - RNA, 955 nt, Artificial Sequence
  mRNA Design a-3 (A64-N5-C30-hSL-N5) comprising derived and/or modified sequence from Pf(3D7)__XP_001351122.1__HsALB_Pf-CSP(98-272) (opt4)
aggagagggcgcuuggcuugcaaggacccugagcugcggcauugaagcacacccaacccaacucgacugaagucagccucacugaaccggaucugagaaucuucucucucugggcuugccagggcucuccgaaccuagcuagcauccucuucaauuccaacuagaaagcuuaccaugaagugggugaccuucaucagccugcuguuccuguucagcagcgccuacagcgccgacggcaaccccgaccccaacgccaaccccaacguggaccccaacgccaaccccaacguggaccccaacgccaaccccaacguggaccccaacgccaaccccaacgccaaccccaacgccaaccccaacgccaaccccaacgccaaccccaacgccaaccccaacgccaaccccaacgccaaccccaacgccaaccccaacgccaaccccaacgccaaccccaacgccaaccccaacgccaaccccaacgccaaccccaacgccaaccccaacgccaaccccaacgccaaccccaacguggaccccaacgccaaccccaacgccaaccccaacgccaaccccaacgccaaccccaacgccaaccccaacgccaaccccaacgccaaccccaacgccaaccccaacgccaaccccaacgccaaccccaacgccaaccccaacgccaaccccaacgccaaccccaacgccaaccccaacgccaaccccaacgccaaccccaacgccaaccccaacgccaaccccugaggacuagucccuguucccagagcccacuuuuuuuucuuuuuuugaaauaaaauagccugucuuucagaucuaaaaaaaaaaaaaaaaaaaaaaaaaaaaaaaaaaaaaaaaaaaaaaaaaaaaaaaaaaaaaaaaugcaucccccccccccccccccccccccccccccccaaaggcucuuuucagagccaccagaauu

SEQ ID NO: 6462 - RNA, 1261 nt, Artificial Sequence
  mRNA Design a-3 (A64-N5-C30-hSL-N5) comprising derived and/or modified sequence from Pf(3D7)__XP_001351122.1__HsALB_Pf-CSP(98-374) (opt4)
aggagagggcgcuuggcuugcaaggacccugagcugcggcauugaagcacacccaacccaacucgacugaagucagccucacugaaccggaucugagaaucuucucucucugggcuugccagggcucuccgaaccuagcuagcauccucuucaauuccaacuagaaagcuuaccaugaagugggugaccuucaucagccugcuguuccuguucagcagcgccuacagcgccgacggcaaccccgaccccaacgccaaccccaacguggaccccaacgccaaccccaacguggaccccaacgccaaccccaacguggaccccaacgccaaccccaacgccaaccccaacgccaaccccaacgccaaccccaacgccaaccccaacgccaaccccaacgccaaccccaacgccaaccccaacgccaaccccaacgccaaccccaacgccaaccccaacgccaaccccaacgccaaccccaacgccaaccccaacgccaaccccaacgccaaccccaacgccaaccccaacguggaccccaacgccaaccccaacgccaaccccaacgccaaccccaacgccaaccccaacgccaaccccaacgccaaccccaacgccaaccccaacgccaaccccaacgccaaccccaacgccaaccccaacgccaaccccaacgccaaccccaacgccaaccccaacgccaaccccaacgccaaccccaacgccaaccccaacgccaaccccaacgccaaccccaacaagaacaaccagggcaacggccagggccacaacaugcccaacgaccccaacagaaacguggacgagaacgccaacgccaacagcgccgugaagaacaacaacaacgaggagcccagcgacaagcacaucaaggaguaccugaacaagauccagaacagccugagcaccgaguggagccccugcagcgugaccugcggcaacggcauccaggugagaaucaagcccggcagcgccaacaagcccaaggacgagcuggacuacgccaacgacaucgagaagaagaucugcaagauggagaagugcugaggacuagucccuguucccagagcccacuuuuuuuucuuuuuuugaaauaaaauagccugucuuucagaucuaaaaaaaaaaaaaaaaaaaaaaaaaaaaaaaaaaaaaaaaaaaaaaaaaaaaaaaaaaaaaaaaugcaucccccccccccccccccccccccccccccccaaaggcucuuuucagagccaccagaauu

SEQ ID NO: 6463 - RNA, 1330 nt, Artificial Sequence
  mRNA Design a-3 (A64-N5-C30-hSL-N5) comprising derived and/or modified sequence from Pf(3D7)__XP_001351122.1__HsALB_Pf-CSP(98-397) (opt4)
aggagagggcgcuuggcuugcaaggacccugagcugcggcauugaagcacacccaacccaacucgacugaagucagccucacugaaccggaucugagaaucuucucucucugggcuugccagggcucuccgaaccuagcuagcauccucuucaauuccaacuagaaagcuuaccaugaagugggugaccuucaucagccugcuguuccuguucagcagcgccuacagcgccgacggcaaccccgaccccaacgccaaccccaacguggaccccaacgccaaccccaacguggaccccaacgccaaccccaacguggaccccaacgccaaccccaacgccaaccccaacgccaaccccaacgccaaccccaacgccaaccccaacgccaaccccaacgccaaccccaacgccaaccccaacgccaaccccaacgccaaccccaacgccaaccccaacgccaaccccaacgccaaccccaacgccaaccccaacgccaaccccaacgccaaccccaacgccaaccccaacguggaccccaacgccaaccccaacgccaaccccaacgccaaccccaacgccaaccccaacgccaaccccaacgccaaccccaacgccaaccccaacgccaaccccaacgccaaccccaacgccaaccccaacgccaaccccaacgccaaccccaacgccaaccccaacgccaaccccaacgccaaccccaacgccaaccccaacgccaaccccaacgccaaccccaacaagaacaaccagggcaacggccagggccacaacaugcccaacgaccccaacagaaacguggacgagaacgccaacgccaacagcgccgugaagaacaacaacaacgaggagcccagcgacaagcacaucaaggaguaccugaacaagauccagaacagccugagcaccgaguggagccccugcagcgugaccugcggcaacggcauccaggugagaaucaagcccggcagcgccaacaagcccaaggacgagcuggacuacgccaacgacaucgagaagaagaucugcaagauggagaagugcagcagcguguucaacguggugaacagcagcaucggccugaucauggugcugagcuuccuguuccugaacugaggacuagucccuguucccagagcccacuuuuuuuucuuuuuuugaaauaaaauagccugucuuucagaucuaaaaaaaaaaaaaaaaaaaaaaaaaaaaaaaaaaaaaaaaaaaaaaaaaaaaaaaaaaaaaaaaugcaucccccccccccccccccccccccccccccccaaaggcucuuuucagagccaccagaauu

SEQ ID NO: 6464 - RNA, 1657 nt, Artificial Sequence
  mRNA Design a-3 (A64-N5-C30-hSL-N5) comprising derived and/or modified sequence from Pf(3D7)__XP_001351122.1__HsALB_Pf-CSP(199-377)_L(PVTN)_HBsAg (opt4)
aggagagggcgcuuggcuugcaaggacccugagcugcggcauugaagcacacccaacccaacucgacugaagucagccucacugaaccggaucugagaaucuucucucucugggcuugccagggcucuccgaaccuagcuagcauccucuucaauuccaacuagaaagcuuaccaugaagugggugaccuucaucagccugcuguuccuguucagcagcgccuacagcgaccccaacgccaaccccaacgccaaccccaacgccaaccccaacgccaaccccaacgccaaccccaacgccaaccccaacgccaaccccaacgccaaccccaacgccaaccccaacgccaaccccaacgccaaccccaacgccaaccccaacgccaaccccaacgccaaccccaacgccaaccccaacgccaaccccaacgccaaccccaacgccaaccccaacaagaacaaccagggcaacggccagggccacaacaugcccaacgaccccaacagaaacguggacgagaacgccaacgccaacagcgccgugaagaacaacaacaacgaggagcccagcgacaagcacaucaaggaguaccugaacaagauccagaacagccugagcaccgaguggagccccugcagcgugaccugcggcaacggcauccaggugagaaucaagcccggcagcgccaacaagcccaaggacgagcuggacuacgccaacgacaucgagaagaagaucugcaagauggagaagugcagcagcgugcccgugaccaacauggagaacaucaccagcggcuuccugggcccccugcuggugcugcaggccggcuucuuccugcugaccagaauccugaccaucccccagagccuggacagcugguggaccagccugaacuuccugggcggcagccccgugugccugggccagaacagccagagccccaccagcaaccacagccccaccagcugcccccccaucugccccggcuacagauggaugugccugagaagauucaucaucuuccuguucauccugcugcugugccugaucuuccugcuggugcugcuggacuaccagggcaugcugcccgugugcccccugauccccggcagcaccaccaccaacaccggccccugcaagaccugcaccacccccgcccagggcaacagcauguuccccagcugcugcugcaccaagcccaccgacggcaacugcaccugcauccccauccccagcagcugggccuucgccaaguaccugugggagugggccagcgugagauucagcuggcugagccugcuggugcccuucgugcagugguucgugggccugagccccaccguguggcugagcgccaucuggaugaugugguacuggggccccagccuguacagcaucgugagccccuucaucccccugcugcccaucuucuucugccuguggguguacaucugaggacuagucccuguucccagagcccacuuuuuuuucuuuuuuugaaauaaaauagccugucuuucagaucuaaaaaaaaaaaaaaaaaaaaaaaaaaaaaaaaaaaaaaaaaaaaaaaaaaaaaaaaaaaaaaaaugcaucccccccccccccccccccccccccccccccaaaggcucuuuucagagccaccagaauu

SEQ ID NO: 6465 - RNA, 1567 nt, Artificial Sequence
  mRNA Design a-3 (A64-N5-C30-hSL-N5) comprising derived and/or modified sequence from Pf(3D7)__XP_001351122.1__Pf-CSP (opt5)
aggagagggcgcuuggcuugcaaggacccugagcugcggcauugaagcacacccaacccaacucgacugaagucagccucacugaaccggaucugagaaucuucucucucugggcuugccagggcucuccgaaccuagcuagcauccucuucaauuccaacuagaaagcuuaccaugaugagaaagcuggccauccucagcguguccucuuuccuguuugucgaggcucuuuuccaggaauaccaaugcuauggcagcuccucuaacacccggguucugaaugagcucaacuacgacaaugccgggacaaaccuguauaaugaacuugagaugaacuacuauggaaaacaggaaaauugguacagccugaagaaaaacucccgcucucucggcgagaaugaugacgggaacaaugaggauaacgaaaagcugagaaaacccaagcacaagaaacugaagcagccugcggacggaaauccggaucccaacgcuaauccuaacguggaccccaacgccaauccuaacguggaucccaaugccaacccuaaugucgacccgaacgcuaaucccaacgccaauccuaacgcuaaucccaacgccaauccuaacgcgaaucccaacgccaacccgaaugcuaacccuaaugccaaccccaaugcuaacccuaaugccaaccccaaugcgaaccccaaugccaacccuaaugcuaacccgaaugccaaccccaacgcuaauccuaacgccaaucccaacgccaauccuaacguggaucccaaugcuaacccgaaugcgaacccuaaugccaaccccaaugcuaacccuaaugccaaccccaacgccaauccuaacgcuaaucccaacgccaauccgaacgcgaauccuaacgcuaaucccaacgccaaucccaacgccaauccuaacgcuaauccgaacgccaaucccaacgcuaacccuaaugccaaccccaaugcgaacccuaaugccaaccccaauaaaaacaaucagggcaacgggcaaggacauaauaugccuaacgaccccaaucggaacguugaugagaaugcuaacgccaacagcgcugugaagaauaacaauaacgaggaaccguccgacaaacacauuaaggaguaucucaauaagauccagaacagccugucuacggaaugguccccuuguagcgugaccugcggcaauggcauucagguccgcaucaaacccgggucugccaacaagccuaaagaugagcuugacuacgcgaaugacauugaaaagaaaaucuguaagauggagaaaugcuccagcguuuuuaacguggucaauucuuccaucggacugauuauggugcucagcuuccuguuucuuaacugaggacuagucccuguucccagagcccacuuuuuuuucuuuuuuugaaauaaaauagccugucuuucagaucuaaaaaaaaaaaaaaaaaaaaaaaaaaaaaaaaaaaaaaaaaaaaaaaaaaaaaaaaaaaaaaaaugcaucccccccccccccccccccccccccccccccaaaggcucuuuucagagccaccagaauu

SEQ ID NO: 6466 - RNA, 1498 nt, Artificial Sequence
  mRNA Design a-3 (A64-N5-C30-hSL-N5) comprising derived and/or modified sequence from Pf(3D7)__XP_001351122.1__Pf-CSP(1-374) (opt5)
aggagagggcgcuuggcuugcaaggacccugagcugcggcauugaagcacacccaacccaacucgacugaagucagccucacugaaccggaucugagaaucuucucucucugggcuugccagggcucuccgaaccuagcuagcauccucuucaauuccaacuagaaagcuuaccaugaugagaaagcuggccauccucagcguguccucuuuccuguuugucgaggcucuuuuccaggaauaccaaugcuauggcagcuccucuaacacccggguucugaaugagcucaacuacgacaaugccgggacaaaccuguauaaugaacuugagaugaacuacuauggaaaacaggaaaauugguacagccugaagaaaaacucccgcucucucggcgagaaugaugacgggaacaaugaggauaacgaaaagcugagaaaacccaagcacaagaaacugaagcagccugcggacggaaauccggaucccaacgcuaauccuaacguggaccccaacgccaauccuaacguggaucccaaugccaacccuaaugucgacccgaacgcuaaucccaacgccaauccuaacgcuaaucccaacgccaauccuaacgcgaaucccaacgccaacccgaaugcuaacccuaaugccaaccccaaugcuaacccuaaugccaaccccaaugcgaaccccaaugccaacccuaaugcuaacccgaaugccaaccccaacgcuaauccuaacgccaaucccaacgccaauccuaacguggaucccaaugcuaacccgaaugcgaacccuaaugccaaccccaaugcuaacccuaaugccaaccccaacgccaauccuaacgcuaaucccaacgccaauccgaacgcgaauccuaacgcuaaucccaacgccaaucccaacgccaauccuaacgcuaauccgaacgccaaucccaacgcuaacccuaaugccaaccccaaugcgaacccuaaugccaaccccaauaaaaacaaucagggcaacgggcaaggacauaauaugccuaacgaccccaaucggaacguugaugagaaugcuaacgccaacagcgcugugaagaauaacaauaacgaggaaccguccgacaaacacauuaaggaguaucucaauaagauccagaacagccugucuacggaaugguccccuuguagcgugaccugcggcaauggcauucagguccgcaucaaacccgggucugccaacaagccuaaagaugagcuugacuacgcgaaugacauugaaaagaaaaucuguaagauggagaaaugcugaggacuagucccuguucccagagcccacuuuuuuuucuuuuuuugaaauaaaauagccugucuuucagaucuaaaaaaaaaaaaaaaaaaaaaaaaaaaaaaaaaaaaaaaaaaaaaaaaaaaaaaaaaaaaaaaaugcaucccccccccccccccccccccccccccccccaaaggcucuuuucagagccaccagaauu

SEQ ID NO: 6467 - RNA, 1351 nt, Artificial Sequence
  mRNA Design a-3 (A64-N5-C30-hSL-N5) comprising derived and/or modified sequence from Pf(3D7)__XP_001351122.1__Pf-CSP(1-325) (opt5)
aggagagggcgcuuggcuugcaaggacccugagcugcggcauugaagcacacccaacccaacucgacugaagucagccucacugaaccggaucugagaaucuucucucucugggcuugccagggcucuccgaaccuagcuagcauccucuucaauuccaacuagaaagcuuaccaugaugagaaagcuggccauccucagcguguccucuuuccuguuugucgaggcucuuuuccaggaauaccaaugcuauggcagcuccucuaacacccggguucugaaugagcucaacuacgacaaugccgggacaaaccuguauaaugaacuugagaugaacuacuauggaaaacaggaaaauugguacagccugaagaaaaacucccgcucucucggcgagaaugaugacgggaacaaugaggauaacgaaaagcugagaaaacccaagcacaagaaacugaagcagccugcggacggaaauccggaucccaacgcuaauccuaacguggaccccaacgccaauccuaacguggaucccaaugccaacccuaaugucgacccgaacgcuaaucccaacgccaauccuaacgcuaaucccaacgccaauccuaacgcgaaucccaacgccaacccgaaugcuaacccuaaugccaaccccaaugcuaacccuaaugccaaccccaaugcgaaccccaaugccaacccuaaugcuaacccgaaugccaaccccaacgcuaauccuaacgccaaucccaacgccaauccuaacguggaucccaaugcuaacccgaaugcgaacccuaaugccaaccccaaugcuaacccuaaugccaaccccaacgccaauccuaacgcuaaucccaacgccaauccgaacgcgaauccuaacgcuaaucccaacgccaaucccaacgccaauccuaacgcuaauccgaacgccaaucccaacgcuaacccuaaugccaaccccaaugcgaacccuaaugccaaccccaauaaaaacaaucagggcaacgggcaaggacauaauaugccuaacgaccccaaucggaacguugaugagaaugcuaacgccaacagcgcugugaagaauaacaauaacgaggaaccguccgacaaacacauuaaggaguaucucaauaagauccagaacugaggacuagucccuguucccagagcccacuuuuuuuucuuuuuuugaaauaaaauagccugucuuucagaucuaaaaaaaaaaaaaaaaaaaaaaaaaaaaaaaaaaaaaaaaaaaaaaaaaaaaaaaaaaaaaaaaugcaucccccccccccccccccccccccccccccccaaaggcucuuuucagagccaccagaauu

SEQ ID NO: 6468 - RNA, 1567 nt, Artificial Sequence
  mRNA Design a-3 (A64-N5-C30-hSL-N5) comprising derived and/or modified sequence from Pf(3D7)__XP_001351122.1__HsALB_Pf-CSP(19-397) (opt5)
aggagagggcgcuuggcuugcaaggacccugagcugcggcauugaagcacacccaacccaacucgacugaagucagccucacugaaccggaucugagaaucuucucucucugggcuugccagggcucuccgaaccuagcuagcauccucuucaauuccaacuagaaagcuuaccaugaagugggugaccuucaucagccugcucuuucuguucuccucugccuacagccuuuuucaggaguaucaaugcuacggcuccucuagcaacacaagaguccugaaugaacucaacuaugacaaugcugggacgaaccuguacaaugagcuugaaaugaacuauuacggaaaacaggagaauugguauucccugaagaaaaacucucggagccucggcgaaaaugaugacgggaacaaugaggauaacgagaagcugcgcaaacccaagcacaagaaacugaagcagccugccgacggaaauccggaucccaacgcgaauccuaacguugaccccaacgcuaauccuaacguggaucccaaugccaacccuaauguggacccgaacgccaaucccaacgcuaauccuaacgccaaucccaacgcuaauccuaacgccaaucccaacgcgaacccgaaugccaacccuaaugcuaaccccaaugccaacccuaaugcuaaccccaaugccaaccccaaugcgaacccuaaugccaacccgaaugcuaaccccaacgccaauccuaacgcuaaucccaacgccaauccuaacgucgaucccaaugccaacccgaaugcuaacccuaaugcgaaccccaaugccaacccuaaugcuaaccccaacgccaauccuaacgccaaucccaacgcuaauccgaacgccaauccuaacgcgaaucccaacgcuaaucccaacgccaauccuaacgccaauccgaacgcuaaucccaacgccaacccuaaugcuaaccccaaugccaacccuaaugcgaaccccaauaaaaacaaucagggcaacgggcaaggacauaauaugccuaacgaccccaauagaaacguggaugaaaaugccaacgcuaacuccgccguuaagaauaacaauaacgaggaaccgagcgacaaacacauuaaggaguaccucaauaagauccagaacucucuguccaccgaguggagcccuuguucugugacaugcggcaauggcauucagguccggaucaaacccggguccgcuaacaagccuaaagaugaacuugacuacgccaaugacauugagaagaaaaucuguaagauggaaaaaugcagcucuguguucaacguugucaauuccagcaucggacugauuauggugcucuccuuucuguuccuuaacugaggacuagucccuguucccagagcccacuuuuuuuucuuuuuuugaaauaaaauagccugucuuucagaucuaaaaaaaaaaaaaaaaaaaaaaaaaaaaaaaaaaaaaaaaaaaaaaaaaaaaaaaaaaaaaaaaugcaucccccccccccccccccccccccccccccccaaaggcucuuuucagagccaccagaauu

SEQ ID NO: 6469 - RNA, 1585 nt, Artificial Sequence
  mRNA Design a-3 (A64-N5-C30-hSL-N5) comprising derived and/or modified sequence from Pf(3D7)__XP_001351122.1__HsIns-iso1_Pf-CSP(19-397) (opt5)
aggagagggcgcuuggcuugcaaggacccugagcugcggcauugaagcacacccaacccaacucgacugaagucagccucacugaaccggaucugagaaucuucucucucugggcuugccagggcucuccgaaccuagcuagcauccucuucaauuccaacuagaaagcuuaccauggcccuguggaugagacuccugccccuucuggcucuccuggcccuuuggggcccugacccggcggcugcccuguuccaggaguaccaaugcuaugggagcuccucuaacacccgggugcucaaugaacugaacuacgauaaugccggaacaaaccuguauaaugagcucgaaaugaacuacuauggcaagcaggagaauugguacagccugaaaaagaacucccgcucucuuggggaaaaugacgauggaaacaaugaggacaacgagaaacugagaaagcccaaacacaagaagcucaaacagccugcugauggcaaucccgacccuaacgccaaucccaacgucgauccuaacgcuaauccgaacguugaccccaaugccaacccuaauguggaucccaacgcgaauccuaacgccaaucccaacgcuaauccgaacgccaauccuaacgcuaaucccaacgccaacccuaaugcgaaccccaaugccaaccccaaugcuaacccuaaugccaacccgaaugcuaaccccaaugccaacccuaaugccaaccccaaugcuaacccuaacgcgaaucccaacgccaauccgaacgcuaauccuaacguggaccccaaugccaacccuaaugccaaccccaaugcuaacccuaaugccaaccccaaugcgaacccgaacgcuaauccuaacgccaaucccaacgccaaucccaacgcuaauccuaacgccaauccgaacgcuaaucccaacgccaauccuaacgcgaaucccaacgccaauccuaacgcuaaccccaaugccaacccuaaugcuaaccccaaugccaacccgaauaagaacaaucaggggaacggacaaggccauaauaugccuaacgaucccaaucggaacgucgacgaaaaugcgaacgccaacagcgcugugaaaaauaacaauaacgaggaaccuuccgauaagcacaucaaagaguaucugaauaagauucagaacucucuuagcacggaguggucccccuguagcguuaccugcggcaaugggauccaggugcgcauuaagccgggaucugccaacaaaccuaaggacgaacuggacuacgcuaaugauaucgagaaaaagauuuguaaaauggaaaagugcuccagcgucuuuaacgugguuaauucuuccaucggccucaucauggugcugagcuuccuguuucucaacugaggacuagucccuguucccagagcccacuuuuuuuucuuuuuuugaaauaaaauagccugucuuucagaucuaaaaaaaaaaaaaaaaaaaaaaaaaaaaaaaaaaaaaaaaaaaaaaaaaaaaaaaaaaaaaaaaugcaucccccccccccccccccccccccccccccccaaaggcucuuuucagagccaccagaauu

SEQ ID NO: 6470 - RNA, 1564 nt, Artificial Sequence
  mRNA Design a-3 (A64-N5-C30-hSL-N5) comprising derived and/or modified sequence from Pf(3D7)__XP_001351122.1__HsSPARC_Pf-CSP(19-397) (opt5)
aggagagggcgcuuggcuugcaaggacccugagcugcggcauugaagcacacccaacccaacucgacugaagucagccucacugaaccggaucugagaaucuucucucucugggcuugccagggcucuccgaaccuagcuagcauccucuucaauuccaacuagaaagcuuaccaugagagccuggaucuucuuucugcucugccuggcuggccgggcccuugcgcuguuccaggaguaccaauguuaugggagcuccucuaacacccgcgugcucaaugaacugaacuacgacaaugcuggaacaaaccuuuauaaugagcuggaaaugaacuacuauggcaagcaggagaauugguacagccucaaaaagaacuccagaucucugggggaaaaugaugacggaaacaaugaggauaacgagaaacugcggaagcccaaacacaagaagcucaaacagccugccgacggcaauccggaucccaacgccaauccuaacgucgaccccaacgcuaauccuaacguugaucccaaugccaacccuaauguggacccgaacgcuaaucccaacgccaauccuaacgcgaaucccaacgccaauccuaacgcuaaucccaacgccaacccgaaugcuaacccuaaugccaaccccaaugcgaacccuaaugccaaccccaaugcuaaccccaaugccaacccuaaugcuaacccgaaugccaaccccaacgccaauccuaacgcuaaucccaacgcgaauccuaacguggaucccaaugccaacccgaaugcuaacccuaaugccaaccccaaugccaacccuaaugcuaaccccaacgccaauccuaacgcgaaucccaacgcuaauccgaacgccaauccuaacgccaaucccaacgcuaaucccaacgccaauccuaacgcuaauccgaacgccaaucccaacgcgaacccuaaugccaaccccaaugcuaacccuaaugccaaccccaauaagaacaaucaggggaacggacaaggccauaauaugccuaacgaccccaaucgcaacgucgaugaaaaugcuaacgccaacagcgcggugaaaaauaacaauaacgaggaaccguccgacaagcacauuaaagaguaucugaauaagauccagaacucucuuagcacggagugguccccuugcagcguuaccuguggcaaugggauucaggugagaaucaagcccggaucugccaacaaaccuaaggaugaacuggacuacgcuaaugacauugagaaaaagaucugcaaaauggaaaaguguuccagcgucuuuaacgugguuaauucuuccaucggccucauuauggugcugagcuuccuuuuucugaacugaggacuagucccuguucccagagcccacuuuuuuuucuuuuuuugaaauaaaauagccugucuuucagaucuaaaaaaaaaaaaaaaaaaaaaaaaaaaaaaaaaaaaaaaaaaaaaaaaaaaaaaaaaaaaaaaaugcaucccccccccccccccccccccccccccccccaaaggcucuuuucagagccaccagaauu

SEQ ID NO: 6471 - RNA, 1567 nt, Artificial Sequence
  mRNA Design a-3 (A64-N5-C30-hSL-N5) comprising derived and/or modified sequence from Pf(3D7)__XP_001351122.1__IgE_Pf-CSP(19-397) (opt5)
aggagagggcgcuuggcuugcaaggacccugagcugcggcauugaagcacacccaacccaacucgacugaagucagccucacugaaccggaucugagaaucuucucucucugggcuugccagggcucuccgaaccuagcuagcauccucuucaauuccaacuagaaagcuuaccauggacuggaccuggauccuguuccucguggccgcugccacaagaguccacagccuguuucaggaguaccaaugcuauggcuccucuagcaacacgcggguucuuaaugaacugaacuacgauaaugcggggaccaaccucuauaaugagcuggaaaugaacuacuauggaaagcaggagaauugguacucccuuaaaaagaacucucgcagccugggcgaaaaugacgaugggaacaaugaggacaacgagaaacucagaaagcccaaacauaagaagcugaaacagccugcugauggaaauccggaccccaacgccaauccuaacguggaucccaacgccaauccuaacguggaccccaaugcuaacccuaaugucgauccgaacgccaaucccaacgcuaauccuaacgccaaucccaacgcgaauccuaacgccaaucccaacgcuaacccgaaugccaacccuaaugcuaaccccaaugccaacccuaaugcgaaccccaaugccaaccccaaugcuaacccuaaugccaacccgaaugcuaaccccaacgccaauccuaacgccaaucccaacgcuaauccuaacguggaccccaaugcgaacccgaaugccaacccuaaugcuaaccccaaugccaacccuaaugccaaccccaacgcuaauccuaacgccaaucccaacgcgaauccgaacgcuaauccuaacgccaaucccaacgccaaucccaacgcuaauccuaacgccaauccgaacgcuaaucccaacgccaacccuaaugcgaaccccaaugccaacccuaaugcuaaccccaauaagaacaaucagggcaacgggcaaggacacaauaugccuaacgaucccaaucggaacguugacgaaaaugccaacgcuaacuccgccgugaaaaauaacaauaacgaggaaccgucugauaagcauauuaaagaguaucugaauaagauccagaacagccucuccacagaguggagcccuuguucugugaccugcggcaauggcauucagguccgcaucaagcccggguccgcgaacaaaccuaaggacgaacuggacuacgccaaugauauugagaaaaagaucuguaaaauggaaaagugcagcucuguuuucaacguggucaauuccagcaucggacuuauuauggugcugucuuuucucuuccugaacugaggacuagucccuguucccagagcccacuuuuuuuucuuuuuuugaaauaaaauagccugucuuucagaucuaaaaaaaaaaaaaaaaaaaaaaaaaaaaaaaaaaaaaaaaaaaaaaaaaaaaaaaaaaaaaaaaugcaucccccccccccccccccccccccccccccccaaaggcucuuuucagagccaccagaauu

SEQ ID NO: 6472 - RNA, 1732 nt, Artificial Sequence
  mRNA Design a-3 (A64-N5-C30-hSL-N5) comprising derived and/or modified sequence from Pf(3D7)__XP_001351122.1__Pf-CSP_L(G4SG4)_TM domain HA (opt5)
aggagagggcgcuuggcuugcaaggacccugagcugcggcauugaagcacacccaacccaacucgacugaagucagccucacugaaccggaucugagaaucuucucucucugggcuugccagggcucuccgaaccuagcuagcauccucuucaauuccaacuagaaagcuuaccaugaugagaaagcuggccauccucagcguguccucuuuccuguuugucgaggcucuuuuccaggaauaccaaugcuauggcagcuccucuaacacccggguucugaaugagcucaacuacgacaaugccgggacaaaccuguauaaugaacuugagaugaacuacuauggaaaacaggaaaauugguacagccugaagaaaaacucccgcucucucggcgagaaugaugacgggaacaaugaggauaacgaaaagcugagaaaacccaagcacaagaaacugaagcagccugcggacggaaauccggaucccaacgcuaauccuaacguggaccccaacgccaauccuaacguggaucccaaugccaacccuaaugucgacccgaacgcuaaucccaacgccaauccuaacgcuaaucccaacgccaauccuaacgcgaaucccaacgccaacccgaaugcuaacccuaaugccaaccccaaugcuaacccuaaugccaaccccaaugcgaaccccaaugccaacccuaaugcuaacccgaaugccaaccccaacgcuaauccuaacgccaaucccaacgccaauccuaacguggaucccaaugcuaacccgaaugcgaacccuaaugccaaccccaaugcuaacccuaaugccaaccccaacgccaauccuaacgcuaaucccaacgccaauccgaacgcgaauccuaacgcuaaucccaacgccaaucccaacgccaauccuaacgcuaauccgaacgccaaucccaacgcuaacccuaaugccaaccccaaugcgaacccuaaugccaaccccaauaaaaacaaucagggcaacgggcaaggacauaauaugccuaacgaccccaaucggaacguugaugagaaugcuaacgccaacagcgcugugaagaauaacaauaacgaggaaccguccgacaaacacauuaaggaguaucucaauaagauccagaacagccugucuacggaaugguccccuuguagcgugaccugcggcaauggcauucagguccgcaucaaacccgggucugccaacaagccuaaagaugagcuugacuacgcgaaugacauugaaaagaaaaucuguaagauggagaaaugcuccagcguuuuuaacguggucaauucuuccaucggacugauuauggugcucagcuuccuguuucuuaacggcgggggaggcuccgggggaggcggcaagcuggaaucuacaagaaucuaccagauucucgccaucuauagcaccguggcuuccagccugguccugguugugucucucggggccauuuccuucuggauguguagcaauggaucucugcaaugccggaucuguauuugaggacuagucccuguucccagagcccacuuuuuuuucuuuuuuugaaauaaaauagccugucuuucagaucuaaaaaaaaaaaaaaaaaaaaaaaaaaaaaaaaaaaaaaaaaaaaaaaaaaaaaaaaaaaaaaaaugcaucccccccccccccccccccccccccccccccaaaggcucuuuucagagccaccagaauu

SEQ ID NO: 6473 - RNA, 1606 nt, Artificial Sequence
  mRNA Design a-3 (A64-N5-C30-hSL-N5) comprising derived and/or modified sequence from Pf(3D7)__XP_001351122.1__Pf-CSP(199-377)_L(PVTN)_HBsAg (opt5)
aggagagggcgcuuggcuugcaaggacccugagcugcggcauugaagcacacccaacccaacucgacugaagucagccucacugaaccggaucugagaaucuucucucucugggcuugccagggcucuccgaaccuagcuagcauccucuucaauuccaacuagaaagcuuaccauggaccccaacgccaauccuaacgcuaauccgaacgccaaucccaacgcgaauccuaacgcuaaucccaacgccaauccuaacgccaaucccaacgcuaauccuaacgccaacccgaaugcuaaccccaaugccaacccuaaugcgaaccccaaugccaacccuaaugcuaaccccaaugccaacccgaaugcuaacccuaaugccaaccccaacgcgaauccuaacaagaauaaccagggcaaugggcaaggacacaacaugcccaaugaucccaacagaaauguggacgagaacgccaaugcuaacagcgccgucaaaaauaacaauaacgaggaaccuuccgauaagcauaucaaagaauaccugaacaagauucaaaauucucucagcaccgagugguccccgugcucuguuacauguggcaacgggauccaggugcggauuaaacccggaagcgcuaauaagccuaaggacgaacuggauuaugccaacgacaucgagaaaaagauuugcaaaauggagaaguguuccucugugcccgucacgaauauggaaaacaucaccagcggcuuccuugggccucugcucgugcugcaggccggauuuuuccuucugacacgcauccucaccauuccccagucccuggauagcugguggacaucucugaauuuucucggcggcuccccgguuugccuggggcagaacagccagucuccuaccuccaaucacagccccacaucuuguccucccaucugcccuggauacagauggaugugucuucggcgcuucauuaucuuucuguucauucuccugcuuugccugaucuuucuccuggugcugcucgacuaucagggcaugcugcccgucuguccgcuuauuccuggguccaccacgaccaacacaggacccugcaaaaccuguacaacccccgcucaaggcaauagcauguucccuuccugcugcuguacgaagccgacagaugggaacugcaccuguauccccaucccuucuagcugggcguuugccaaguaccugugggagugggcuuccgugagauucagcuggcucucucugcuuguucccuuugugcagugguucgucggacuguccccuacaguguggcucagcgccauuuggaugaugugguauuggggccccucucuguacagcaucguguccccuuuuauuccccugcucccgaucuucuucugccugugggucuauauuugaggacuagucccuguucccagagcccacuuuuuuuucuuuuuuugaaauaaaauagccugucuuucagaucuaaaaaaaaaaaaaaaaaaaaaaaaaaaaaaaaaaaaaaaaaaaaaaaaaaaaaaaaaaaaaaaaugcaucccccccccccccccccccccccccccccccaaaggcucuuuucagagccaccagaauu

SEQ ID NO: 6474 - RNA, 1648 nt, Artificial Sequence
  mRNA Design a-3 (A64-N5-C30-hSL-N5) comprising derived and/or modified sequence from Pf(3D7)__XP_001351122.1__Pf-CSP(199-387)_L(PVTN)_HBsAg (opt5)
aggagagggcgcuuggcuugcaaggacccugagcugcggcauugaagcacacccaacccaacucgacugaagucagccucacugaaccggaucugagaaucuucucucucugggcuugccagggcucuccgaaccuagcuagcauccucuucaauuccaacuagaaagcuuaccaugauggcccccgacccuaacgcuaauccgaacgccaaucccaacgcgaauccuaacgcuaaucccaacgccaauccuaacgccaaucccaacgcuaauccuaacgccaauccgaacgcuaaccccaaugccaacccuaaugcgaaccccaaugccaacccuaaugcuaaccccaaugccaacccgaaugcuaacccuaaugccaaccccaaugcgaacccuaacgccaaucccaacaagaauaaccagggcaaugggcaaggacacaacaugcccaaugauccuaacagaaauguggacgagaacgcuaaugccaacagcgcugucaaaaauaacaauaacgaggaaccguccgauaagcauaucaaagaauaccugaacaagauucaaaauucucucagcaccgaguggucccccugcucuguuacauguggcaacgggauccaggugcggauuaaaccuggaagcgccaauaagcccaaggacgaacuggauuaugccaacgacaucgagaaaaagauuugcaaaauggagaaguguuccucuguguucaaugucgugaacagcuccaucggccuugggccuguuacgaauauggaaaacaucaccagcggauuucugggcccccuccuggugcuucaggcuggcuucuuucugcucacacgcauucugaccaucccgcagucucuggauuccugguggacaagccucaauuuccuugggggaucuccugucugccugggccagaacucccagagccccaccucuaaucacuccccuacaagcugucccccuauuugccccggguacagauggaugugucugcggcgcuuuaucauuuuccucuuuauccugcuucugugccucauuuuccugcuggugcuccuggacuaucagggaaugcuuccgguuuguccucugauccccggcuccaccacgaccaacacagggcccugcaaaaccuguacaaccccugcgcaaggaaauucuauguuuccgagcugcugcuguacgaagcccacagauggcaacugcaccuguaucccuauucccuccagcugggccuucgcuaaguaccucugggagugggccucugugagauuuuccuggcugagccuucuggucccuuucgugcagugguuugugggccucucucccacagucuggcugagcgccaucuggaugaugugguauugggggccuucccuguacucuauuguuagccccuucaucccgcuccugccuauuuucuuuugccuuuggguguauaucugaggacuagucccuguucccagagcccacuuuuuuuucuuuuuuugaaauaaaauagccugucuuucagaucuaaaaaaaaaaaaaaaaaaaaaaaaaaaaaaaaaaaaaaaaaaaaaaaaaaaaaaaaaaaaaaaaugcaucccccccccccccccccccccccccccccccaaaggcucuuuucagagccaccagaauu

SEQ ID NO: 6475 - RNA, 832 nt, Artificial Sequence
  mRNA Design a-3 (A64-N5-C30-hSL-N5) comprising derived and/or modified sequence from Pf(3D7)__XP_001351122.1__HsALB_Pf-CSP(19-152) (opt5)
aggagagggcgcuuggcuugcaaggacccugagcugcggcauugaagcacacccaacccaacucgacugaagucagccucacugaaccggaucugagaaucuucucucucugggcuugccagggcucuccgaaccuagcuagcauccucuucaauuccaacuagaaagcuuaccaugaagugggugaccuucaucagccugcucuuucuguucuccucugccuacagccuuuuucaggaguaucaaugcuacggcuccucuagcaacacaagaguccugaaugaacucaacuaugacaaugcugggacgaaccuguacaaugagcuugaaaugaacuauuacggaaaacaggagaauugguauucccugaagaaaaacucucggagccucggcgaaaaugaugacgggaacaaugaggauaacgagaagcugcgcaaacccaagcacaagaaacugaagcagccugccgacggaaauccggaucccaacgcgaauccuaacguugaccccaacgcuaauccuaacguggaucccaaugccaacccuaauguggacccgaacgccaaucccaacgcuaauccuaacgccaaucccaacgcuaauccuaacgccaaucccaacgcgaacccgugaggacuagucccuguucccagagcccacuuuuuuuucuuuuuuugaaauaaaauagccugucuuucagaucuaaaaaaaaaaaaaaaaaaaaaaaaaaaaaaaaaaaaaaaaaaaaaaaaaaaaaaaaaaaaaaaaugcaucccccccccccccccccccccccccccccccaaaggcucuuuucagagccaccagaauu

SEQ ID NO: 6476 - RNA, 952 nt, Artificial Sequence
  mRNA Design a-3 (A64-N5-C30-hSL-N5) comprising derived and/or modified sequence from Pf(3D7)__XP_001351122.1__HsALB_Pf-CSP(19-192) (opt5)
aggagagggcgcuuggcuugcaaggacccugagcugcggcauugaagcacacccaacccaacucgacugaagucagccucacugaaccggaucugagaaucuucucucucugggcuugccagggcucuccgaaccuagcuagcauccucuucaauuccaacuagaaagcuuaccaugaagugggugaccuucaucagccugcucuuucuguucuccucugccuacagccuuuuucaggaguaucaaugcuacggcuccucuagcaacacaagaguccugaaugaacucaacuaugacaaugcugggacgaaccuguacaaugagcuugaaaugaacuauuacggaaaacaggagaauugguauucccugaagaaaaacucucggagccucggcgaaaaugaugacgggaacaaugaggauaacgagaagcugcgcaaacccaagcacaagaaacugaagcagccugccgacggaaauccggaucccaacgcgaauccuaacguugaccccaacgcuaauccuaacguggaucccaaugccaacccuaauguggacccgaacgccaaucccaacgcuaauccuaacgccaaucccaacgcuaauccuaacgccaaucccaacgcgaacccgaaugccaacccuaaugcuaaccccaaugccaacccuaaugcuaaccccaaugccaaccccaaugcgaacccuaaugccaacccgaaugcuaaccccaacgccaauccuaacgcuaaucccugaggacuagucccuguucccagagcccacuuuuuuuucuuuuuuugaaauaaaauagccugucuuucagaucuaaaaaaaaaaaaaaaaaaaaaaaaaaaaaaaaaaaaaaaaaaaaaaaaaaaaaaaaaaaaaaaaugcaucccccccccccccccccccccccccccccccaaaggcucuuuucagagccaccagaauu

SEQ ID NO: 6477 - RNA, 1192 nt, Artificial Sequence
  mRNA Design a-3 (A64-N5-C30-hSL-N5) comprising derived and/or modified sequence from Pf(3D7)__XP_001351122.1__HsALB_Pf-CSP(19-272) (opt5)
aggagagggcgcuuggcuugcaaggacccugagcugcggcauugaagcacacccaacccaacucgacugaagucagccucacugaaccggaucugagaaucuucucucucugggcuugccagggcucuccgaaccuagcuagcauccucuucaauuccaacuagaaagcuuaccaugaagugggugaccuucaucagccugcucuuucuguucuccucugccuacagccuuuuucaggaguaucaaugcuacggcuccucuagcaacacaagaguccugaaugaacucaacuaugacaaugcugggacgaaccuguacaaugagcuugaaaugaacuauuacggaaaacaggagaauugguauucccugaagaaaaacucucggagccucggcgaaaaugaugacgggaacaaugaggauaacgagaagcugcgcaaacccaagcacaagaaacugaagcagccugccgacggaaauccggaucccaacgcgaauccuaacguugaccccaacgcuaauccuaacguggaucccaaugccaacccuaauguggacccgaacgccaaucccaacgcuaauccuaacgccaaucccaacgcuaauccuaacgccaaucccaacgcgaacccgaaugccaacccuaaugcuaaccccaaugccaacccuaaugcuaaccccaaugccaaccccaaugcgaacccuaaugccaacccgaaugcuaaccccaacgccaauccuaacgcuaaucccaacgccaauccuaacgucgaucccaaugccaacccgaaugcuaacccuaaugcgaaccccaaugccaacccuaaugcuaaccccaacgccaauccuaacgccaaucccaacgcuaauccgaacgccaauccuaacgcgaaucccaacgcuaaucccaacgccaauccuaacgccaauccgaacgcuaaucccaacgccaacccuaaugcuaaccccaaugccaacccuaaugcgaaccccugaggacuagucccuguucccagagcccacuuuuuuuucuuuuuuugaaauaaaauagccugucuuucagaucuaaaaaaaaaaaaaaaaaaaaaaaaaaaaaaaaaaaaaaaaaaaaaaaaaaaaaaaaaaaaaaaaugcaucccccccccccccccccccccccccccccccaaaggcucuuuucagagccaccagaauu

SEQ ID NO: 6478 - RNA, 1354 nt, Artificial Sequence
  mRNA Design a-3 (A64-N5-C30-hSL-N5) comprising derived and/or modified sequence from Pf(3D7)__XP_001351122.1__HsALB_Pf-CSP(19-272)_L(AAY)_Pf-CSP(310-3 27)_L(AAY)_Pf-CSP(346-375) (opt5)
aggagagggcgcuuggcuugcaaggacccugagcugcggcauugaagcacacccaacccaacucgacugaagucagccucacugaaccggaucugagaaucuucucucucugggcuugccagggcucuccgaaccuagcuagcauccucuucaauuccaacuagaaagcuuaccaugaagugggugaccuucaucagccugcucuuucuguucuccucugccuacagccuuuuucaggaguaucaaugcuacggcuccucuagcaacacaagaguccugaaugaacucaacuaugacaaugcugggacgaaccuguacaaugagcuugaaaugaacuauuacggaaaacaggagaauugguauucccugaagaaaaacucucggagccucggcgaaaaugaugacgggaacaaugaggauaacgagaagcugcgcaaacccaagcacaagaaacugaagcagccugccgacggaaauccggaucccaacgcgaauccuaacguugaccccaacgcuaauccuaacguggaucccaaugccaacccuaauguggacccgaacgccaaucccaacgcuaauccuaacgccaaucccaacgcuaauccuaacgccaaucccaacgcgaacccgaaugccaacccuaaugcuaaccccaaugccaacccuaaugcuaaccccaaugccaaccccaaugcgaacccuaaugccaacccgaaugcuaaccccaacgccaauccuaacgcuaaucccaacgccaauccuaacgucgaucccaaugccaacccgaaugcuaacccuaaugcgaaccccaaugccaacccuaaugcuaaccccaacgccaauccuaacgccaaucccaacgcuaauccgaacgccaauccuaacgcgaaucccaacgcuaaucccaacgccaauccuaacgccaauccgaacgcuaaucccaacgccaacccuaaugcuaaccccaaugccaacccuaaugcgaaccccgccgcuuacgaaccuuccgacaaacauauuaaggaguaccucaauaaaauccagaacagccuggccgcuuauauuaagcccggcucugccaauaagccgaaagaugaacuugacuacgcgaacgauaucgagaagaaaauuuguaagauggagaaaugcuccugaggacuagucccuguucccagagcccacuuuuuuuucuuuuuuugaaauaaaauagccugucuuucagaucuaaaaaaaaaaaaaaaaaaaaaaaaaaaaaaaaaaaaaaaaaaaaaaaaaaaaaaaaaaaaaaaaugcaucccccccccccccccccccccccccccccccaaaggcucuuuucagagccaccagaauu

SEQ ID NO: 6479 - RNA, 1315 nt, Artificial Sequence
  mRNA Design a-3 (A64-N5-C30-hSL-N5) comprising derived and/or modified sequence from Pf(3D7)__XP_001351122.1__HsALB_Pf-CSP(19-272)_L(AAY)_Pf-CSP(346-3 65)_L(AAY)_P2 (opt5)
aggagagggcgcuuggcuugcaaggacccugagcugcggcauugaagcacacccaacccaacucgacugaagucagccucacugaaccggaucugagaaucuucucucucugggcuugccagggcucuccgaaccuagcuagcauccucuucaauuccaacuagaaagcuuaccaugaagugggugaccuucaucagccugcucuuucuguucuccucugccuacagccuuuuucaggaguaucaaugcuacggcuccucuagcaacacaagaguccugaaugaacucaacuaugacaaugcugggacgaaccuguacaaugagcuugaaaugaacuauuacggaaaacaggagaauugguauucccugaagaaaaacucucggagccucggcgaaaaugaugacgggaacaaugaggauaacgagaagcugcgcaaacccaagcacaagaaacugaagcagccugccgacggaaauccggaucccaacgcgaauccuaacguugaccccaacgcuaauccuaacguggaucccaaugccaacccuaauguggacccgaacgccaaucccaacgcuaauccuaacgccaaucccaacgcuaauccuaacgccaaucccaacgcgaacccgaaugccaacccuaaugcuaaccccaaugccaacccuaaugcuaaccccaaugccaaccccaaugcgaacccuaaugccaacccgaaugcuaaccccaacgccaauccuaacgcuaaucccaacgccaauccuaacgucgaucccaaugccaacccgaaugcuaacccuaaugcgaaccccaaugccaacccuaaugcuaaccccaacgccaauccuaacgccaaucccaacgcuaauccgaacgccaauccuaacgcgaaucccaacgcuaaucccaacgccaauccuaacgccaauccgaacgcuaaucccaacgccaacccuaaugcuaaccccaaugccaacccuaaugcgaaccccgccgcuuacauuaaaccuggcuccgccaauaagcccaaagacgaacucgauuacgcuaacgacaucgaggccgcguaucaguacauuaaggccaauagcaaguucaucgggauuaccgaacugugaggacuagucccuguucccagagcccacuuuuuuuucuuuuuuugaaauaaaauagccugucuuucagaucuaaaaaaaaaaaaaaaaaaaaaaaaaaaaaaaaaaaaaaaaaaaaaaaaaaaaaaaaaaaaaaaaugcaucccccccccccccccccccccccccccccccaaaggcucuuuucagagccaccagaauu

SEQ ID NO: 6480 - RNA, 1309 nt, Artificial Sequence
  mRNA Design a-3 (A64-N5-C30-hSL-N5) comprising derived and/or modified sequence from Pf(3D7)__XP_001351122.1__HsALB_Pf-CSP(19-272)_L(AAY)_Pf-CSP(346-3 65)_L(AAY)_PADRE (opt5)
aggagagggcgcuuggcuugcaaggacccugagcugcggcauugaagcacacccaacccaacucgacugaagucagccucacugaaccggaucugagaaucuucucucucugggcuugccagggcucuccgaaccuagcuagcauccucuucaauuccaacuagaaagcuuaccaugaagugggugaccuucaucagccugcucuuucuguucuccucugccuacagccuuuuucaggaguaucaaugcuacggcuccucuagcaacacaagaguccugaaugaacucaacuaugacaaugcugggacgaaccuguacaaugagcuugaaaugaacuauuacggaaaacaggagaauugguauucccugaagaaaaacucucggagccucggcgaaaaugaugacgggaacaaugaggauaacgagaagcugcgcaaacccaagcacaagaaacugaagcagccugccgacggaaauccggaucccaacgcgaauccuaacguugaccccaacgcuaauccuaacguggaucccaaugccaacccuaauguggacccgaacgccaaucccaacgcuaauccuaacgccaaucccaacgcuaauccuaacgccaaucccaacgcgaacccgaaugccaacccuaaugcuaaccccaaugccaacccuaaugcuaaccccaaugccaaccccaaugcgaacccuaaugccaacccgaaugcuaaccccaacgccaauccuaacgcuaaucccaacgccaauccuaacgucgaucccaaugccaacccgaaugcuaacccuaaugcgaaccccaaugccaacccuaaugcuaaccccaacgccaauccuaacgccaaucccaacgcuaauccgaacgccaauccuaacgcgaaucccaacgcuaaucccaacgccaauccuaacgccaauccgaacgcuaaucccaacgccaacccuaaugcuaaccccaaugccaacccuaaugcgaaccccgccgcuuacauuaaaccuggcuccgccaauaagcccaaagacgaacucgauuacgcuaacgacaucgaggccgcguaugccaaguucguggcugccuggacccugaaggcugccgccugaggacuagucccuguucccagagcccacuuuuuuuucuuuuuuugaaauaaaauagccugucuuucagaucuaaaaaaaaaaaaaaaaaaaaaaaaaaaaaaaaaaaaaaaaaaaaaaaaaaaaaaaaaaaaaaaaugcaucccccccccccccccccccccccccccccccaaaggcucuuuucagagccaccagaauu

SEQ ID NO: 6481 - RNA, 1366 nt, Artificial Sequence
  mRNA Design a-3 (A64-N5-C30-hSL-N5) comprising derived and/or modified sequence from Pf(3D7)__XP_001351122.1__HsALB_Pf-CSP(19-272)_L(G4S)_Pf-CSP(310-3 27)_L(G4S)_Pf-CSP(346-375) (opt5)
aggagagggcgcuuggcuugcaaggacccugagcugcggcauugaagcacacccaacccaacucgacugaagucagccucacugaaccggaucugagaaucuucucucucugggcuugccagggcucuccgaaccuagcuagcauccucuucaauuccaacuagaaagcuuaccaugaagugggugaccuucaucagccugcucuuucuguucuccucugccuacagccuuuuucaggaguaucaaugcuacggcuccucuagcaacacaagaguccugaaugaacucaacuaugacaaugcugggacgaaccuguacaaugagcuugaaaugaacuauuacggaaaacaggagaauugguauucccugaagaaaaacucucggagccucggcgaaaaugaugacgggaacaaugaggauaacgagaagcugcgcaaacccaagcacaagaaacugaagcagccugccgacggaaauccggaucccaacgcgaauccuaacguugaccccaacgcuaauccuaacguggaucccaaugccaacccuaauguggacccgaacgccaaucccaacgcuaauccuaacgccaaucccaacgcuaauccuaacgccaaucccaacgcgaacccgaaugccaacccuaaugcuaaccccaaugccaacccuaaugcuaaccccaaugccaaccccaaugcgaacccuaaugccaacccgaaugcuaaccccaacgccaauccuaacgcuaaucccaacgccaauccuaacgucgaucccaaugccaacccgaaugcuaacccuaaugcgaaccccaaugccaacccuaaugcuaaccccaacgccaauccuaacgccaaucccaacgcuaauccgaacgccaauccuaacgcgaaucccaacgcuaaucccaacgccaauccuaacgccaauccgaacgcuaaucccaacgccaacccuaaugcuaaccccaaugccaacccuaaugcgaaccccggcgggggaggcuccgaaccuagcgacaaacauauuaaggaguaccucaauaaaauccagaacucucugggcgggggaggcuccauuaagcccgggagcgccaauaagccgaaagaugaacuugacuacgcuaacgauaucgagaagaaaauuuguaagauggagaaaugcucuugaggacuagucccuguucccagagcccacuuuuuuuucuuuuuuugaaauaaaauagccugucuuucagaucuaaaaaaaaaaaaaaaaaaaaaaaaaaaaaaaaaaaaaaaaaaaaaaaaaaaaaaaaaaaaaaaaugcaucccccccccccccccccccccccccccccccaaaggcucuuuucagagccaccagaauu

SEQ ID NO: 6482 - RNA, 1351 nt, Artificial Sequence
  mRNA Design a-3 (A64-N5-C30-hSL-N5) comprising derived and/or modified sequence from Pf(3D7)__XP_001351122.1__HsALB_Pf-CSP(19-272)_L(G4S)_Pf-CSP(310-3 27)_Pf-CSP(346-375) (opt5)
aggagagggcgcuuggcuugcaaggacccugagcugcggcauugaagcacacccaacccaacucgacugaagucagccucacugaaccggaucugagaaucuucucucucugggcuugccagggcucuccgaaccuagcuagcauccucuucaauuccaacuagaaagcuuaccaugaagugggugaccuucaucagccugcucuuucuguucuccucugccuacagccuuuuucaggaguaucaaugcuacggcuccucuagcaacacaagaguccugaaugaacucaacuaugacaaugcugggacgaaccuguacaaugagcuugaaaugaacuauuacggaaaacaggagaauugguauucccugaagaaaaacucucggagccucggcgaaaaugaugacgggaacaaugaggauaacgagaagcugcgcaaacccaagcacaagaaacugaagcagccugccgacggaaauccggaucccaacgcgaauccuaacguugaccccaacgcuaauccuaacguggaucccaaugccaacccuaauguggacccgaacgccaaucccaacgcuaauccuaacgccaaucccaacgcuaauccuaacgccaaucccaacgcgaacccgaaugccaacccuaaugcuaaccccaaugccaacccuaaugcuaaccccaaugccaaccccaaugcgaacccuaaugccaacccgaaugcuaaccccaacgccaauccuaacgcuaaucccaacgccaauccuaacgucgaucccaaugccaacccgaaugcuaacccuaaugcgaaccccaaugccaacccuaaugcuaaccccaacgccaauccuaacgccaaucccaacgcuaauccgaacgccaauccuaacgcgaaucccaacgcuaaucccaacgccaauccuaacgccaauccgaacgcuaaucccaacgccaacccuaaugcuaaccccaaugccaacccuaaugcgaaccccggcgggggaggcuccgaaccuagcgacaaacauauuaaggaguaccucaauaaaauccagaacucucugauuaagcccggcuccgccaauaagccgaaagaugaacuugacuacgcuaacgauaucgagaagaaaauuuguaagauggagaaaugcagcugaggacuagucccuguucccagagcccacuuuuuuuucuuuuuuugaaauaaaauagccugucuuucagaucuaaaaaaaaaaaaaaaaaaaaaaaaaaaaaaaaaaaaaaaaaaaaaaaaaaaaaaaaaaaaaaaaugcaucccccccccccccccccccccccccccccccaaaggcucuuuucagagccaccagaauu

SEQ ID NO: 6483 - RNA, 1351 nt, Artificial Sequence
  mRNA Design a-3 (A64-N5-C30-hSL-N5) comprising derived and/or modified sequence from Pf(3D7)__XP_001351122.1__HsALB_Pf-CSP(19-325) (opt5)
aggagagggcgcuuggcuugcaaggacccugagcugcggcauugaagcacacccaacccaacucgacugaagucagccucacugaaccggaucugagaaucuucucucucugggcuugccagggcucuccgaaccuagcuagcauccucuucaauuccaacuagaaagcuuaccaugaagugggugaccuucaucagccugcucuuucuguucuccucugccuacagccuuuuucaggaguaucaaugcuacggcuccucuagcaacacaagaguccugaaugaacucaacuaugacaaugcugggacgaaccuguacaaugagcuugaaaugaacuauuacggaaaacaggagaauugguauucccugaagaaaaacucucggagccucggcgaaaaugaugacgggaacaaugaggauaacgagaagcugcgcaaacccaagcacaagaaacugaagcagccugccgacggaaauccggaucccaacgcgaauccuaacguugaccccaacgcuaauccuaacguggaucccaaugccaacccuaauguggacccgaacgccaaucccaacgcuaauccuaacgccaaucccaacgcuaauccuaacgccaaucccaacgcgaacccgaaugccaacccuaaugcuaaccccaaugccaacccuaaugcuaaccccaaugccaaccccaaugcgaacccuaaugccaacccgaaugcuaaccccaacgccaauccuaacgcuaaucccaacgccaauccuaacgucgaucccaaugccaacccgaaugcuaacccuaaugcgaaccccaaugccaacccuaaugcuaaccccaacgccaauccuaacgccaaucccaacgcuaauccgaacgccaauccuaacgcgaaucccaacgcuaaucccaacgccaauccuaacgccaauccgaacgcuaaucccaacgccaacccuaaugcuaaccccaaugccaacccuaaugcgaaccccaauaaaaacaaucagggcaacgggcaaggacauaauaugccuaacgaccccaauagaaacguggaugaaaaugccaacgcuaacuccgccguuaagaauaacaauaacgaggaaccgagcgacaaacacauuaaggaguaccucaauaagauccagaacugaggacuagucccuguucccagagcccacuuuuuuuucuuuuuuugaaauaaaauagccugucuuucagaucuaaaaaaaaaaaaaaaaaaaaaaaaaaaaaaaaaaaaaaaaaaaaaaaaaaaaaaaaaaaaaaaaugcaucccccccccccccccccccccccccccccccaaaggcucuuuucagagccaccagaauu

SEQ ID NO: 6484 - RNA, 1528 nt, Artificial Sequence
  mRNA Design a-3 (A64-N5-C30-hSL-N5) comprising derived and/or modified sequence from Pf(3D7)__XP_001351122.1__HsALB_Pf-CSP(19-384) (opt5)
aggagagggcgcuuggcuugcaaggacccugagcugcggcauugaagcacacccaacccaacucgacugaagucagccucacugaaccggaucugagaaucuucucucucugggcuugccagggcucuccgaaccuagcuagcauccucuucaauuccaacuagaaagcuuaccaugaagugggugaccuucaucagccugcucuuucuguucuccucugccuacagccuuuuucaggaguaucaaugcuacggcuccucuagcaacacaagagugcugaaugaacucaacuaugacaaugcugggacgaaccuguacaaugagcuugaaaugaacuauuacggaaaacaggagaauugguauucccugaagaaaaacucucggagccucggcgaaaaugaugacgggaacaaugaggauaacgagaagcugcgcaaacccaagcacaagaaacugaagcagccugccgacggaaauccggaucccaacgcgaauccuaacguugaccccaacgcuaauccuaacguggaucccaaugccaacccuaauguggacccgaacgccaaucccaacgcuaauccuaacgccaaucccaacgcuaauccuaacgccaaucccaacgcgaacccgaaugccaacccuaaugcuaaccccaaugccaacccuaaugcuaaccccaaugccaaccccaaugcgaacccuaaugccaacccgaaugcuaaccccaacgccaauccuaacgcuaaucccaacgccaauccuaacgucgaucccaaugccaacccgaaugcuaacccuaaugcgaaccccaaugccaacccuaaugcuaaccccaacgccaauccuaacgccaaucccaacgcuaauccgaacgccaauccuaacgcgaaucccaacgcuaaucccaacgccaauccuaacgccaauccgaacgcuaaucccaacgccaacccuaaugcuaaccccaaugccaacccuaaugcgaaccccaauaaaaacaaucagggcaacgggcaaggacauaauaugccuaacgaccccaauagaaacguggaugaaaaugccaacgcuaacuccgccguuaagaauaacaauaacgaggaaccgagcgacaaacacauuaaggaguaccucaauaagauccagaacucucuguccaccgaguggagcccuuguucugugacaugcggcaauggcauucagguccggaucaaacccggguccgcuaacaagccuaaagaugaacuugacuacgccaaugacauugagaagaaaaucuguaagauggaaaaaugcagcucuguguucaacguugucaauuccagcugaggacuagucccuguucccagagcccacuuuuuuuucuuuuuuugaaauaaaauagccugucuuucagaucuaaaaaaaaaaaaaaaaaaaaaaaaaaaaaaaaaaaaaaaaaaaaaaaaaaaaaaaaaaaaaaaaugcaucccccccccccccccccccccccccccccccaaaggcucuuuucagagccaccagaauu

SEQ ID NO: 6485 - RNA, 1666 nt, Artificial Sequence
  mRNA Design a-3 (A64-N5-C30-hSL-N5) comprising derived and/or modified sequence from Pf(3D7)__XP_001351122.1__HsALB_Pf-CSP(19-384)_TM domain HA (opt5)
aggagagggcgcuuggcuugcaaggacccugagcugcggcauugaagcacacccaacccaacucgacugaagucagccucacugaaccggaucugagaaucuucucucucugggcuugccagggcucuccgaaccuagcuagcauccucuucaauuccaacuagaaagcuuaccaugaagugggugaccuucaucagccugcucuuucuguucuccucugccuacagccuuuuucaggaguaucaaugcuacggcuccucuagcaacacaagaguccugaaugaacucaacuaugacaaugcugggacgaaccuguacaaugagcuugaaaugaacuauuacggaaaacaggagaauugguauucccugaagaaaaacucucggagccucggcgaaaaugaugacgggaacaaugaggauaacgagaagcugcgcaaacccaagcacaagaaacugaagcagccugccgacggaaauccggaucccaacgcgaauccuaacguugaccccaacgcuaauccuaacguggaucccaaugccaacccuaauguggacccgaacgccaaucccaacgcuaauccuaacgccaaucccaacgcuaauccuaacgccaaucccaacgcgaacccgaaugccaacccuaaugcuaaccccaaugccaacccuaaugcuaaccccaaugccaaccccaaugcgaacccuaaugccaacccgaaugcuaaccccaacgccaauccuaacgcuaaucccaacgccaauccuaacgucgaucccaaugccaacccgaaugcuaacccuaaugcgaaccccaaugccaacccuaaugcuaaccccaacgccaauccuaacgccaaucccaacgcuaauccgaacgccaauccuaacgcgaaucccaacgcuaaucccaacgccaauccuaacgccaauccgaacgcuaaucccaacgccaacccuaaugcuaaccccaaugccaacccuaaugcgaaccccaauaaaaacaaucagggcaacgggcaaggacauaauaugccuaacgaccccaauagaaacguggaugaaaaugccaacgcuaacuccgccguuaagaauaacaauaacgaggaaccgagcgacaaacacauuaaggaguaccucaauaagauccagaacucucuguccaccgaguggagcccuuguucugugacaugcggcaauggcauucagguccggaucaaacccggguccgcuaacaagccuaaagaugaacuugacuacgccaaugacauugagaagaaaaucuguaagauggaaaaaugcagcucuguguucaacguugucaauuccagcaagcuggaguccacccgcaucuaucagauucucgcgaucuacucuacaguggccagcucccuggugcuuguggucagccugggagcuauuucuuuuuggauguguuccaacggcagccuccaaugcagaaucuguauuugaggacuagucccuguucccagagcccacuuuuuuuucuuuuuuugaaauaaaauagccugucuuucagaucuaaaaaaaaaaaaaaaaaaaaaaaaaaaaaaaaaaaaaaaaaaaaaaaaaaaaaaaaaaaaaaaaugcaucccccccccccccccccccccccccccccccaaaggcucuuuucagagccaccagaauu

SEQ ID NO: 6486 - RNA, 1378 nt, Artificial Sequence
  mRNA Design a-3 (A64-N5-C30-hSL-N5) comprising derived and/or modified sequence from Pf(3D7)__XP_001351122.1__HsALB_Pf-CSP(82-397) (opt5)
aggagagggcgcuuggcuugcaaggacccugagcugcggcauugaagcacacccaacccaacucgacugaagucagccucacugaaccggaucugagaaucuucucucucugggcuugccagggcucuccgaaccuagcuagcauccucuucaauuccaacuagaaagcuuaccaugaagugggugaccuucaucagccugcucuuucuguucuccucugccuacagcgacaacgagaaacuuagaaagcccaaacacaagaaacugaagcagccugcugauggcaauccggaccccaacgccaauccuaacgucgaucccaaugcgaacccuaauguugaccccaacgcuaauccuaacguggauccgaaugccaaccccaaugccaacccuaaugcuaaccccaacgccaauccuaacgcuaaucccaacgccaauccgaacgcgaauccuaacgccaaucccaacgcuaauccuaacgccaaucccaacgcuaaucccaacgccaacccuaaugcgaacccgaaugccaaccccaaugcuaacccuaaugccaaccccaaugcuaacccuaauguggaccccaacgccaauccgaacgccaauccuaacgcuaaccccaaugcgaacccuaaugccaaccccaaugcuaacccuaaugccaaccccaaugccaacccgaaugcuaacccuaaugccaaccccaaugcgaaccccaacgcuaauccuaacgccaauccgaacgccaaucccaacgcuaauccuaacgccaaucccaacgcuaauccuaacgccaaucccaacaagaauaaccaagggaauggacagggccauaacaugccuaacgaucccaaucggaacgucgacgaaaaugcgaacgccaauuccgcugugaaaaacaauaacaaugaggaaccgucugauaagcacauuaaagaguaucucaacaagauccagaauagccuguccacagaauggucuccuugcagcguuacgugugggaacggcauucaggugcgcaucaaacccggauccgccaauaagccuaaggacgagcuugauuacgcuaacgacauugagaaaaagaucugcaaaauggaaaaguguagcucugucuuuaaugugguuaacuccagcaucgggcugauuauggugcucucuuuccuguuucugaacugaggacuagucccuguucccagagcccacuuuuuuuucuuuuuuugaaauaaaauagccugucuuucagaucuaaaaaaaaaaaaaaaaaaaaaaaaaaaaaaaaaaaaaaaaaaaaaaaaaaaaaaaaaaaaaaaaugcaucccccccccccccccccccccccccccccccaaaggcucuuuucagagccaccagaauu

SEQ ID NO: 6487 - RNA, 730 nt, Artificial Sequence
  mRNA Design a-3 (A64-N5-C30-hSL-N5) comprising derived and/or modified sequence from Pf(3D7)__XP_001351122.1__HsALB_Pf-CSP(93-192) (opt5)
aggagagggcgcuuggcuugcaaggacccugagcugcggcauugaagcacacccaacccaacucgacugaagucagccucacugaaccggaucugagaaucuucucucucugggcuugccagggcucuccgaaccuagcuagcauccucuucaauuccaacuagaaagcuuaccaugaagugggugaccuucaucagccugcucuuucuguucuccucugccuacagcaaacuuaagcagcccgcugacggcaacccugauccgaaugccaaccccaaugucgacccuaacgcgaaucccaacguugauccuaaugcuaaccccaauguggacccuaacgccaauccgaacgccaaucccaacgcuaauccuaacgccaaccccaaugcuaacccuaaugccaaccccaaugcgaacccgaaugccaacccuaaugcuaaccccaaugccaacccuaaugcuaaccccaaugccaaccccaacgcgaauccuaacgccaauccgaacgcuaaucccaacgccaauccuugaggacuagucccuguucccagagcccacuuuuuuuucuuuuuuugaaauaaaauagccugucuuucagaucuaaaaaaaaaaaaaaaaaaaaaaaaaaaaaaaaaaaaaaaaaaaaaaaaaaaaaaaaaaaaaaaaugcaucccccccccccccccccccccccccccccccaaaggcucuuuucagagccaccagaauu

SEQ ID NO: 6488 - RNA, 970 nt, Artificial Sequence
  mRNA Design a-3 (A64-N5-C30-hSL-N5) comprising derived and/or modified sequence from Pf(3D7)__XP_001351122.1__HsALB_Pf-CSP(93-272) (opt5)
aggagagggcgcuuggcuugcaaggacccugagcugcggcauugaagcacacccaacccaacucgacugaagucagccucacugaaccggaucugagaaucuucucucucugggcuugccagggcucuccgaaccuagcuagcauccucuucaauuccaacuagaaagcuuaccaugaagugggugaccuucaucagccugcucuuucuguucuccucugccuacagcaaacuuaagcagcccgcugacggcaacccugauccgaaugccaaccccaaugucgacccuaacgcgaaucccaacguugauccuaaugcuaaccccaauguggacccuaacgccaauccgaacgccaaucccaacgcuaauccuaacgccaaccccaaugcuaacccuaaugccaaccccaaugcgaacccgaaugccaacccuaaugcuaaccccaaugccaacccuaaugcuaaccccaaugccaaccccaacgcgaauccuaacgccaauccgaacgcuaaucccaacgccaauccuaacgcuaaucccaacguggauccuaaugccaaccccaaugccaacccgaaugcuaacccuaacgcgaaucccaacgccaauccuaacgcuaaucccaacgccaauccuaacgccaaucccaacgcuaauccgaacgccaauccuaacgcgaaucccaacgcuaaccccaaugccaacccuaaugccaacccgaaugcuaaccccaaugccaacccuaaugcuaaccccaaugccaacccuugaggacuagucccuguucccagagcccacuuuuuuuucuuuuuuugaaauaaaauagccugucuuucagaucuaaaaaaaaaaaaaaaaaaaaaaaaaaaaaaaaaaaaaaaaaaaaaaaaaaaaaaaaaaaaaaaaugcaucccccccccccccccccccccccccccccccaaaggcucuuuucagagccaccagaauu

SEQ ID NO: 6489 - RNA, 1345 nt, Artificial Sequence
  mRNA Design a-3 (A64-N5-C30-hSL-N5) comprising derived and/or modified sequence from Pf(3D7)__XP_001351122.1__HsALB_Pf-CSP(93-397) (opt5)
aggagagggcgcuuggcuugcaaggacccugagcugcggcauugaagcacacccaacccaacucgacugaagucagccucacugaaccggaucugagaaucuucucucucugggcuugccagggcucuccgaaccuagcuagcauccucuucaauuccaacuagaaagcuuaccaugaagugggugaccuucaucagccugcucuuucuguucuccucugccuacagcaaacuuaagcagcccgcugacggcaacccugauccgaaugccaaccccaaugucgacccuaacgcgaaucccaacguugauccuaaugcuaaccccaauguggacccuaacgccaauccgaacgccaaucccaacgcuaauccuaacgccaaccccaaugcuaacccuaaugccaaccccaaugcgaacccgaaugccaacccuaaugcuaaccccaaugccaacccuaaugcuaaccccaaugccaaccccaacgcgaauccuaacgccaauccgaacgcuaaucccaacgccaauccuaacgcuaaucccaacguggauccuaaugccaaccccaaugccaacccgaaugcuaacccuaacgcgaaucccaacgccaauccuaacgcuaaucccaacgccaauccuaacgccaaucccaacgcuaauccgaacgccaauccuaacgcgaaucccaacgcuaaccccaaugccaacccuaaugccaacccgaaugcuaaccccaaugccaacccuaaugcuaaccccaaugccaacccuaauaaaaacaaucaagggaacggacagggccacaauaugcccaacgacccuaacagaaaugucgaugagaacgcgaaugccaacuccgcugugaagaauaacaauaacgaggaacccucugacaaacauauuaaggaauaucugaauaagauccagaacagccucuccacagaguggucuccgugcagcguuacgugugggaauggcauucaggugcggaucaaaccuggauccgccaacaagcccaaagaugaacuggacuacgcuaaugauauugagaagaaaaucugcaagauggagaaguguagcucugucuuuaacgugguuaauuccagcaucgggcuuauuauggugcugucuuuccucuuucugaacugaggacuagucccuguucccagagcccacuuuuuuuucuuuuuuugaaauaaaauagccugucuuucagaucuaaaaaaaaaaaaaaaaaaaaaaaaaaaaaaaaaaaaaaaaaaaaaaaaaaaaaaaaaaaaaaaaugcaucccccccccccccccccccccccccccccccaaaggcucuuuucagagccaccagaauu

SEQ ID NO: 6490 - RNA, 715 nt, Artificial Sequence
  mRNA Design a-3 (A64-N5-C30-hSL-N5) comprising derived and/or modified sequence from Pf(3D7)__XP_001351122.1__HsALB_Pf-CSP(98-192) (opt5)
aggagagggcgcuuggcuugcaaggacccugagcugcggcauugaagcacacccaacccaacucgacugaagucagccucacugaaccggaucugagaaucuucucucucugggcuugccagggcucuccgaaccuagcuagcauccucuucaauuccaacuagaaagcuuaccaugaagugggugaccuucaucagccugcucuuucuguucuccucugccuacagcgcugacggcaaccccgauccuaaugccaacccgaaugucgaccccaacgcgaauccuaacguugaucccaaugcuaacccuaauguggaccccaacgccaauccuaacgccaauccgaacgcuaaucccaacgccaacccuaaugcuaaccccaaugccaacccuaaugcgaaccccaaugccaacccgaaugcuaacccuaaugccaaccccaaugcuaacccuaaugccaaccccaacgcgaaucccaacgccaauccuaacgcuaauccgaacgccaaucccugaggacuagucccuguucccagagcccacuuuuuuuucuuuuuuugaaauaaaauagccugucuuucagaucuaaaaaaaaaaaaaaaaaaaaaaaaaaaaaaaaaaaaaaaaaaaaaaaaaaaaaaaaaaaaaaaaugcaucccccccccccccccccccccccccccccccaaaggcucuuuucagagccaccagaauu

SEQ ID NO: 6491 - RNA, 955 nt, Artificial Sequence
  mRNA Design a-3 (A64-N5-C30-hSL-N5) comprising derived and/or modified sequence from Pf(3D7)__XP_001351122.1__HsALB_Pf-CSP(98-272) (opt5)
aggagagggcgcuuggcuugcaaggacccugagcugcggcauugaagcacacccaacccaacucgacugaagucagccucacugaaccggaucugagaaucuucucucucugggcuugccagggcucuccgaaccuagcuagcauccucuucaauuccaacuagaaagcuuaccaugaagugggugaccuucaucagccugcucuuucuguucuccucugccuacagcgcugacggcaaccccgauccuaaugccaacccgaaugucgaccccaacgcgaauccuaacguugaucccaaugcuaacccuaauguggaccccaacgccaauccuaacgccaauccgaacgcuaaucccaacgccaacccuaaugcuaaccccaaugccaacccuaaugcgaaccccaaugccaacccgaaugcuaacccuaaugccaaccccaaugcuaacccuaaugccaaccccaacgcgaaucccaacgccaauccuaacgcuaauccgaacgccaaucccaacgcuaauccuaacguggaucccaaugccaacccuaaugccaaccccaaugcuaacccgaacgcgaauccuaacgccaaucccaacgcuaauccuaacgccaaucccaacgccaauccuaacgcuaaucccaacgccaauccgaacgcgaauccuaacgcuaaccccaaugccaaccccaaugccaacccuaaugcuaacccgaaugccaaccccaaugcuaacccuaaugccaaccccugaggacuagucccuguucccagagcccacuuuuuuuucuuuuuuugaaauaaaauagccugucuuucagaucuaaaaaaaaaaaaaaaaaaaaaaaaaaaaaaaaaaaaaaaaaaaaaaaaaaaaaaaaaaaaaaaaugcaucccccccccccccccccccccccccccccccaaaggcucuuuucagagccaccagaauu

SEQ ID NO: 6492 - RNA, 1261 nt, Artificial Sequence
  mRNA Design a-3 (A64-N5-C30-hSL-N5) comprising derived and/or modified sequence from Pf(3D7)__XP_001351122.1__HsALB_Pf-CSP(98-374) (opt5)
aggagagggcgcuuggcuugcaaggacccugagcugcggcauugaagcacacccaacccaacucgacugaagucagccucacugaaccggaucugagaaucuucucucucugggcuugccagggcucuccgaaccuagcuagcauccucuucaauuccaacuagaaagcuuaccaugaagugggugaccuucaucagccugcucuuucuguucuccucugccuacagcgcugacggcaaccccgauccuaaugccaacccgaaugucgaccccaacgcgaauccuaacguugaucccaaugcuaacccuaauguggaccccaacgccaauccuaacgccaauccgaacgcuaaucccaacgccaacccuaaugcuaaccccaaugccaacccuaaugcgaaccccaaugccaacccgaaugcuaacccuaaugccaaccccaaugcuaacccuaaugccaaccccaacgcgaaucccaacgccaauccuaacgcuaauccgaacgccaaucccaacgcuaauccuaacguggaucccaaugccaacccuaaugccaaccccaaugcuaacccgaacgcgaauccuaacgccaaucccaacgcuaauccuaacgccaaucccaacgccaauccuaacgcuaaucccaacgccaauccgaacgcgaauccuaacgcuaaccccaaugccaaccccaaugccaacccuaaugcuaacccgaaugccaaccccaaugcuaacccuaaugccaaccccaauaaaaacaaucaggggaacggacaaggccacaauaugccuaacgaccccaacagaaaugucgaugagaacgcgaaugccaacuccgcugugaagaauaacaauaacgaggaaccuucugacaaacauauuaaggaauaucuuaauaaaauccagaacagccuguccacagaguggucucccugcagcguuacgugugggaauggcauucaggugcggaucaagccgggauccgccaacaagccuaaagaugaacucgacuacgcuaaugauauugagaagaaaaucugcaagauggagaaauguugaggacuagucccuguucccagagcccacuuuuuuuucuuuuuuugaaauaaaauagccugucuuucagaucuaaaaaaaaaaaaaaaaaaaaaaaaaaaaaaaaaaaaaaaaaaaaaaaaaaaaaaaaaaaaaaaaugcaucccccccccccccccccccccccccccccccaaaggcucuuuucagagccaccagaauu

SEQ ID NO: 6493 - RNA, 1330 nt, Artificial Sequence
  mRNA Design a-3 (A64-N5-C30-hSL-N5) comprising derived and/or modified sequence from Pf(3D7)__XP_001351122.1__HsALB_Pf-CSP(98-397) (opt5)
aggagagggcgcuuggcuugcaaggacccugagcugcggcauugaagcacacccaacccaacucgacugaagucagccucacugaaccggaucugagaaucuucucucucugggcuugccagggcucuccgaaccuagcuagcauccucuucaauuccaacuagaaagcuuaccaugaagugggugaccuucaucagccugcucuuucuguucuccucugccuacagcgcugacggcaaccccgauccuaaugccaacccgaaugucgaccccaacgcgaauccuaacguugaucccaaugcuaacccuaauguggaccccaacgccaauccuaacgccaauccgaacgcuaaucccaacgccaacccuaaugcuaaccccaaugccaacccuaaugcgaaccccaaugccaacccgaaugcuaacccuaaugccaaccccaaugcuaacccuaaugccaaccccaacgcgaaucccaacgccaauccuaacgcuaauccgaacgccaaucccaacgcuaauccuaacguggaucccaaugccaacccuaaugccaaccccaaugcuaacccgaacgcgaauccuaacgccaaucccaacgcuaauccuaacgccaaucccaacgccaauccuaacgcuaaucccaacgccaauccgaacgcgaauccuaacgcuaaccccaaugccaaccccaaugccaacccuaaugcuaacccgaaugccaaccccaaugcuaacccuaaugccaaccccaauaaaaacaaucaggggaacggacaaggccacaauaugccuaacgaccccaacagaaaugucgaugagaacgcgaaugccaacuccgcugugaagaauaacaauaacgaggaaccuucugacaaacauauuaaggaauaucuuaauaaaauccagaacagccuguccacagaguggucucccugcagcguuacgugugggaauggcauucaggugcggaucaagccgggauccgccaacaagccuaaagaugaacucgacuacgcuaaugauauugagaagaaaaucugcaagauggagaaauguagcucugucuuuaacgugguuaauuccagcaucgggcugauuauggugcuuucuuuccuguuucucaacugaggacuagucccuguucccagagcccacuuuuuuuucuuuuuuugaaauaaaauagccugucuuucagaucuaaaaaaaaaaaaaaaaaaaaaaaaaaaaaaaaaaaaaaaaaaaaaaaaaaaaaaaaaaaaaaaaugcaucccccccccccccccccccccccccccccccaaaggcucuuuucagagccaccagaauu

SEQ ID NO: 6494 - RNA, 1657 nt, Artificial Sequence
  mRNA Design a-3 (A64-N5-C30-hSL-N5) comprising derived and/or modified sequence from Pf(3D7)__XP_001351122.1__HsALB_Pf-CSP(199-377)_L(PVTN)_HBsAg (opt5)
aggagagggcgcuuggcuugcaaggacccugagcugcggcauugaagcacacccaacccaacucgacugaagucagccucacugaaccggaucugagaaucuucucucucugggcuugccagggcucuccgaaccuagcuagcauccucuucaauuccaacuagaaagcuuaccaugaagugggugaccuucaucagccugcucuuucuguucuccucugccuacagcgaccccaacgcuaauccuaacgccaauccgaacgcgaaucccaacgcuaauccuaacgccaaucccaacgccaauccuaacgcuaaucccaacgccaauccuaacgcuaacccgaaugccaaccccaaugcgaacccuaaugccaaccccaaugcuaacccuaaugccaaccccaaugcuaacccgaaugccaacccuaaugcgaaccccaacgccaauccuaacaaaaauaaccagggcaaugggcaaggacacaacaugcccaaugaucccaacagaaaugucgacgagaacgcuaaugccaacuccgcuguuaagaauaacaauaacgaggaaccuucugauaaacauauuaaggaauaucuuaacaaaauccagaauagccuguccacagaguggucuccgugcagcgugacguguggcaacgggauucaggugcggaucaagcccggauccgccaauaagccuaaagacgaacucgauuacgccaacgacauugagaagaaaaucugcaagauggagaaauguagcucuguccccgugaccaauauggaaaacaucacauccggcuuucuggggccucuucugguucuccaggcuggauucuuucugcugacccgcauucucacaaucccccaaagccuggauucuugguggaccucccuuaauuuccugggcggcagcccggugugccucgggcagaacucucaguccccuacaagcaaucacucccccaccucuuguccucccauuugcccuggauauagauggaugugucugcggcgcuuuaucauuuuccuuuuuauccugcuccugugccugauuuuccuccugguccuucuggacuaccagggcaugcuccccguguguccgcugaucccugggagcacgaccacaaacaccggacccugcaagacauguaccacgcccgcgcaaggcaauuccauguuuccuagcugcugcuguacaaagccgaccgaugggaacugcacauguauccccauuccuucuuccugggccuucgcuaaauaucuuugggagugggccagcguuagauuuucuuggcugagccuccuggugcccuucguccagugguucgugggacuguccccuaccguguggcucucugccaucuggaugaugugguacuggggccccagccuguauuccauugucagcccuuuuaucccccuucugccgauuuucuuuugccucuggguuuacaucugaggacuagucccuguucccagagcccacuuuuuuuucuuuuuuugaaauaaaauagccugucuuucagaucuaaaaaaaaaaaaaaaaaaaaaaaaaaaaaaaaaaaaaaaaaaaaaaaaaaaaaaaaaaaaaaaaugcaucccccccccccccccccccccccccccccccaaaggcucuuuucagagccaccagaauu

SEQ ID NO: 6495 - RNA, 1567 nt, Artificial Sequence
  mRNA Design a-3 (A64-N5-C30-hSL-N5) comprising derived and/or modified sequence from Pf(3D7)__XP_001351122.1__Pf-CSP (opt6)
aggagagggcgcuuggcuugcaaggacccugagcugcggcauugaagcacacccaacccaacucgacugaagucagccucacugaaccggaucugagaaucuucucucucugggcuugccagggcucuccgaaccuagcuagcauccucuucaauuccaacuagaaagcuuaccaugaugagaaaacuugcaauacuaagcguaucuucauuccuauucguagaagcacuauuccaagaauaucaaugcuauggaucaagcuccaacacaagaguacuuaacgaacuaaauuacgacaaugcaggaacaaaccuauacaaugaacuugaaaugaauuacuacggcaaacaagaaaacugguacucccuaaaaaaaaacucaaggucauuaggagaaaacgacgacggaaacaacgaagacaacgaaaaacuacgaaaacccaaacacaaaaaauuaaaacaaccagcagacggaaaccccgacccaaacgcaaacccaaacgucgacccaaacgcaaacccgaacguagacccaaacgcgaacccaaacguagacccaaacgcaaacccaaacgcaaacccaaacgcaaacccaaacgcaaacccaaaugcaaacccaaacgcaaacccaaacgccaauccaaacgccaacccaaacgcaaacccaaacgcaaacccaaacgcaaacccaaacgcaaaccccaacgcaaacccaaacgcuaacccaaacgcaaacccuaaugcaaacccuaacgcaaacccaaacgucgacccgaacgcaaacccaaaugcaaacccaaacgcaaacccaaacgcaaaccccaacgccaacccaaaugcaaacccaaaugcaaauccaaacgcaaacccaaacgcaaacccuaacgcaaacccaaacgcaaaccccaacgcaaacccaaacgcaaacccaaacgccaacccaaacgcaaaccccaaugcaaacccaaacgcaaacccaaacgcaaacccaaacaaaaacaaucaaggcaacggacaaggacacaacaugcccaacgacccaaaccgaaacgucgacgaaaacgccaacgcaaacagcgcaguaaaaaacaacaacaacgaagaacccucagacaaacacauaaaagaauacuuaaacaaaauacaaaacucacuaucuacagaauggucacccuguagcguaaccugcggcaacggaauacaaguaagaauaaaaccaggcucagcaaacaaaccaaaagaugaacuagacuacgccaaugauauagaaaaaaaaauauguaaaauggaaaaauguagcucagucuucaacguagucaacucaucaauaggacuaauaaugguacucuccuuccucuuccuaaauuaaggacuagucccuguucccagagcccacuuuuuuuucuuuuuuugaaauaaaauagccugucuuucagaucuaaaaaaaaaaaaaaaaaaaaaaaaaaaaaaaaaaaaaaaaaaaaaaaaaaaaaaaaaaaaaaaaugcaucccccccccccccccccccccccccccccccaaaggcucuuuucagagccaccagaauu

SEQ ID NO: 6496 - RNA, 1498 nt, Artificial Sequence
  mRNA Design a-3 (A64-N5-C30-hSL-N5) comprising derived and/or modified sequence from Pf(3D7)__XP_001351122.1__Pf-CSP(1-374) (opt6)
aggagagggcgcuuggcuugcaaggacccugagcugcggcauugaagcacacccaacccaacucgacugaagucagccucacugaaccggaucugagaaucuucucucucugggcuugccagggcucuccgaaccuagcuagcauccucuucaauuccaacuagaaagcuuaccaugaugagaaaacuagcaauauuaagcguaagcucauuccuauucguugaagcauuauuccaagaauaccaaugcuacggcucaagcucaaacacaagaguauuaaacgaauuaaacuacgacaaugcaggaaccaaccucuacaacgaacuagaaaugaauuauuacggcaaacaagaaaacugguacucacucaaaaaaaacucacgaucccuaggagaaaacgaugacggaaacaaugaagauaacgaaaaauuaagaaaaccaaaacacaaaaaauuaaaacaaccugcagacggaaacccagacccaaacgcaaauccaaauguagacccaaacgcaaaccccaacguagacccaaaugcaaacccaaacguagacccaaacgcaaacccaaaugcaaacccaaacgcaaacccaaacgcaaacccaaacgcaaaccccaacgcaaacccaaacgcaaacccaaacgccaaccccaacgcaaacccaaacgcaaacccgaaugcaaacccaaacgcaaacccaaacgcaaacccaaacgcaaacccaaacgcaaacccaaacgcaaacccaaaugcaaacccaaacguggauccaaacgcaaauccaaacgcaaacccaaacgcaaacccaaacgcaaaccccaacgcaaauccaaacgcaaaccccaaugcaaauccaaacgcaaacccaaacgccaacccaaacgcaaacccgaacgccaauccaaacgcaaacccaaacgcaaacccaaacgcaaacccaaacgccaacccaaacgcaaacccaaacgcaaacccaaacgcaaaccccaacaaaaacaaccaaggaaacggacaaggacacaacaugccaaacgauccaaacagaaacgucgacgaaaacgccaacgcuaacagcgcaguaaaaaacaauaacaacgaagaaccaucagacaaacauauaaaagaauacuuaaacaaaauccaaaacucacuaucaacagaauggucccccuguuccguaacaugcggaaacggaauacaaguacgaaucaaaccaggaucagccaacaaaccgaaagacgaacuagacuaugccaacgauauagaaaaaaaaauaugcaaaauggaaaaaugcugaggacuagucccuguucccagagcccacuuuuuuuucuuuuuuugaaauaaaauagccugucuuucagaucuaaaaaaaaaaaaaaaaaaaaaaaaaaaaaaaaaaaaaaaaaaaaaaaaaaaaaaaaaaaaaaaaugcaucccccccccccccccccccccccccccccccaaaggcucuuuucagagccaccagaauu

SEQ ID NO: 6497 - RNA, 1351 nt, Artificial Sequence
  mRNA Design a-3 (A64-N5-C30-hSL-N5) comprising derived and/or modified sequence from Pf(3D7)__XP_001351122.1__Pf-CSP(1-325) (opt6)
aggagagggcgcuuggcuugcaaggacccugagcugcggcauugaagcacacccaacccaacucgacugaagucagccucacugaaccggaucugagaaucuucucucucugggcuugccagggcucuccgaaccuagcuagcauccucuucaauuccaacuagaaagcuuaccaugaugcgaaaauuagcaauacuaagcguaagcucauucuuauucguagaagcacucuuccaagaauaccaaugcuacggaucaagcucaaacacaagaguccuaaacgaauuaaacuaugacaacgcaggaacaaaccuauacaacgaacuagaaaugaacuacuacggaaaacaagaaaacugguacucacucaaaaaaaacagcagaagucuaggagaaaacgacgacggaaacaacgaagacaacgaaaaacuacgaaaaccaaaacacaaaaaacuaaaacaaccagcagacgggaacccagacccaaacgcaaacccaaacguagauccaaacgcaaacccaaauguagacccuaacgcaaacccaaauguagacccaaacgcaaacccuaacgcaaacccaaaugcaaacccaaacgcaaauccaaacgcaaacccaaacgcaaacccaaacgcgaacccaaacgcaaacccaaacgcaaacccaaaugcaaaccccaacgcaaauccaaaugcaaacccaaaugcaaauccaaacgcaaacccaaacgcaaacccaaaugcaaauccaaacgcaaauccaaacguggauccaaacgcaaacccaaacgcaaacccaaacgcaaacccaaacgcaaacccaaacgcaaacccaaacgcaaauccaaacgccaauccaaacgcaaauccaaaugcaaacccaaacgcaaacccaaacgcaaacccaaacgcaaacccaaacgcaaacccaaacgcaaacccaaacgcaaacccaaacgcaaacccaaacgcaaacccaaacgcaaacccaaacaaaaacaaccaaggaaacggacaaggacacaacaugccaaacgacccaaacagaaacguagacgaaaacgccaacgcaaauagcgcagucaaaaacaacaauaacgaagaaccaucggacaaacacauaaaagaauacuuaaacaaaauacaaaacugaggacuagucccuguucccagagcccacuuuuuuuucuuuuuuugaaauaaaauagccugucuuucagaucuaaaaaaaaaaaaaaaaaaaaaaaaaaaaaaaaaaaaaaaaaaaaaaaaaaaaaaaaaaaaaaaaugcaucccccccccccccccccccccccccccccccaaaggcucuuuucagagccaccagaauu

SEQ ID NO: 6498 - RNA, 1567 nt, Artificial Sequence
  mRNA Design a-3 (A64-N5-C30-hSL-N5) comprising derived and/or modified sequence from Pf(3D7)__XP_001351122.1__HsALB_Pf-CSP(19-397) (opt6)
aggagagggcgcuuggcuugcaaggacccugagcugcggcauugaagcacacccaacccaacucgacugaagucagccucacugaaccggaucugagaaucuucucucucugggcuugccagggcucuccgaaccuagcuagcauccucuucaauuccaacuagaaagcuuaccaugaaaugggucacauuuauuucacuacuauucuuauucucaagcgcauacucacuauuucaagaauaccaaugcuacggcucauccucaaauacacgaguacuaaaugaacucaacuacgacaacgcaggaaccaaucucuacaacgaauuagaaaugaacuacuacggcaaacaagaaaacugguauucacuaaaaaaaaacaguagaucacuaggagaaaaugacgacggaaacaaugaagacaacgaaaaacuaagaaaaccaaaacacaaaaaauuaaaacaaccagcagacggaaacccagacccaaacgcaaacccuaacguagaucccaaugccaacccaaauguagacccaaacgcaaaccccaacgucgauccaaacgcaaacccaaacgcaaacccaaacgcaaacccaaacgcaaacccaaacgcaaacccaaaugcaaaccccaacgcaaacccaaacgcuaacccaaacgcaaacccaaacgcaaacccaaacgcaaacccaaacgcaaacccaaacgccaacccaaacgccaacccaaacgcaaauccaaacgcaaacccaaaugccaauccaaacguugacccaaacgcaaacccaaacgcaaaccccaacgcaaacccaaacgcaaauccaaacgcgaaccccaacgcaaacccaaacgcaaacccaaaugcaaacccaaacgcuaacccaaaugcaaacccaaacgccaacccaaacgccaacccaaacgcaaaccccaacgcaaacccaaacgcaaacccaaacgccaauccaaacgcaaacccaaaugcaaacccaaacaaaaacaaccaaggaaacggacaaggacacaacaugccaaacgaccccaacagaaacguagaugaaaaugcaaaugcuaacucagccguaaaaaacaauaacaacgaagaaccaucagacaaacacauaaaagaauaccuaaauaaaauacaaaauuccuuaucaacagaaugguccccaugcucaguaacuugcgguaacggcauacaaguaagaauaaaaccaggaucagcaaacaaaccaaaagacgaauuagacuaugcaaacgacauagaaaaaaaaauauguaaaauggaaaaaugcagcucaguauucaacguaguaaauuccucaaucggacucaucaugguauuaucauuccuauuuuuaaauuaaggacuagucccuguucccagagcccacuuuuuuuucuuuuuuugaaauaaaauagccugucuuucagaucuaaaaaaaaaaaaaaaaaaaaaaaaaaaaaaaaaaaaaaaaaaaaaaaaaaaaaaaaaaaaaaaaugcaucccccccccccccccccccccccccccccccaaaggcucuuuucagagccaccagaauu

SEQ ID NO: 6499 - RNA, 1585 nt, Artificial Sequence
  mRNA Design a-3 (A64-N5-C30-hSL-N5) comprising derived and/or modified sequence from Pf(3D7)__XP_001351122.1__HsIns-iso1_Pf-CSP(19-397) (opt6)
aggagagggcgcuuggcuugcaaggacccugagcugcggcauugaagcacacccaacccaacucgacugaagucagccucacugaaccggaucugagaaucuucucucucugggcuugccagggcucuccgaaccuagcuagcauccucuucaauuccaacuagaaagcuuaccauggcacuauggaugagacuacuaccacuacuagcacuccuagccuuauggggacccgauccagccgcagcacucuuccaagaauaccaaugcuauggaucauccuccaacacaagaguccuaaacgaauuaaauuacgacaacgcuggaacaaaccuauacaaugaacuagaaaugaauuauuacggaaaacaagaaaauugguacucacuaaaaaaaaacucuagaagccuaggagaaaacgacgacggaaacaacgaagauaacgaaaaacuaagaaaaccaaaacacaaaaaauuaaaacaacccgcagacggcaacccagacccaaaugcaaauccaaacguagacccaaacgcaaauccaaacguagacccaaacgcaaacccaaauguagacccaaacgcaaauccaaacgcaaacccaaaugcaaacccaaaugcaaacccaaacgcaaauccaaacgcaaaucccaacgccaacccaaacgcaaacccaaacgcaaauccaaacgcaaacccaaacgcaaacccaaacgcaaacccaaacgcaaacccaaaugcaaacccaaaugccaauccaaacgccaacccaaacgcaaacccaaacguagacccaaacgcaaacccaaacgccaacccaaacgcaaaccccaaugcaaacccaaacgcaaacccaaacgcaaaccccaacgcaaauccaaacgcaaacccaaacgcaaauccaaacgcaaauccaaacgccaacccaaacgcaaacccaaacgcaaauccaaacgcaaaccccaacgcaaacccaaacgccaacccaaaugcaaacccaaacgcaaaucccaauaaaaacaaccaaggaaacggacaaggacacaacaugccaaacgauccaaacagaaacguagacgaaaacgcaaacgcaaacucagcagucaaaaacaauaacaacgaagaaccaucagacaaacacauaaaagaauaccuaaacaaaauacaaaacucacuauccacagaauggucaccaugcucaguaaccugcggaaacggaauacaaguaagaauaaaaccaggaucagccaacaaaccaaaagacgaacuagacuaugcuaaugacauagaaaaaaaaauaugcaaaauggaaaaaugcuccucaguauucaacgucguaaacucuucaauaggacuaauaaugguacuauccuucuuauuucuaaacuaaggacuagucccuguucccagagcccacuuuuuuuucuuuuuuugaaauaaaauagccugucuuucagaucuaaaaaaaaaaaaaaaaaaaaaaaaaaaaaaaaaaaaaaaaaaaaaaaaaaaaaaaaaaaaaaaaugcaucccccccccccccccccccccccccccccccaaaggcucuuuucagagccaccagaauu

SEQ ID NO: 6500 - RNA, 1564 nt, Artificial Sequence
  mRNA Design a-3 (A64-N5-C30-hSL-N5) comprising derived and/or modified sequence from Pf(3D7)__XP_001351122.1__HsSPARC_Pf-CSP(19-397) (opt6)
aggagagggcgcuuggcuugcaaggacccugagcugcggcauugaagcacacccaacccaacucgacugaagucagccucacugaaccggaucugagaaucuucucucucugggcuugccagggcucuccgaaccuagcuagcauccucuucaauuccaacuagaaagcuuaccaugcgcgcauggauauucuuccuccuaugucuagcaggucgagcacuugcacucuuccaagaauaccaauguuacggauccucaagcaacacacgaguacuaaacgaacuaaacuacgauaacgcaggaaccaacuuauacaacgaacuagaaaugaacuacuacggcaaacaagaaaacugguacucacucaaaaaaaacagcagaagccuaggagaaaaugacgacggaaacaacgaagauaacgaaaaauuacgaaaacccaaacacaaaaaauuaaaacaacccgcagauggaaauccagacccgaacgcaaacccaaacguagacccaaacgcaaacccaaacguugacccaaacgcaaacccaaacguagacccaaacgcaaacccuaacgccaacccaaacgcaaacccaaacgcaaacccaaaugcgaacccaaaugcaaacccaaacgccaacccaaaugcaaaccccaacgcaaauccaaacgcaaacccaaaugcaaacccaaacgcaaacccaaacgcaaacccaaacgcaaacccaaacgccaaccccaaugcaaacccaaacgcaaacccaaacgucgacccaaacgcaaacccaaacgcaaacccaaacgcaaauccaaacgcaaauccaaacgcaaacccuaacgcaaacccaaacgcaaacccaaaugcaaauccaaacgcaaacccaaacgcaaacccaaacgcaaauccaaacgcaaacccaaacgcaaacccaaacgcaaacccuaaugcaaacccaaaugcaaauccaaacgcaaacccaaaugcaaaccccaacaaaaacaaccaaggaaacggacaaggacacaauaugccaaacgacccaaacagaaacguagacgaaaacgcaaacgccaacagcgcaguaaaaaacaacaacaacgaagaaccaucagacaaacacauaaaagaauaccuaaacaaaauacaaaacucacuaucaacagaauggucucccugcuccguaacaugcggaaacggcauacaaguacgaauaaaaccuggaucagccaacaaaccaaaagacgaacuagacuaugcaaaugacauagaaaaaaaaauaugcaaaauggaaaaaugcaguucagucuucaacguagucaacagcucaauaggccuaauaaugguacucucauuccuauucuuaaacuaaggacuagucccuguucccagagcccacuuuuuuuucuuuuuuugaaauaaaauagccugucuuucagaucuaaaaaaaaaaaaaaaaaaaaaaaaaaaaaaaaaaaaaaaaaaaaaaaaaaaaaaaaaaaaaaaaugcaucccccccccccccccccccccccccccccccaaaggcucuuuucagagccaccagaauu

SEQ ID NO: 6501 - RNA, 1567 nt, Artificial Sequence
  mRNA Design a-3 (A64-N5-C30-hSL-N5) comprising derived and/or modified sequence from Pf(3D7)__XP_001351122.1__IgE_Pf-CSP(19-397) (opt6)
aggagagggcgcuuggcuugcaaggacccugagcugcggcauugaagcacacccaacccaacucgacugaagucagccucacugaaccggaucugagaaucuucucucucugggcuugccagggcucuccgaaccuagcuagcauccucuucaauuccaacuagaaagcuuaccauggauuggacauggauucucuuccucguagcagcagccacaagaguacacucuuuauuucaagaauaccaaugcuacggaucaagcucaaacacacgcguacuaaacgaacuaaacuacgacaacgcaggaacaaacuuauacaacgaacuagaaaugaacuauuauggcaaacaagaaaacugguacucacuaaaaaaaaacuccagaagcuuaggagaaaacgacgacggaaacaacgaagacaacgaaaaacuacgcaaaccuaaacacaaaaaacuaaaacaaccugcagacggaaacccagacccaaacgcgaacccaaacguagauccaaacgcaaacccaaacguagaucccaacgcaaacccgaacguagacccuaacgcaaauccaaacgcaaaccccaacgcaaacccgaacgcaaacccaaacgcaaacccaaacgcaaacccaaacgcaaacccaaacgcaaacccaaacgccaacccaaacgcaaauccaaacgcuaacccaaaugcaaacccuaacgcaaacccaaacgccaacccaaacgcaaacccaaacgcaaacccaaacgcaaaucccaauguagacccaaacgcaaacccaaacgcaaacccaaacgcuaacccaaaugcaaacccaaacgcaaacccaaacgcaaacccaaacgcuaaccccaacgcaaacccgaacgcaaacccaaaugcaaacccaaacgcaaacccaaaugcaaacccaaacgcaaacccaaacgcaaaccccaaugccaacccaaacgcaaauccaaaugccaauccaaacgcaaacccaaacaaaaacaaccaaggaaauggacaaggacauaacaugccaaacgaccccaaccgaaauguagacgaaaacgccaacgcaaauagugcagucaaaaacaauaacaaugaagaacccucagauaaacauauaaaagaauacuuaaacaaaauacaaaacucacuaucaaccgaguggucuccuugcucaguaacauguggaaacggaauacaaguacgaauaaaaccaggaucagcaaacaaaccgaaagacgaacuagacuacgccaacgacauagaaaagaaaauauguaaaauggagaaauguaguucaguauucaacgugguaaacagcucaauaggccuaauaaugguacucucuuuccuauuccuaaacuaaggacuagucccuguucccagagcccacuuuuuuuucuuuuuuugaaauaaaauagccugucuuucagaucuaaaaaaaaaaaaaaaaaaaaaaaaaaaaaaaaaaaaaaaaaaaaaaaaaaaaaaaaaaaaaaaaugcaucccccccccccccccccccccccccccccccaaaggcucuuuucagagccaccagaauu

SEQ ID NO: 6502 - RNA, 1732 nt, Artificial Sequence
  mRNA Design a-3 (A64-N5-C30-hSL-N5) comprising derived and/or modified sequence from Pf(3D7)__XP_001351122.1__Pf-CSP_L(G4SG4)_TM domain HA (opt6)
aggagagggcgcuuggcuugcaaggacccugagcugcggcauugaagcacacccaacccaacucgacugaagucagccucacugaaccggaucugagaaucuucucucucugggcuugccagggcucuccgaaccuagcuagcauccucuucaauuccaacuagaaagcuuaccaugaugcguaaacuagcaauacuaucugucaguucauucuuauucguagaagcacuauuccaagaauaccaauguuacggaucuucaucaaacacaagaguacucaacgaauuaaacuacgauaacgcuggaaccaauuuauacaacgaacuagaaaugaacuacuauggaaaacaagaaaacugguauucacuaaaaaaaaacagcagaaguuuaggagaaaaugacgacggaaacaaugaagacaaugaaaaauuacgaaaaccaaaacacaaaaaauuaaaacaacccgccgacggaaauccagacccaaacgcaaacccaaauguagacccaaacgcaaacccaaauguagaucccaacgcaaacccaaacguagaucccaaugcaaacccaaacgcaaacccaaaugcaaaccccaacgcaaacccaaaugcaaacccuaacgcaaacccgaacgcaaacccaaacgcaaaucccaaugcaaaccccaacgcaaauccaaaugcaaacccuaacgcaaauccgaacgcaaauccaaacgcaaacccaaacgcaaacccaaacgcaaacccaaacgcaaacccaaacgucgacccaaacgccaauccaaacgcaaaccccaaugcaaacccaaaugcaaacccaaacgcaaacccaaaugccaacccaaacgcaaacccaaacgcaaacccaaacgcaaacccaaacgcaaacccaaaugcaaacccaaaugcaaacccaaacgccaacccaaacgcaaacccaaacgcaaacccaaacgccaacccaaacgcaaacccuaacgcaaauccaaacaaaaacaaccaagggaacggacaaggacacaacaugccaaacgacccaaacagaaacguagacgaaaacgccaacgcaaacucagcugucaaaaacaauaacaacgaagaacccuccgauaaacacauaaaagaauaccuaaacaaaauccaaaacucccuuucuacagaauggucacccugcucaguaacaugcggcaacggcauacaaguuagaaucaaaccaggaucagcaaauaaaccaaaagacgaauuagacuaugccaacgacauagaaaaaaaaauauguaaaauggaaaaaugcucaucaguuuucaacguaguaaacagcucaaucggauuaauaaugguacuaucauucuuauuuuuaaacggaggaggaggcuccggcggagguggaaaacuagaaucaacuagaauauaccaaauauuagcaauauacucaacaguagcaucaucacucguauuaguaguaucgcuaggagcaauaaguuucuggaugugcucuaacggaagccuacaaugccgaauaugcauauaaggacuagucccuguucccagagcccacuuuuuuuucuuuuuuugaaauaaaauagccugucuuucagaucuaaaaaaaaaaaaaaaaaaaaaaaaaaaaaaaaaaaaaaaaaaaaaaaaaaaaaaaaaaaaaaaaugcaucccccccccccccccccccccccccccccccaaaggcucuuuucagagccaccagaauu

SEQ ID NO: 6503 - RNA, 1606 nt, Artificial Sequence
  mRNA Design a-3 (A64-N5-C30-hSL-N5) comprising derived and/or modified sequence from Pf(3D7)__XP_001351122.1__Pf-CSP(199-377)_L(PVTN)_HBsAg (opt6)
aggagagggcgcuuggcuugcaaggacccugagcugcggcauugaagcacacccaacccaacucgacugaagucagccucacugaaccggaucugagaaucuucucucucugggcuugccagggcucuccgaaccuagcuagcauccucuucaauuccaacuagaaagcuuaccauggacccaaacgccaaccccaacgcaaacccaaaugcaaacccaaacgcuaaccccaacgcaaacccaaacgcuaacccuaacgcaaauccaaacgcaaaucccaacgcaaauccaaacgcaaacccaaacgcaaacccaaaugccaacccaaacgcaaacccuaacgcaaaucccaacgcaaauccaaaugcaaaccccaaugcaaacccaaacgcaaauccaaacaaaaauaaucaaggaaauggacaaggacauaacaugccaaacgacccuaaccgaaacgucgacgaaaaugcaaacgcaaacuccgcaguaaaaaacaacaacaacgaagaaccuuccgacaaacacauaaaagaauaccuaaacaaaauacaaaacucucuauccacugaauggucaccaugcucaguaaccugcggaaauggcauacaaguaagaauaaaaccaggaucugcaaauaaaccuaaagacgaacuagauuacgcaaaugacauagaaaaaaaaauaugcaaaauggaaaaaugcucaucagucccaguaacaaacauggaaaacaucacaucaggauucuuaggaccacuacucguauuacaagcaggauucuuucuuuuaacaagaauauuaacaauaccacaaucccuagacucaugguggacaucauuaaacuuccuagguggaucaccagucugccucggacaaaacucacaaucaccaacaucaaaccacucaccaacauccugcccaccaauuuguccaggauacagauggaugugccuacgaagauucauaauauucuuauuuauauuacuacuaugucucauauuuuuacucguacuauuagacuaucagggcauguuacccguauguccacuaauaccaggcucaaccaccacaaacacagguccaugcaaaaccugcaccacaccagcacaaggaaacuccauguuucccucauguugcugcaccaaacccaccgauggaaacugcaccugcauaccaaucccaucuucaugggcauucgcaaaauaucuaugggaaugggcauccguaagauuuucauggcuaucacuauuaguaccauucguacaaugguucguaggauuaucaccaacaguaugguuaucagcaauauggaugaugugguacuggggaccaucacuauacucaauaguauccccuuucauaccauuacucccaauauuuuucugccuuuggguauacauauaaggacuagucccuguucccagagcccacuuuuuuuucuuuuuuugaaauaaaauagccugucuuucagaucuaaaaaaaaaaaaaaaaaaaaaaaaaaaaaaaaaaaaaaaaaaaaaaaaaaaaaaaaaaaaaaaaugcaucccccccccccccccccccccccccccccccaaaggcucuuuucagagccaccagaauu

SEQ ID NO: 6504 - RNA, 1648 nt, Artificial Sequence
  mRNA Design a-3 (A64-N5-C30-hSL-N5) comprising derived and/or modified sequence from Pf(3D7)__XP_001351122.1__Pf-CSP(199-387)_L(PVTN)_HBsAg (opt6)
aggagagggcgcuuggcuugcaaggacccugagcugcggcauugaagcacacccaacccaacucgacugaagucagccucacugaaccggaucugagaaucuucucucucugggcuugccagggcucuccgaaccuagcuagcauccucuucaauuccaacuagaaagcuuaccaugauggcaccagauccaaacgcaaacccaaacgcaaacccaaacgcaaauccaaaugcaaacccaaacgcaaaucccaaugcaaacccuaacgcaaacccaaacgccaacccaaaugccaacccaaacgcaaacccaaacgcaaauccaaacgcaaacccaaacgcuaacccaaaugcaaaccccaacgcaaauccaaacgcaaacccaaacgcaaauccaaacgcuaacccaaacaaaaauaaccaaggaaacggacaaggacacaauaugccaaaugacccaaauagaaacguagacgaaaacgcaaacgcaaauucagcagucaaaaacaauaacaacgaagaaccauccgauaaacacauaaaagaauacuuaaacaaaauccaaaacucacuaucaacugaauggucaccuuguucaguaacauguggcaacggaauacaaguaagaauaaaaccagguucagccaacaaaccuaaagacgaacuagacuacgcaaacgacauagaaaaaaaaaucugcaaaauggaaaaaugcucaucaguauuuaauguaguaaacucaucaauaggacuaggcccuguaacaaacauggaaaacauaaccucaggauucuuaggcccacuacuaguacuccaagcaggauucuuucuucuaacaagaauauuaaccauuccucaaucauuagacucaugguggacaucccuuaacuuucuaggaggaagccccguaugcuuaggacaaaacagccaauccccaacauccaaccacuccccaacaucaugccccccaauaugcccaggauacagauggaugugccuaagaagauucaucauauuccuauuuauucucuuacucugcuuaauauucuuacucguauuacucgacuaccaaggaauguuaccaguaugcccacuaauaccaggauccacaacaacaaacacgggaccaugcaaaacaugcacaacaccugcccaaggaaauuccauguucccaucaugcugcugcacaaaaccaaccgacggcaacugcacaugcauaccaauaccaucaagcugggccuucgcaaaauaccuaugggaaugggcaucagugagauucucauggcucucauuacuagucccauucguacaaugguuuguaggauuaucaccaacaguuuggcucagcgcaauauggaugaugugguacuggggccccucuuuauauucaauaguauccccauuuauaccacuacucccaauauucuucuguuuauggguauacauauaaggacuagucccuguucccagagcccacuuuuuuuucuuuuuuugaaauaaaauagccugucuuucagaucuaaaaaaaaaaaaaaaaaaaaaaaaaaaaaaaaaaaaaaaaaaaaaaaaaaaaaaaaaaaaaaaaugcaucccccccccccccccccccccccccccccccaaaggcucuuuucagagccaccagaauu

SEQ ID NO: 6505 - RNA, 832 nt, Artificial Sequence
  mRNA Design a-3 (A64-N5-C30-hSL-N5) comprising derived and/or modified sequence from Pf(3D7)__XP_001351122.1__HsALB_Pf-CSP(19-152) (opt6)
aggagagggcgcuuggcuugcaaggacccugagcugcggcauugaagcacacccaacccaacucgacugaagucagccucacugaaccggaucugagaaucuucucucucugggcuugccagggcucuccgaaccuagcuagcauccucuucaauuccaacuagaaagcuuaccaugaaauggguaacauucauaucacuacuauuccuauucuccagcgcauacucacuauuccaagaauaccaaugcuacggaucaagcucaaacacacgaguacuaaacgaacuaaacuacgacaacgcaggaaccaaccuauacaacgaacuagaaaugaacuacuacggaaaacaagaaaacugguacucacuaaaaaaaaacagcagaucacuaggagaaaacgacgacggaaacaacgaagacaacgaaaaacuaagaaaaccaaaacacaaaaaacuaaaacaacccgcagacggaaacccagacccaaacgcaaacccaaacguagacccaaaugcaaacccaaacguagacccaaacgcaaacccaaacguagacccaaacgcaaacccaaacgcaaacccaaacgcaaacccaaacgcaaacccaaacgcaaacccaaacgcaaacccauaaggacuagucccuguucccagagcccacuuuuuuuucuuuuuuugaaauaaaauagccugucuuucagaucuaaaaaaaaaaaaaaaaaaaaaaaaaaaaaaaaaaaaaaaaaaaaaaaaaaaaaaaaaaaaaaaaugcaucccccccccccccccccccccccccccccccaaaggcucuuuucagagccaccagaauu

SEQ ID NO: 6506 - RNA, 952 nt, Artificial Sequence
  mRNA Design a-3 (A64-N5-C30-hSL-N5) comprising derived and/or modified sequence from Pf(3D7)__XP_001351122.1__HsALB_Pf-CSP(19-192) (opt6)
aggagagggcgcuuggcuugcaaggacccugagcugcggcauugaagcacacccaacccaacucgacugaagucagccucacugaaccggaucugagaaucuucucucucugggcuugccagggcucuccgaaccuagcuagcauccucuucaauuccaacuagaaagcuuaccaugaaauggguaacauucaucucacuacuauucuuauucucaucagcauacucacuauuccaagaauaccaaugcuacggaucaucaucaaacacacgaguacucaacgaacuaaacuacgacaacgcaggaacaaaccuauacaacgaacuagaaaugaacuacuacggaaaacaagaaaacugguauucacuaaaaaaaaacucaagaucacuaggagaaaacgacgacggaaacaacgaagacaacgaaaaacuaagaaaaccaaaacacaaaaaacuaaaacaaccagcagacggaaacccagacccaaacgcaaacccaaacguagacccaaacgccaacccaaacguagacccaaacgcaaacccaaacguagacccaaacgcaaacccaaacgcaaacccaaacgcaaacccaaacgcaaacccaaacgcaaacccaaacgcaaacccaaacgcaaacccaaacgcaaacccaaacgcaaacccaaacgcaaacccaaacgcaaacccaaacgcaaauccaaacgcaaacccaaacgcaaacccaaacgcaaacccaaacgcaaaccccuaaggacuagucccuguucccagagcccacuuuuuuuucuuuuuuugaaauaaaauagccugucuuucagaucuaaaaaaaaaaaaaaaaaaaaaaaaaaaaaaaaaaaaaaaaaaaaaaaaaaaaaaaaaaaaaaaaugcaucccccccccccccccccccccccccccccccaaaggcucuuuucagagccaccagaauu

SEQ ID NO: 6507 - RNA, 1192 nt, Artificial Sequence
  mRNA Design a-3 (A64-N5-C30-hSL-N5) comprising derived and/or modified sequence from Pf(3D7)__XP_001351122.1__HsALB_Pf-CSP(19-272) (opt6)
aggagagggcgcuuggcuugcaaggacccugagcugcggcauugaagcacacccaacccaacucgacugaagucagccucacugaaccggaucugagaaucuucucucucugggcuugccagggcucuccgaaccuagcuagcauccucuucaauuccaacuagaaagcuuaccaugaaauggguaacauucauaucacuacuauuccuauucucaagcgcauauucacuauuccaagaauaccaaugcuacggaucaagcucaaacacaagaguacuuaacgaacuaaacuacgacaacgcaggaacaaaccuauacaacgaacuugaaaugaacuacuacggaaaacaagaaaacugguacucacuaaaaaaaaauagcagaagcuuaggagaaaacgacgacggaaacaacgaagacaacgaaaaauuaagaaaaccuaaacacaaaaaacuaaaacaacccgcagacggaaacccagacccuaacgccaacccaaauguagacccaaacgcaaacccaaacguagacccaaacgcaaaccccaacguagacccaaacgcaaacccaaacgcaaacccaaacgcaaacccaaacgcaaaccccaacgcaaacccaaacgcaaacccaaacgcaaacccaaacgcaaacccaaacgcaaacccaaacgcaaacccaaacgcaaacccaaacgcaaacccaaacgcgaacccaaacgcaaacccaaacgcaaacccaaacgcaaacccaaacgcaaacccaaacguagacccaaaugcaaaccccaacgcaaacccaaacgcaaacccaaaugcaaaccccaacgcaaacccaaacgcaaacccaaacgcaaacccaaacgcaaacccaaaugcaaacccaaacgcaaacccaaacgccaacccaaacgcaaacccaaacgcaaacccaaacgcaaacccaaacgcaaacccgaacgcaaacccaaacgcaaacccaaacgcaaacccauaaggacuagucccuguucccagagcccacuuuuuuuucuuuuuuugaaauaaaauagccugucuuucagaucuaaaaaaaaaaaaaaaaaaaaaaaaaaaaaaaaaaaaaaaaaaaaaaaaaaaaaaaaaaaaaaaaugcaucccccccccccccccccccccccccccccccaaaggcucuuuucagagccaccagaauu

SEQ ID NO: 6508 - RNA, 1354 nt, Artificial Sequence
  mRNA Design a-3 (A64-N5-C30-hSL-N5) comprising derived and/or modified sequence from Pf(3D7)__XP_001351122.1__HsALB_Pf-CSP(19-272)_L(AAY)_Pf-CSP(310-3 27)_L(AAY)_Pf-CSP(346-375) (opt6)
aggagagggcgcuuggcuugcaaggacccugagcugcggcauugaagcacacccaacccaacucgacugaagucagccucacugaaccggaucugagaaucuucucucucugggcuugccagggcucuccgaaccuagcuagcauccucuucaauuccaacuagaaagcuuaccaugaaauggguaacauuuauaucacuccuauuccuuuuuucgucagcauacucacuauuccaagaauaucaaugcuacggaucaagcuccaacacaagaguacuaaacgaacuaaacuacgacaacgcaggaacaaaccuauacaacgaacuagaaaugaacuacuacggaaaacaagaaaacugguacucacuaaaaaaaaacagccgaagcuuaggagaaaaugacgacggaaacaacgaagacaacgaaaaauuacgcaaacccaaacacaaaaaacugaaacaaccagcagacggaaacccagacccaaacgcaaacccaaacguagacccaaacgcaaacccaaacguagacccaaacgcaaacccaaacguagacccaaacgcaaacccaaacgcgaacccaaacgccaacccaaacgcaaacccaaacgcaaacccaaacgcaaacccaaacgcaaacccaaacgcaaacccaaacgccaacccgaacgcaaacccaaacgcaaacccaaacgcaaauccaaacgcaaacccaaacgcaaacccaaacgccaacccaaacgcaaacccaaacgcaaacccaaauguggacccaaacgcaaacccaaacgcaaacccaaacgcaaacccaaaugcaaacccaaacgcaaacccaaacgcaaacccaaacgcaaacccaaacgcaaacccaaaugcaaacccaaacgcaaauccaaacgcaaacccaaacgcaaacccaaacgcaaacccaaacgcaaacccuaacgcaaacccaaacgcaaacccaaacgccaaccccaaugcaaacccagcagcauacgaaccaucagacaaacacauaaaagaauaccuaaacaaaauacaaaacucacucgcagcauauauaaagccaggaagcgccaacaaaccaaaagacgaacuagauuacgcaaacgacauagaaaaaaaaaucuguaaaauggaaaaaugcucauaaggacuagucccuguucccagagcccacuuuuuuuucuuuuuuugaaauaaaauagccugucuuucagaucuaaaaaaaaaaaaaaaaaaaaaaaaaaaaaaaaaaaaaaaaaaaaaaaaaaaaaaaaaaaaaaaaugcaucccccccccccccccccccccccccccccccaaaggcucuuuucagagccaccagaauu

SEQ ID NO: 6509 - RNA, 1315 nt, Artificial Sequence
  mRNA Design a-3 (A64-N5-C30-hSL-N5) comprising derived and/or modified sequence from Pf(3D7)__XP_001351122.1__HsALB_Pf-CSP(19-272)_L(AAY)_Pf-CSP(346-3 65)_L(AAY)_P2 (opt6)
aggagagggcgcuuggcuugcaaggacccugagcugcggcauugaagcacacccaacccaacucgacugaagucagccucacugaaccggaucugagaaucuucucucucugggcuugccagggcucuccgaaccuagcuagcauccucuucaauuccaacuagaaagcuuaccaugaaauggguaacauucauaucacuauuauuccuuuucucaucagcuuacucacuauuccaagaauaccaaugcuacggaucauccucaaacacaagaguacuaaacgaacuaaacuacgacaacgccggaaccaaccuauacaacgaacucgaaaugaacuacuacggaaaacaagaaaacugguacucacuaaaaaaaaacagccgaucccuaggagaaaacgacgacggaaauaacgaagacaaugaaaaauuaagaaaaccaaaacacaaaaaacuaaaacaaccagcagacggaaacccagacccaaacgcaaacccaaacguagauccaaacgcaaacccaaacguagacccaaacgcaaacccaaacguagacccaaacgcuaacccaaacgcaaacccaaacgcaaacccaaacgcaaacccaaacgcaaacccaaacgcaaacccgaacgcaaaccccaacgcaaacccaaacgcaaacccaaacgcaaaccccaacgcaaacccaaacgcaaacccgaacgcaaacccaaacgcaaacccaaacgcaaacccaaacgcaaacccaaacgcaaacccaaacguagacccaaacgccaacccaaacgcaaacccaaacgcaaacccaaacgcaaacccaaacgcaaacccaaacgcaaacccaaacgcaaacccaaacgcaaacccaaacgcaaacccaaacgcaaaccccaacgcaaacccaaaugcaaacccaaacgcaaacccaaaugcaaaccccaacgcaaacccaaaugccaauccaaacgcaaacccaaacgcaaacccagccgcauacauaaaaccaggauccgcaaacaaaccaaaagacgaacuagacuacgcaaacgacauagaagcagcauaccaauauauaaaagccaacuccaaauucauagguauaacagaacucuaaggacuagucccuguucccagagcccacuuuuuuuucuuuuuuugaaauaaaauagccugucuuucagaucuaaaaaaaaaaaaaaaaaaaaaaaaaaaaaaaaaaaaaaaaaaaaaaaaaaaaaaaaaaaaaaaaugcaucccccccccccccccccccccccccccccccaaaggcucuuuucagagccaccagaauu

SEQ ID NO: 6510 - RNA, 1309 nt, Artificial Sequence
  mRNA Design a-3 (A64-N5-C30-hSL-N5) comprising derived and/or modified sequence from Pf(3D7)__XP_001351122.1__HsALB_Pf-CSP(19-272)_L(AAY)_Pf-CSP(346-3 65)_L(AAY)_PADRE (opt6)
aggagagggcgcuuggcuugcaaggacccugagcugcggcauugaagcacacccaacccaacucgacugaagucagccucacugaaccggaucugagaaucuucucucucugggcuugccagggcucuccgaaccuagcuagcauccucuucaauuccaacuagaaagcuuaccaugaaauggguaaccuucauaucacuacuauucuuauucucaucagcauacucacucuuccaagaauaccaaugcuacggcucaagcucaaacacaagaguacuaaacgaauuaaacuaugacaacgccggaacaaaccuauacaaugaauuagaaaugaacuacuacggcaaacaagaaaacugguacucacucaaaaaaaacuccagaaguuuaggagaaaaugacgacggaaacaaugaagacaaugaaaaauuacgaaaaccaaaacacaaaaaacuaaaacaacccgccgacggaaaccccgacccgaacgcaaacccaaacguagacccaaacgcaaacccaaacguagacccaaaugcaaacccaaacguagacccaaacgcaaacccaaacgcaaacccaaacgcaaauccaaacgcaaacccaaaugcaaacccaaaugcaaauccaaacgcaaaccccaacgcaaacccaaacgcaaacccaaaugcaaauccaaacgccaacccaaaugcaaacccaaacgcaaauccaaacgcaaacccaaacgcaaauccaaacgcaaacccaaaugcaaacccaaacguagauccaaacgcaaacccaaacgccaacccaaacgcaaacccgaacgcaaacccaaacgcaaacccaaacgccaacccaaacgccaacccaaacgccaacccaaacgcaaacccaaacgcaaacccaaacgcaaacccaaacgcaaacccaaaugcaaacccuaacgcaaacccaaacgcaaacccaaacgcaaacccaaacgccaacccaaacgcaaauccagcagcauacauaaaaccaggaucagcaaacaaaccaaaagaugaacuagacuacgcaaaugacaucgaagcagccuacgcuaaauucguagcagccuggacacuaaaagcagcagccuaaggacuagucccuguucccagagcccacuuuuuuuucuuuuuuugaaauaaaauagccugucuuucagaucuaaaaaaaaaaaaaaaaaaaaaaaaaaaaaaaaaaaaaaaaaaaaaaaaaaaaaaaaaaaaaaaaugcaucccccccccccccccccccccccccccccccaaaggcucuuuucagagccaccagaauu

SEQ ID NO: 6511 - RNA, 1366 nt, Artificial Sequence
  mRNA Design a-3 (A64-N5-C30-hSL-N5) comprising derived and/or modified sequence from Pf(3D7)__XP_001351122.1__HsALB_Pf-CSP(19-272)_L(G4S)_Pf-CSP(310-3 27)_L(G4S)_Pf-CSP(346-375) (opt6)
aggagagggcgcuuggcuugcaaggacccugagcugcggcauugaagcacacccaacccaacucgacugaagucagccucacugaaccggaucugagaaucuucucucucugggcuugccagggcucuccgaaccuagcuagcauccucuucaauuccaacuagaaagcuuaccaugaaauggguaaccuucaucucacuacuauuccuauucucaagcgcauacucacucuuucaagaauaccaaugcuacggcucaagcucaaacacacgaguacuaaacgaacuaaacuacgacaacgcaggaacaaaccuauauaacgaacucgaaaugaacuacuacggcaaacaagaaaauugguacucacuaaaaaaaaacagcagaagcuuaggagaaaacgacgacggaaacaacgaagauaacgaaaaacuaagaaaaccaaaacacaaaaaacuaaaacaacccgcagacggaaacccagacccaaacgcaaauccaaauguagacccgaacgcaaacccaaacguagacccaaaugcgaacccaaacgucgacccaaacgcaaacccaaaugcaaacccaaaugcgaacccaaacgcaaacccaaacgcaaauccaaacgcaaauccaaaugcaaacccaaacgcgaauccaaacgcaaacccaaacgcaaacccaaacgcaaacccaaacgcaaacccaaacgcaaacccaaacgcaaacccgaacgcuaacccaaacgcaaacccaaacgcaaacccaaacguagauccaaacgcgaacccaaacgcaaacccaaaugcaaacccaaacgcaaacccaaacgcaaacccaaacgcaaacccaaacgcaaacccaaacgcaaacccaaacgcgaacccaaacgcaaauccaaaugcaaacccaaacgcaaacccaaacgcaaacccaaacgcaaacccaaaugcaaacccaaacgcaaacccaaaugcaaacccaaacgcaaacccaggaggaggaggaucagaacccucagacaaacacauaaaagaauaccuaaacaaaauacaaaacucacuaggaggaggaggaucgaucaaaccaggaagcgcaaacaaaccaaaagacgaacucgacuacgcaaacgauauagaaaaaaaaauaugcaaaauggaaaaaugcucguaaggacuagucccuguucccagagcccacuuuuuuuucuuuuuuugaaauaaaauagccugucuuucagaucuaaaaaaaaaaaaaaaaaaaaaaaaaaaaaaaaaaaaaaaaaaaaaaaaaaaaaaaaaaaaaaaaugcaucccccccccccccccccccccccccccccccaaaggcucuuuucagagccaccagaauu

SEQ ID NO: 6512 - RNA, 1351 nt, Artificial Sequence
  mRNA Design a-3 (A64-N5-C30-hSL-N5) comprising derived and/or modified sequence from Pf(3D7)__XP_001351122.1__HsALB_Pf-CSP(19-272)_L(G4S)_Pf-CSP(310-3 27)_Pf-CSP(346-375) (opt6)
aggagagggcgcuuggcuugcaaggacccugagcugcggcauugaagcacacccaacccaacucgacugaagucagccucacugaaccggaucugagaaucuucucucucugggcuugccagggcucuccgaaccuagcuagcauccucuucaauuccaacuagaaagcuuaccaugaaauggguaacauucauaucacuccuauuccuauucuccucagcauacucccucuuccaagaauaccaaugcuacggcucaagcucaaacacacgaguacuaaacgaacuaaauuacgacaacgccggaacaaaccuauauaaugaacuagaaaugaauuacuacggaaaacaagaaaacugguacucacuuaaaaaaaacucaagaucauuaggagaaaacgacgacggcaacaacgaagacaacgaaaaacuaagaaaaccaaaacacaaaaaacuaaaacaacccgcagacggaaauccagauccaaacgcaaacccaaacguagacccaaacgcaaacccaaacguagacccaaacgcaaacccaaacgucgacccaaacgccaacccaaacgcaaacccaaacgcaaacccaaacgcaaacccaaacgccaacccaaacgcaaacccaaacgcaaacccaaacgcaaacccaaacgcaaacccaaacgcaaacccaaacgcaaacccgaacgcaaacccaaacgcaaauccuaacgcaaacccaaacgcaaacccaaacgcaaauccgaacgcaaacccaaacguagacccaaacgcaaacccaaacgcaaacccaaacgcaaacccaaacgcaaacccaaacgcaaacccuaacgcaaacccaaaugcaaacccaaacgcgaacccaaaugcaaacccaaaugcaaacccaaacgcaaacccaaacgcaaacccaaacgcaaauccaaacgcaaauccaaacgcaaacccaaacgcaaacccaaacgcaaacccaaacgccaacccaggaggagguggaagcgaaccauccgacaaacacauaaaagaauaccuaaacaaaauacaaaacucacuaauaaaacccggcucagcaaacaaaccaaaagacgaacuagacuacgccaacgacauagaaaaaaaaauauguaaaauggaaaaaugcucauaaggacuagucccuguucccagagcccacuuuuuuuucuuuuuuugaaauaaaauagccugucuuucagaucuaaaaaaaaaaaaaaaaaaaaaaaaaaaaaaaaaaaaaaaaaaaaaaaaaaaaaaaaaaaaaaaaugcaucccccccccccccccccccccccccccccccaaaggcucuuuucagagccaccagaauu

SEQ ID NO: 6513 - RNA, 1351 nt, Artificial Sequence
  mRNA Design a-3 (A64-N5-C30-hSL-N5) comprising derived and/or modified sequence from Pf(3D7)__XP_001351122.1__HsALB_Pf-CSP(19-325) (opt6)
aggagagggcgcuuggcuugcaaggacccugagcugcggcauugaagcacacccaacccaacucgacugaagucagccucacugaaccggaucugagaaucuucucucucugggcuugccagggcucuccgaaccuagcuagcauccucuucaauuccaacuagaaagcuuaccaugaaauggguaacauucauaucacuccuauuccuauucucaagcgcauacucauuauuccaagaauaccaaugcuacggaucaucaucuaacacaagaguacucaacgaacuaaacuacgacaacgcaggaacuaaucucuacaacgaacuagaaaugaacuacuacggaaaacaagaaaacugguauucacuaaaaaaaaacagccgaucauuaggagaaaacgacgacggcaacaacgaagacaacgaaaaacuacgaaaaccaaaacacaaaaaauuaaaacagccagccgacggaaacccagacccaaacgcaaacccaaacguagacccaaacgcaaacccaaacguagacccaaacgcaaacccaaacguagacccaaacgcaaacccaaacgcaaacccaaacgcaaauccaaacgcaaacccaaacgccaacccaaacgcaaacccaaacgcaaaccccaacgcaaacccaaacgcaaacccaaacgcaaacccaaaugccaacccaaacgcaaacccaaacgcaaacccaaacgcaaacccaaacgcaaacccaaaugcaaacccaaacgcaaacccaaacguagacccaaacgcaaacccaaaugcaaacccaaacgcaaaccccaacgcaaacccaaacgcaaacccaaacgcaaacccaaacgcaaacccaaacgccaacccaaacgcaaacccaaacgcaaacccaaacgcaaacccaaacgcaaacccaaacgcaaauccaaacgcaaacccaaacgcaaacccaaacgcaaacccaaacgcaaacccaaacgcaaacccaaauaaaaacaaucaaggaaacggacaaggacacaacaugccaaacgauccaaaucgcaacguagacgaaaacgcaaacgcaaacagcgcagucaaaaacaacaacaacgaagaaccaucagacaaacacauaaaagaauaccuaaauaaaauacaaaacuagggacuagucccuguucccagagcccacuuuuuuuucuuuuuuugaaauaaaauagccugucuuucagaucuaaaaaaaaaaaaaaaaaaaaaaaaaaaaaaaaaaaaaaaaaaaaaaaaaaaaaaaaaaaaaaaaugcaucccccccccccccccccccccccccccccccaaaggcucuuuucagagccaccagaauu

SEQ ID NO: 6514 - RNA, 1528 nt, Artificial Sequence
  mRNA Design a-3 (A64-N5-C30-hSL-N5) comprising derived and/or modified sequence from Pf(3D7)__XP_001351122.1__HsALB_Pf-CSP(19-384) (opt6)
aggagagggcgcuuggcuugcaaggacccugagcugcggcauugaagcacacccaacccaacucgacugaagucagccucacugaaccggaucugagaaucuucucucucugggcuugccagggcucuccgaaccuagcuagcauccucuucaauuccaacuagaaagcuuaccaugaaauggguaaccuuuauaucacucuuauuccuauuuucaucagcauacucacucuuccaagaauaucaaugcuacggaucaucaucaaacacaagaguccucaaugaauuaaacuaugacaaugcaggaaccaaccuauacaacgaauuagaaaugaacuacuacggcaaacaagaaaacugguacucacucaaaaaaaacucaagauccuuaggagaaaaugaugacggaaacaacgaagacaacgaaaaacuccgaaaaccaaaacacaaaaaacuaaaacaacccgccgacggaaacccagaccccaacgcaaacccaaauguagaccccaacgcaaacccaaacguagacccaaacgcaaacccaaacguagacccaaacgcaaauccaaacgccaacccaaacgcaaacccaaacgccaacccaaacgcaaacccaaacgcaaacccaaacgcaaacccaaacgcaaacccaaaugcaaacccaaaugcaaacccaaacgcaaacccaaacgcaaacccaaacgcaaacccaaacgcaaacccaaaugcaaacccaaacgcaaacccaaacgcaaacccaaacguagacccaaaugcaaacccaaacgcaaacccaaacgcaaauccaaaugcaaauccaaacgcaaauccaaacgcaaacccaaacgcaaacccaaacgcaaacccaaacgcaaauccaaaugcaaacccaaacgcaaacccaaacgcaaacccaaacgcuaacccaaacgccaauccaaacgcaaacccaaacgcaaacccuaaugcaaacccaaacgccaacccaaauaaaaauaaccaaggaaacggacaaggacacaacaugccaaacgacccaaacagaaacgucgaugaaaacgcaaacgcaaauuccgcagucaaaaacaacaacaacgaagaaccaucagacaaacacauaaaagaauaccucaacaaaauacaaaacucccuaucaacagaauggucacccugcuccguuacaugcgguaacggcauacaaguaagaauaaaaccaggaucagcuaacaaacccaaagacgaacuagacuacgccaacgacauagaaaaaaaaauaugcaaaauggaaaaaugcuccucaguauucaacguaguaaacucaucauaaggacuagucccuguucccagagcccacuuuuuuuucuuuuuuugaaauaaaauagccugucuuucagaucuaaaaaaaaaaaaaaaaaaaaaaaaaaaaaaaaaaaaaaaaaaaaaaaaaaaaaaaaaaaaaaaaugcaucccccccccccccccccccccccccccccccaaaggcucuuuucagagccaccagaauu

SEQ ID NO: 6515 - RNA, 1666 nt, Artificial Sequence
  mRNA Design a-3 (A64-N5-C30-hSL-N5) comprising derived and/or modified sequence from Pf(3D7)__XP_001351122.1__HsALB_Pf-CSP(19-384)_TM domain HA (opt6)
aggagagggcgcuuggcuugcaaggacccugagcugcggcauugaagcacacccaacccaacucgacugaagucagccucacugaaccggaucugagaaucuucucucucugggcuugccagggcucuccgaaccuagcuagcauccucuucaauuccaacuagaaagcuuaccaugaaauggguaacauuuauaucacuacuuuuccuauucucaucagcauacucacucuuccaagaauaucaaugcuauggauccucaucaaacacaagaguacucaacgaauuaaacuacgauaaugccggaacaaaccuauauaacgaacuagaaaugaacuacuacggaaaacaagaaaauugguacucauuaaaaaaaaacuccagaucccuuggagaaaacgacgauggaaacaacgaagauaacgaaaaauuaagaaaaccaaaacacaaaaaauugaaacaaccagcagacgguaacccagacccaaacgccaacccaaacguagacccaaacgcgaauccaaacgucgacccaaacgcaaaucccaacguagacccaaaugcaaauccaaaugccaauccaaacgcaaacccaaacgcaaacccaaaugcaaacccaaacgccaacccaaacgcaaauccaaacgcaaacccaaacgcaaacccaaacgccaacccaaacgccaaccccaaugcaaacccaaaugcaaacccaaacgcaaacccaaacgcaaauccaaacgcaaacccaaacgccaacccaaacguagacccaaacgcaaauccaaacgcaaacccaaacgccaauccaaacgcaaacccaaacgccaacccaaaugcaaaucccaacgcaaacccaaacgcaaauccaaaugcaaaccccaacgcaaauccaaacgcaaacccaaacgcaaauccaaacgcaaauccaaaugcaaacccaaacgcaaacccuaaugcaaacccaaacgcaaacccaaacgccaacccaaacaaaaacaaccaaggaaacggacaaggucacaauaugccaaaugacccaaaccgaaacguagacgaaaacgcaaaugccaauagcgcaguaaaaaacaauaacaacgaagaaccuucagauaaacacauaaaagaauaccuaaacaaaauacaaaacucccuaucaacagaauggucaccuuguucagucacauguggaaacggaauacaaguaagaauaaaaccaggaucagcaaacaaaccaaaagacgaacuagauuacgcaaacgauauagaaaaaaaaauauguaaaauggaaaaaugcuccucagucuucaacguagucaacaguuccaaacuagaaucaaccagaaucuaccaaauacuagcaauauauuccacaguagcaagcucacucguauuaguagucucccuaggagcaauaucauucuggaugugcucaaacggaagcuuacaaugccgaauauguauauaaggacuagucccuguucccagagcccacuuuuuuuucuuuuuuugaaauaaaauagccugucuuucagaucuaaaaaaaaaaaaaaaaaaaaaaaaaaaaaaaaaaaaaaaaaaaaaaaaaaaaaaaaaaaaaaaaugcaucccccccccccccccccccccccccccccccaaaggcucuuuucagagccaccagaauu

SEQ ID NO: 6516 - RNA, 1378 nt, Artificial Sequence
  mRNA Design a-3 (A64-N5-C30-hSL-N5) comprising derived and/or modified sequence from Pf(3D7)__XP_001351122.1__HsALB_Pf-CSP(82-397) (opt6)
aggagagggcgcuuggcuugcaaggacccugagcugcggcauugaagcacacccaacccaacucgacugaagucagccucacugaaccggaucugagaaucuucucucucugggcuugccagggcucuccgaaccuagcuagcauccucuucaauuccaacuagaaagcuuaccaugaaauggguaacauucauaucacuacuauuccucuucaguucagccuauagcgauaacgaaaaacuaagaaaaccaaaacacaaaaaacucaaacaaccagcagacggaaacccagacccaaacgcaaacccaaacguagacccaaacgcaaacccaaacguagacccaaacgcaaauccaaacguagacccaaaugcaaaccccaacgcaaacccaaacgcaaacccaaacgcaaacccaaacgcaaacccaaaugcgaacccaaaugcaaauccaaacgcaaacccaaacgcaaacccaaacgcaaacccaaacgcuaacccaaacgcaaacccaaacgcaaacccaaaugcaaacccaaacgcaaacccaaacgcaaaccccaacgcaaacccaaacguagacccaaacgcaaacccaaacgcaaacccaaacgcaaacccaaacgccaacccaaaugccaacccaaacgcaaacccaaaugcaaaccccaacgcaaacccaaacgccaacccaaacgcaaacccaaacgcaaacccaaacgcaaaccccaaugcaaacccaaacgcaaacccaaaugcaaauccaaacgcaaacccaaacgcaaacccaaacgcaaacccaaacaaaaacaaccaaggaaacggacaaggacacaacaugccaaacgacccaaaucgaaacgucgaugaaaacgccaacgcaaacucagcaguaaaaaacaacaacaacgaagaaccaucugacaaacacauaaaagaauaccuaaacaaaauacaaaacucauuauccaccgaauggucaccauguucaguaacaugcggcaacggaauacaagucagaauaaaaccaggcucagcaaauaaaccaaaagacgaacuagacuacgcaaacgacauagaaaaaaaaauaugcaaaauggaaaaauguucaucagucuucaacguaguaaacucaucaauaggacucauaaugguacuaucauuccuauucuuaaacuaaggacuagucccuguucccagagcccacuuuuuuuucuuuuuuugaaauaaaauagccugucuuucagaucuaaaaaaaaaaaaaaaaaaaaaaaaaaaaaaaaaaaaaaaaaaaaaaaaaaaaaaaaaaaaaaaaugcaucccccccccccccccccccccccccccccccaaaggcucuuuucagagccaccagaauu

SEQ ID NO: 6517 - RNA, 730 nt, Artificial Sequence
  mRNA Design a-3 (A64-N5-C30-hSL-N5) comprising derived and/or modified sequence from Pf(3D7)__XP_001351122.1__HsALB_Pf-CSP(93-192) (opt6)
aggagagggcgcuuggcuugcaaggacccugagcugcggcauugaagcacacccaacccaacucgacugaagucagccucacugaaccggaucugagaaucuucucucucugggcuugccagggcucuccgaaccuagcuagcauccucuucaauuccaacuagaaagcuuaccaugaaauggguaacauucaucucacuacuauuccuauucucaagcgcauacucaaaacuaaaacaaccagcagacggaaacccagacccaaacgcaaacccaaacguagacccaaacgcaaacccaaacguagacccaaacgcaaacccaaacguagacccaaacgcaaacccaaacgcaaacccaaacgcaaacccaaacgcaaacccaaacgcaaacccaaacgcaaacccaaacgcaaacccaaacgcaaacccaaacgcaaacccaaacgcaaacccaaacgcaaacccaaacgcaaacccaaacgcaaacccaaacgcaaacccaaacgcaaacccaaacgcaaacccauaaggacuagucccuguucccagagcccacuuuuuuuucuuuuuuugaaauaaaauagccugucuuucagaucuaaaaaaaaaaaaaaaaaaaaaaaaaaaaaaaaaaaaaaaaaaaaaaaaaaaaaaaaaaaaaaaaugcaucccccccccccccccccccccccccccccccaaaggcucuuuucagagccaccagaauu

SEQ ID NO: 6518 - RNA, 970 nt, Artificial Sequence
  mRNA Design a-3 (A64-N5-C30-hSL-N5) comprising derived and/or modified sequence from Pf(3D7)__XP_001351122.1__HsALB_Pf-CSP(93-272) (opt6)
aggagagggcgcuuggcuugcaaggacccugagcugcggcauugaagcacacccaacccaacucgacugaagucagccucacugaaccggaucugagaaucuucucucucugggcuugccagggcucuccgaaccuagcuagcauccucuucaauuccaacuagaaagcuuaccaugaaaugggucacauucauaucacuccuauuccuauucucaagcgcauacucaaaacuaaaacaaccagcagacggaaacccagacccaaacgcaaacccaaacguagacccaaacgcaaacccaaacguagacccaaacgcaaacccaaacguagacccaaacgcaaacccaaacgcaaacccaaacgccaacccaaacgcaaacccaaacgcaaacccaaacgcaaacccaaacgcaaacccaaacgcaaacccaaacgcaaacccaaacgcaaacccaaacgcaaacccaaacgcaaacccaaacgcaaauccaaacgcaaacccaaacgccaacccaaacgcaaacccaaacgcaaacccaaacguagacccaaacgcaaacccaaacgcaaacccaaacgcaaacccaaacgcaaacccaaacgcaaacccaaacgcaaacccaaacgcaaacccaaacgcaaacccaaacgcaaauccaaacgcaaacccaaacgcaaacccaaacgcaaacccaaacgcaaacccaaacgcaaacccaaacgcaaacccaaacgcaaacccaaacgcaaacccaaacgcaaacccauaaggacuagucccuguucccagagcccacuuuuuuuucuuuuuuugaaauaaaauagccugucuuucagaucuaaaaaaaaaaaaaaaaaaaaaaaaaaaaaaaaaaaaaaaaaaaaaaaaaaaaaaaaaaaaaaaaugcaucccccccccccccccccccccccccccccccaaaggcucuuuucagagccaccagaauu

SEQ ID NO: 6519 - RNA, 1345 nt, Artificial Sequence
  mRNA Design a-3 (A64-N5-C30-hSL-N5) comprising derived and/or modified sequence from Pf(3D7)__XP_001351122.1__HsALB_Pf-CSP(93-397) (opt6)
aggagagggcgcuuggcuugcaaggacccugagcugcggcauugaagcacacccaacccaacucgacugaagucagccucacugaaccggaucugagaaucuucucucucugggcuugccagggcucuccgaaccuagcuagcauccucuucaauuccaacuagaaagcuuaccaugaaauggguaacauucauaucacuccuauuccuauucucaucagcauacucaaaacuaaaacaacccgcagacggaaacccagacccaaacgccaacccaaacguagacccaaacgcaaacccgaacguagacccaaacgcaaaccccaacguagacccaaacgcaaacccaaaugcaaacccaaacgcaaacccaaacgcaaacccaaacgcaaacccaaacgcaaacccaaacgcaaacccaaacgcaaacccaaacgcaaacccaaacgcgaaucccaacgcaaauccaaacgcaaacccaaacgcaaauccaaacgcaaacccgaacgcaaacccaaacgcaaacccaaacgcaaacccaaacguagauccaaacgcaaauccaaacgcaaacccaaacgcaaauccaaacgcaaacccaaacgcaaacccaaacgcaaaccccaacgcaaacccaaacgcaaacccaaacgcaaacccaaacgcaaauccaaacgccaacccaaacgcaaacccaaacgcaaacccaaacgcgaacccaaacgcgaacccaaacgcaaacccaaacgcaaacccaaacgcaaacccaaacaaaaacaaccaagggaacggacaaggacacaacaugccaaacgauccaaacagaaacguagacgaaaacgcaaacgcaaacucagcaguaaaaaacaacaacaacgaagaaccaucagacaaacacauaaaagaauaccuaaacaaaauacaaaacucacucucaacagaauggucaccaugcaguguaacaugcggaaauggaauacaaguacguauaaaaccaggaucagcaaacaaaccaaaagacgaauuagacuacgccaacgauauagaaaaaaaaauaugcaaaauggaaaaaugcagcucagucuucaacguagucaacagcucaauaggacuaauaaugguccucucauucuuauuucuaaacugaggacuagucccuguucccagagcccacuuuuuuuucuuuuuuugaaauaaaauagccugucuuucagaucuaaaaaaaaaaaaaaaaaaaaaaaaaaaaaaaaaaaaaaaaaaaaaaaaaaaaaaaaaaaaaaaaugcaucccccccccccccccccccccccccccccccaaaggcucuuuucagagccaccagaauu

SEQ ID NO: 6520 - RNA, 715 nt, Artificial Sequence
  mRNA Design a-3 (A64-N5-C30-hSL-N5) comprising derived and/or modified sequence from Pf(3D7)__XP_001351122.1__HsALB_Pf-CSP(98-192) (opt6)
aggagagggcgcuuggcuugcaaggacccugagcugcggcauugaagcacacccaacccaacucgacugaagucagccucacugaaccggaucugagaaucuucucucucugggcuugccagggcucuccgaaccuagcuagcauccucuucaauuccaacuagaaagcuuaccaugaaauggguaacauucauaagccuacuauuccuauucagcucagcauacagcgcagacggaaacccagacccaaacgcaaacccaaacguagacccaaacgcaaacccaaacguagacccaaacgcaaacccaaacguagacccaaacgcaaacccaaacgcaaacccaaacgcaaacccaaacgcaaacccaaacgcaaacccaaacgcaaacccaaacgcaaacccaaacgcaaacccaaacgcaaacccaaacgcaaacccaaacgcaaacccaaacgcaaacccaaacgcaaacccaaacgcaaacccaaacgcaaacccaaacgcaaacccauaaggacuagucccuguucccagagcccacuuuuuuuucuuuuuuugaaauaaaauagccugucuuucagaucuaaaaaaaaaaaaaaaaaaaaaaaaaaaaaaaaaaaaaaaaaaaaaaaaaaaaaaaaaaaaaaaaugcaucccccccccccccccccccccccccccccccaaaggcucuuuucagagccaccagaauu

SEQ ID NO: 6521 - RNA, 955 nt, Artificial Sequence
  mRNA Design a-3 (A64-N5-C30-hSL-N5) comprising derived and/or modified sequence from Pf(3D7)__XP_001351122.1__HsALB_Pf-CSP(98-272) (opt6)
aggagagggcgcuuggcuugcaaggacccugagcugcggcauugaagcacacccaacccaacucgacugaagucagccucacugaaccggaucugagaaucuucucucucugggcuugccagggcucuccgaaccuagcuagcauccucuucaauuccaacuagaaagcuuaccaugaaauggguaacauucauaucacuacuauuccuauucagcucagccuacagcgcagacggaaacccagacccaaacgcaaacccaaacguagacccaaacgcaaacccaaacgucgacccaaacgcaaacccaaacguagacccaaacgcaaacccaaacgcaaacccaaacgcaaacccaaacgcaaacccaaacgcaaacccaaacgcaaacccaaacgcaaacccaaacgcaaacccaaacgcaaacccaaacgcaaacccaaacgcaaacccaaacgcaaacccaaacgcaaacccaaacgcaaacccaaacgcaaacccaaacgcaaacccaaacgcaaacccaaacguagacccaaaugcaaacccaaacgcaaacccaaacgcaaacccaaacgcaaacccaaacgcaaacccaaacgcaaacccaaacgcaaacccaaacgcaaacccaaacgcaaacccaaacgcaaacccaaacgcaaacccaaacgcgaacccaaacgcaaacccaaacgcaaacccaaacgcaaacccaaacgcaaacccaaaugcaaacccaaacgcaaacccauaaggacuagucccuguucccagagcccacuuuuuuuucuuuuuuugaaauaaaauagccugucuuucagaucuaaaaaaaaaaaaaaaaaaaaaaaaaaaaaaaaaaaaaaaaaaaaaaaaaaaaaaaaaaaaaaaaugcaucccccccccccccccccccccccccccccccaaaggcucuuuucagagccaccagaauu

SEQ ID NO: 6522 - RNA, 1261 nt, Artificial Sequence
  mRNA Design a-3 (A64-N5-C30-hSL-N5) comprising derived and/or modified sequence from Pf(3D7)__XP_001351122.1__HsALB_Pf-CSP(98-374) (opt6)
aggagagggcgcuuggcuugcaaggacccugagcugcggcauugaagcacacccaacccaacucgacugaagucagccucacugaaccggaucugagaaucuucucucucugggcuugccagggcucuccgaaccuagcuagcauccucuucaauuccaacuagaaagcuuaccaugaaaugggucacauucauaucccuacuauuccuauucucaucagcauauucagcagauggaaacccagacccaaacgccaacccaaacguagacccaaacgcaaacccaaacguagacccaaacgcaaacccaaacguagacccaaacgcaaacccaaacgcaaacccaaacgcaaacccaaacgcaaacccaaacgcaaacccaaacgcaaacccaaacgcaaacccaaacgcaaacccaaacgcaaacccaaacgcaaacccaaacgcaaacccaaaugcaaauccaaacgcaaauccaaacgcaaacccaaacgccaacccaaacgcaaauccaaacgcaaacccaaacguagacccgaacgcaaacccgaacgcaaacccaaacgcaaacccaaaugcaaacccaaacgcaaacccaaacgccaacccaaacgcaaacccaaacgcaaacccaaaugcaaacccaaacgcaaacccaaacgccaacccaaacgcaaacccaaacgcaaacccaaacgcaaacccaaacgcaaacccaaaugcaaacccaaacgcaaacccaaacgcaaacccaaacaaaaacaaccaaggaaauggacaaggccacaacaugccaaacgacccaaacagaaacguagacgaaaacgcaaacgcaaacuccgcagucaaaaacaacaacaacgaagaaccauccgacaaacacauaaaagaauaccucaauaaaauacaaaacucacuaucaacagaaugguccccaugcucaguaacaugcggaaacggaauacaaguaagaauaaaaccaggauccgcaaacaaaccaaaagacgaacuagacuacgcaaacgauauagaaaaaaaaauaugcaaaauggaaaaaugcuaaggacuagucccuguucccagagcccacuuuuuuuucuuuuuuugaaauaaaauagccugucuuucagaucuaaaaaaaaaaaaaaaaaaaaaaaaaaaaaaaaaaaaaaaaaaaaaaaaaaaaaaaaaaaaaaaaugcaucccccccccccccccccccccccccccccccaaaggcucuuuucagagccaccagaauu

SEQ ID NO: 6523 - RNA, 1330 nt, Artificial Sequence
  mRNA Design a-3 (A64-N5-C30-hSL-N5) comprising derived and/or modified sequence from Pf(3D7)__XP_001351122.1__HsALB_Pf-CSP(98-397) (opt6)
aggagagggcgcuuggcuugcaaggacccugagcugcggcauugaagcacacccaacccaacucgacugaagucagccucacugaaccggaucugagaaucuucucucucugggcuugccagggcucuccgaaccuagcuagcauccucuucaauuccaacuagaaagcuuaccaugaaauggguaaccuucauaucauuacuauuccuuuucagcucggcauacucagcagacggcaacccagacccaaacgcaaacccaaacgucgacccaaaugcgaacccaaacguagacccaaacgcaaacccaaacguagauccaaacgcaaacccaaacgcaaacccaaacgcaaacccaaacgcaaacccaaacgccaacccaaaugcaaacccaaacgcaaaccccaacgcaaacccaaacgcaaacccaaacgcaaacccaaacgcaaaucccaacgcaaauccaaacgcaaacccaaaugcaaacccaaacgccaacccaaacgcaaacccaaacgcaaaccccaaugucgacccaaacgcaaacccaaacgcaaacccaaacgcaaacccaaacgcaaauccaaacgcaaaccccaacgcaaacccaaacgcaaacccaaacgcaaacccaaacgcaaacccaaacgcaaacccaaacgcaaacccaaacgcaaacccaaacgcaaacccaaacgcaaacccaaacgcaaauccaaacgcaaacccaaacgcaaacccaaacgcaaacccaaacaaaaacaaccaaggaaauggacaaggacacaacaugccaaaugaccccaacagaaacgucgacgaaaacgccaacgcaaacagcgcaguaaaaaacaacaacaaugaagaaccaucagacaaacacauaaaagaauaccuaaacaaaauucaaaacucacuaucaaccgaaugguccccaugcucaguaacaugcggaaacgguauacaaguacgaauaaaaccaggaucagcaaacaaaccaaaagacgaacuagacuacgcaaacgacauagaaaaaaaaauaugcaaaauggaaaaaugcucaucaguuuuuaacguagucaauagcucaaucggacucauaaugguacuaucauuucucuuccuaaauuaaggacuagucccuguucccagagcccacuuuuuuuucuuuuuuugaaauaaaauagccugucuuucagaucuaaaaaaaaaaaaaaaaaaaaaaaaaaaaaaaaaaaaaaaaaaaaaaaaaaaaaaaaaaaaaaaaugcaucccccccccccccccccccccccccccccccaaaggcucuuuucagagccaccagaauu

SEQ ID NO: 6524 - RNA, 1657 nt, Artificial Sequence
  mRNA Design a-3 (A64-N5-C30-hSL-N5) comprising derived and/or modified sequence from Pf(3D7)__XP_001351122.1__HsALB_Pf-CSP(199-377)_L(PVTN)_HBsAg (opt6)
aggagagggcgcuuggcuugcaaggacccugagcugcggcauugaagcacacccaacccaacucgacugaagucagccucacugaaccggaucugagaaucuucucucucugggcuugccagggcucuccgaaccuagcuagcauccucuucaauuccaacuagaaagcuuaccaugaaauggguaacauuuauauccuuacuauuucucuucuccucagcuuacucugacccaaacgcaaaucccaacgcaaacccaaaugcaaacccaaacgcaaauccaaacgcaaacccaaaugcuaaucccaacgcaaacccaaacgcaaaccccaaugccaacccaaacgcuaacccaaacgcaaacccaaacgccaacccaaaugcaaacccaaacgcaaacccaaacgcaaauccaaaugcaaacccaaacgcaaauccaaacgcaaacccaaacaaaaacaaccaaggaaacggacaaggccauaauaugccuaaugaccccaacagaaacguagacgaaaaugcuaacgccaacucagcaguaaaaaacaacaauaacgaagaaccaucagauaaacacauaaaagaauacuuaaacaaaauacaaaauucauuaucaacagaauggucaccaugcucagucaccugcggaaacgguauacaaguacgcauaaaaccaggcucagcaaauaaaccaaaagacgaacuagauuacgcuaacgacauagaaaaaaaaauaugcaaaauggaaaaaugcucaucaguaccaguaacaaauauggaaaacauaacaucaggauuccuaggcccacucuuaguacuacaagcaggauuuuuucuucuaacaagaaucuuaacuauaccccaaucacucgacucaugguggaccucacuaaauuuccucggaggaucuccaguaugccucggacaaaauucacaaucaccaacauccaaucacucacccaccuccugcccaccaaucugcccaggauacagauggaugugcuuacgaagauucauaauauuccuauucauacuacuucuaugcuuaauauuccuucucguccuacucgacuaucaaggaaugcucccuguaugcccacucauaccaggauccacaacaacuaacacaggacccuguaaaacaugcacaacacccgcccaaggaaauucaauguuccccucuugcugcugcacaaaaccaacagacggaaauugcacaugcauuccaauuccaucaucuugggcauuugcaaaauacuuaugggaaugggcaucaguccgauucucgugguuaucuuuacuaguaccauucguucaaugguuuguaggacuuucaccuacaguaugguuaucugcaauauggaugaugugguacuggggaccaucauuauacucaaucguaucaccauuuauaccacuacuacccauauuuuucugccuauggguauacauauaaggacuagucccuguucccagagcccacuuuuuuuucuuuuuuugaaauaaaauagccugucuuucagaucuaaaaaaaaaaaaaaaaaaaaaaaaaaaaaaaaaaaaaaaaaaaaaaaaaaaaaaaaaaaaaaaaugcaucccccccccccccccccccccccccccccccaaaggcucuuuucagagccaccagaauu

SEQ ID NO: 6525 - RNA, 1567 nt, Artificial Sequence
  mRNA Design a-3 (A64-N5-C30-hSL-N5) comprising derived and/or modified sequence from Pf(3D7)__XP_001351122.1__Pf-CSP (opt11)
aggagagggcgcuuggcuugcaaggacccugagcugcggcauugaagcacacccaacccaacucgacugaagucagccucacugaaccggaucugagaaucuucucucucugggcuugccagggcucuccgaaccuagcuagcauccucuucaauuccaacuagaaagcuuaccaugaugcgaaagcuugcgauccucagcgucuccucauuccuauucguagaagcacuauuccaagaauaccaaugcuacggcucauccucaaacacacgcguacucaacgaacucaacuacgacaacgcaggaacaaaccucuacaacgaacuagagaugaacuacuacggcaaacaagaaaacugguacucucucaaaaaaaacucacgaagccucggcgagaacgacgacggaaacaacgaagacaacgaaaaacuccgcaaaccaaaacacaaaaaacucaaacaacccgccgacggaaacccagacccaaacgcaaacccaaacguagacccaaacgccaaccccaacguagaccccaacgccaacccuaacgucgaccccaaugcaaaccccaacgcgaacccaaacgcaaaccccaacgcaaaccccaacgcaaacccaaacgccaaccccaacgcaaacccaaacgcaaacccuaacgccaacccaaacgccaacccaaacgccaacccaaacgcaaacccgaacgccaaccccaacgccaacccaaacgcaaacccaaacgcaaaccccaacgccaaccccaacguagaccccaacgcaaaccccaacgcaaacccaaacgccaaccccaacgccaaccccaacgccaaccccaacgccaaccccaaugccaacccaaacgcgaaccccaacgcaaacccgaacgcaaacccaaacgcgaacccaaacgcgaacccaaacgccaaccccaacgccaaccccaacgcaaacccaaacgcgaacccaaacgcaaaccccaacgccaacccaaacaaaaacaaccaaggaaacggacaaggccacaacaugccaaacgaccccaaccgcaacguagacgaaaacgccaacgccaacuccgcugucaagaacaacaacaacgaagaaccauccgacaaacacauaaaagaauaccuaaacaaaauccaaaacucccucucaaccgaauggucccccugcuccgucacaugcggaaacggcauccaaguccgaaucaaaccaggcuccgccaacaaacccaaagacgaacuggacuacgccaacgacaucgaaaaaaaaaucugcaaaauggaaaaaugcucauccgucuucaacguggucaacuccuccaucggacuaauaaugguccucuccuuccuauuccuaaacuaaggacuagucccuguucccagagcccacuuuuuuuucuuuuuuugaaauaaaauagccugucuuucagaucuaaaaaaaaaaaaaaaaaaaaaaaaaaaaaaaaaaaaaaaaaaaaaaaaaaaaaaaaaaaaaaaaugcaucccccccccccccccccccccccccccccccaaaggcucuuuucagagccaccagaauu

SEQ ID NO: 6526 - RNA, 1498 nt, Artificial Sequence
  mRNA Design a-3 (A64-N5-C30-hSL-N5) comprising derived and/or modified sequence from Pf(3D7)__XP_001351122.1__Pf-CSP(1-374) (opt11)
aggagagggcgcuuggcuugcaaggacccugagcugcggcauugaagcacacccaacccaacucgacugaagucagccucacugaaccggaucugagaaucuucucucucugggcuugccagggcucuccgaaccuagcuagcauccucuucaauuccaacuagaaagcuuaccaugaugcgcaaacucgcaauccucuccgucucaucguuccuauucguagaagcacucuuccaagaauaccaaugcuacggcucaagcuccaacacaagaguacucaacgaacucaacuacgacaaugccggaacaaaccuauacaacgagcuagaaaugaacuacuacggcaaacaagaaaacugguacucgcuaaaaaaaaacagcagaagccuaggugaaaacgacgacggaaacaacgaagacaacgaaaaacugcgcaaaccaaaacacaaaaaacuaaaacaacccgcagacggcaacccagacccaaacgcaaacccaaacguagaccccaacgccaacccaaacguagacccaaacgccaacccaaacguagacccaaacgcaaacccgaacgcaaacccaaacgcaaacccaaacgcaaacccaaacgcaaacccaaacgccaaccccaacgcaaauccaaacgcaaaccccaacgcaaaccccaacgccaacccaaacgcaaaccccaacgcgaacccaaacgccaaccccaacgccaacccaaacgcaaacccaaacgcaaacccaaacgccaaccccaacgucgacccaaacgccaacccaaacgcaaaccccaacgccaaccccaacgcaaacccaaacgccaacccgaacgcaaacccgaacgcaaacccaaacgcaaaccccaacgcaaaccccaacgcaaacccaaacgcaaaccccaacgccaaccccaacgccaaccccaacgcaaacccaaacgcaaacccgaacgcaaaccccaacgcaaaccccaacgccaaucccaacaaaaacaaccaaggcaacggacaaggacacaacaugccaaacgaccccaaccgcaacgucgacgaaaacgccaacgccaacuccgcggucaaaaacaacaacaacgaagagcccucagacaaacacauaaaagaauaccuaaacaaaauccaaaacucccucucgacagaauggucccccugcagcgucaccugcggaaacggcauacaaguacgaauaaaacccggcucagccaacaaaccaaaagacgaacuagacuacgccaacgacauagaaaaaaaaauaugcaaaauggaaaaaugcugaggacuagucccuguucccagagcccacuuuuuuuucuuuuuuugaaauaaaauagccugucuuucagaucuaaaaaaaaaaaaaaaaaaaaaaaaaaaaaaaaaaaaaaaaaaaaaaaaaaaaaaaaaaaaaaaaugcaucccccccccccccccccccccccccccccccaaaggcucuuuucagagccaccagaauu

SEQ ID NO: 6527 - RNA, 1351 nt, Artificial Sequence
  mRNA Design a-3 (A64-N5-C30-hSL-N5) comprising derived and/or modified sequence from Pf(3D7)__XP_001351122.1__Pf-CSP(1-325) (opt11)
aggagagggcgcuuggcuugcaaggacccugagcugcggcauugaagcacacccaacccaacucgacugaagucagccucacugaaccggaucugagaaucuucucucucugggcuugccagggcucuccgaaccuagcuagcauccucuucaauuccaacuagaaagcuuaccaugaugcgcaaacucgcaauccuaucaguaagcucauuccuguucguagaagcacuauuccaagaauaccaaugcuacggcucauccucaaacacaagaguacuaaacgaacuaaacuacgacaacgccggaaccaaccuauacaacgaacucgaaaugaacuacuacggcaaacaagaaaacugguacucacuaaagaaaaacagcagaagccucggcgaaaacgacgacggcaacaacgaagacaacgagaaacugagaaaaccaaaacacaagaaacuaaaacaacccgcggacgggaacccagacccaaaugcaaacccaaacgucgacccaaacgcaaacccaaacguagacccaaacgcaaaccccaacguagaccccaacgcaaacccaaacgcaaacccaaacgcaaacccaaacgcaaacccaaacgcaaaccccaacgcaaacccaaacgcaaacccaaacgcaaaccccaacgccaacccaaacgccaaccccaacgcaaacccaaacgcaaacccaaacgcaaaccccaacgccaacccgaacgcaaacccaaacgcaaacccaaacgcaaaccccaacguagacccaaacgcaaacccaaacgccaaccccaacgcaaacccaaacgcaaacccgaacgcaaaccccaacgcaaaccccaacgcaaacccaaacgcaaaccccaacgcaaauccaaacgcaaacccaaacgcaaacccaaacgccaacccaaacgcaaaucccaacgcaaacccaaacgcaaaccccaacgcaaacccaaacgcaaacccaaacgcaaacccaaacaaaaacaaccaaggaaacggccaaggacacaacaugccaaacgacccaaaccgaaacguagacgaaaacgccaacgccaacagcgcagucaaaaacaacaauaaugaagaacccuccgacaaacacauaaaagaauaccuaaacaaaauccaaaacugaggacuagucccuguucccagagcccacuuuuuuuucuuuuuuugaaauaaaauagccugucuuucagaucuaaaaaaaaaaaaaaaaaaaaaaaaaaaaaaaaaaaaaaaaaaaaaaaaaaaaaaaaaaaaaaaaugcaucccccccccccccccccccccccccccccccaaaggcucuuuucagagccaccagaauu

SEQ ID NO: 6528 - RNA, 1567 nt, Artificial Sequence
  mRNA Design a-3 (A64-N5-C30-hSL-N5) comprising derived and/or modified sequence from Pf(3D7)__XP_001351122.1__HsALB_Pf-CSP(19-397) (opt11)
aggagagggcgcuuggcuugcaaggacccugagcugcggcauugaagcacacccaacccaacucgacugaagucagccucacugaaccggaucugagaaucuucucucucugggcuugccagggcucuccgaaccuagcuagcauccucuucaauuccaacuagaaagcuuaccaugaaaugggucaccuucauaucccuccuauuccucuucucaucagccuacucccucuuccaggaauaccaaugcuacggaucguccucaaacacuagaguacucaaugaauuaaacuacgacaacgccggcaccaaccucuacaacgaacucgaaaugaacuacuacggaaaacaagaaaacugguacucacucaaaaaaaacucucgaucccucggcgaaaacgacgacggcaacaacgaagacaacgagaaacuacgcaaaccaaaacacaaaaaauuaaaacaacccgccgacggcaaccccgaccccaacgccaaccccaacguagaccccaacgcgaaccccaacgucgacccaaacgccaaccccaacguggaccccaacgccaacccaaacgccaaccccaacgccaacccaaacgcaaaccccaacgccaacccaaacgccaaccccaacgcaaacccaaacgcgaacccaaacgcaaacccaaacgccaacccaaacgcaaacccaaacgcgaacccaaacgccaacccaaacgccaaccccaacgcaaacccaaacgccaacccaaacgccaacccaaacguagacccaaacgcgaaccccaacgcuaacccaaacgcaaacccaaacgccaacccaaacgccaacccuaacgcaaacccaaacgccaaccccaacgccaaccccaacgccaaccccaacgcaaacccaaacgccaacccaaacgccaaccccaacgccaacccaaacgcaaacccaaacgcaaacccaaacgcaaaccccaacgccaacccaaacgccaacccaaacaaaaauaaccaaggcaaugggcaaggccacaacaugccaaacgaccccaaccgcaaugucgacgaaaacgccaacgccaacucugcaguaaaaaacaauaacaacgaagaacccucagacaaacacaucaaagaauaccucaacaagauccaaaauucccucuccacagaauggucccccugcagcguaaccugcggcaacggcauccaaguccgcaucaaacccggcuccgccaacaaaccgaaagacgaacuagacuacgccaacgacauagaaaaaaaaaucugcaaaauggaaaaaugcagcuccgucuucaacgucgucaacagcuccaucggccucaucaugguccucuccuuccuguuccucaacuaaggacuagucccuguucccagagcccacuuuuuuuucuuuuuuugaaauaaaauagccugucuuucagaucuaaaaaaaaaaaaaaaaaaaaaaaaaaaaaaaaaaaaaaaaaaaaaaaaaaaaaaaaaaaaaaaaugcaucccccccccccccccccccccccccccccccaaaggcucuuuucagagccaccagaauu

SEQ ID NO: 6529 - RNA, 1585 nt, Artificial Sequence
  mRNA Design a-3 (A64-N5-C30-hSL-N5) comprising derived and/or modified sequence from Pf(3D7)__XP_001351122.1__HsIns-iso1_Pf-CSP(19-397) (opt11)
aggagagggcgcuuggcuugcaaggacccugagcugcggcauugaagcacacccaacccaacucgacugaagucagccucacugaaccggaucugagaaucuucucucucugggcuugccagggcucuccgaaccuagcuagcauccucuucaauuccaacuagaaagcuuaccauggcacucuggaugagacuccucccccuccucgcacuccucgcccuauggggcccagacccagcggcagcccucuuccaagaauaccaaugcuacggcucauccuccaacacccgaguccucaaugaacuaaacuacgacaacgccggcaccaaccuauacaacgaacuagaaaugaacuacuacggcaaacaagaaaacugguacucccucaaaaaaaauucacgcucccuaggugagaacgacgacggaaacaacgaagacaacgaaaaacuccgaaaacccaaacacaaaaaacuaaaacaaccagcagacggcaaccccgaccccaacgcaaaccccaacguagacccaaacgcgaaccccaacgucgauccaaacgccaacccaaacguugaccccaacgcgaaccccaacgcaaacccaaacgcaaacccuaacgcgaaccccaacgcaaaccccaacgccaaccccaacgccaaccccaacgccaacccaaacgcaaaccccaacgccaaccccaacgcaaacccaaacgcaaacccgaacgcaaaccccaacgccaacccaaacgcaaacccaaacgccaacccaaacgcaaaccccaacguagacccaaacgccaaucccaacgcgaaccccaacgcaaacccaaacgcgaacccaaacgccaacccaaacgcaaacccgaacgccaacccaaacgccaaccccaacgcaaaccccaacgcaaacccaaacgccaacccaaacgcaaacccaaacgcaaaccccaacgccaaccccaacgcaaacccaaaugccaaccccaacgccaaccccaacgcaaacccaaacaaaaacaaccaaggaaacggccaaggccacaacaugccgaacgaccccaaccgaaacgucgacgaaaacgcaaacgccaacucagcggucaaaaacaacaacaacgaagaacccucagacaaacacaucaaagaauaccuaaacaagauccagaacucucucucaacagaauggucccccugcuccguaacaugcggcaacggcauccaaguacgaaucaaaccgggaucagccaauaaacccaaagacgaacucgacuacgccaacgacaucgaaaaaaaaauaugcaaaauggaaaaaugcagcucagucuucaacguagucaacagcuccauaggccucaucaugguacucuccuuccuguuccuaaacuaaggacuagucccuguucccagagcccacuuuuuuuucuuuuuuugaaauaaaauagccugucuuucagaucuaaaaaaaaaaaaaaaaaaaaaaaaaaaaaaaaaaaaaaaaaaaaaaaaaaaaaaaaaaaaaaaaugcaucccccccccccccccccccccccccccccccaaaggcucuuuucagagccaccagaauu

SEQ ID NO: 6530 - RNA, 1564 nt, Artificial Sequence
  mRNA Design a-3 (A64-N5-C30-hSL-N5) comprising derived and/or modified sequence from Pf(3D7)__XP_001351122.1__HsSPARC_Pf-CSP(19-397) (opt11)
aggagagggcgcuuggcuugcaaggacccugagcugcggcauugaagcacacccaacccaacucgacugaagucagccucacugaaccggaucugagaaucuucucucucugggcuugccagggcucuccgaaccuagcuagcauccucuucaauuccaacuagaaagcuuaccaugcgcgccuggauauucuuccuccuaugccuagcaggacgcgcccucgcacucuuccaagaauaccaaugcuacggcucauccucaaacacccgcguacuuaacgaacuaaacuacgacaacgccggaaccaaccuauacaacgaacucgaaaugaacuacuacgguaaacaagaaaacugguacucccucaaaaaaaacagccgaagccuaggagaaaacgacgacggaaacaacgaagacaacgaaaaacugcgcaaacccaaacacaaaaaacucaaacaacccgcagacgggaacccagacccaaacgcaaacccaaacguggacccaaacgccaacccuaacguagaccccaacgcaaaccccaacgucgacccuaaugcaaacccaaacgccaaccccaacgcgaacccaaacgcaaaccccaacgcuaacccgaacgccaaccccaacgccaacccgaacgcaaacccaaacgcaaacccaaacgcgaacccaaacgcaaacccaaacgccaaccccaacgcgaacccaaacgccaauccaaacgccaacccaaacgcaaacccaaacgccaaccccaacguagacccaaacgccaacccaaacgcgaacccaaacgcaaaccccaacgcaaacccaaacgcaaacccaaacgccaacccuaacgcaaacccaaacgccaaccccaacgccaacccaaacgcaaacccaaacgccaacccaaacgccaaccccaacgcaaacccgaacgcaaaccccaacgcaaacccaaacgcaaacccaaacgcgaacccgaacgccaacccaaauaagaacaaccaaggaaacggacaaggccacaacaugccaaacgaccccaaccgcaacgucgacgaaaacgcaaaugccaacuccgcagucaaaaacaacaauaacgaagaacccucggacaaacacaucaaagaauaccucaacaagauccaaaacucacucuccaccgaauggucacccugcagcguaacuugcggcaacggcauccaaguccgcauaaaaccaggcuccgcaaacaaacccaaagacgaacucgacuaugccaacgacaucgaaaaaaaaauaugcaaaauggaaaaaugcagcucagucuucaacguagucaacagcucuaucggacuaauaaugguacucuccuuccuauucuuaaacuaaggacuagucccuguucccagagcccacuuuuuuuucuuuuuuugaaauaaaauagccugucuuucagaucuaaaaaaaaaaaaaaaaaaaaaaaaaaaaaaaaaaaaaaaaaaaaaaaaaaaaaaaaaaaaaaaaugcaucccccccccccccccccccccccccccccccaaaggcucuuuucagagccaccagaauu

SEQ ID NO: 6531 - RNA, 1567 nt, Artificial Sequence
  mRNA Design a-3 (A64-N5-C30-hSL-N5) comprising derived and/or modified sequence from Pf(3D7)__XP_001351122.1__IgE_Pf-CSP(19-397) (opt11)
aggagagggcgcuuggcuugcaaggacccugagcugcggcauugaagcacacccaacccaacucgacugaagucagccucacugaaccggaucugagaaucuucucucucugggcuugccagggcucuccgaaccuagcuagcauccucuucaauuccaacuagaaagcuuaccauggacuggacauggauccucuuccucgucgccgcggccacacgcguacacucacucuuccaagaauaucaaugcuacggcucaagcucgaacacgcgcguacucaacgaacuaaacuacgacaacgccggcaccaaccuauacaacgaacucgaaaugaacuacuacggcaaacaagaaaacugguacucacuuaagaaaaauucacgaucccucggagaaaacgacgaugggaacaacgaagacaacgaaaaacuacgcaaacccaaacacaagaaacuuaaacaacccgcagacggcaacccagacccaaacgcaaaccccaacguagaccccaacgcaaacccaaacguagacccaaacgccaacccaaacguagacccaaacgcgaacccaaacgccaacccaaacgccaaccccaacgcaaacccaaacgcaaauccaaacgcaaacccaaaugcaaacccgaacgccaauccaaacgcaaaccccaacgcaaacccaaacgcaaaccccaaugccaacccaaacgcaaaccccaacgcaaaccccaacgcaaaccccaacgcaaacccaaacgcgaacccaaacguagaccccaacgccaaccccaacgccaacccaaacgcaaacccaaacgccaacccaaacgccaaccccaacgcaaaccccaacgcaaacccgaacgcaaacccaaacgcaaacccaaacgcaaacccgaacgcaaacccuaacgcgaaccccaacgccaaccccaacgcaaacccaaacgcaaacccaaacgccaacccaaacgcaaacccaaacgcaaacccaaacaaaaacaaccaaggaaacgggcaaggacauaacaugccgaacgaccccaaccgcaacguagacgaaaacgccaacgccaacagcgcagucaaaaacaacaacaacgaagaacccuccgacaaacacaucaaagaauaccuaaacaaaauccagaacucacuauccaccgaauggucccccugcagcgugaccugcggcaacggcauacaaguccgcauaaaaccaggcuccgccaacaaacccaaagacgaacuagacuacgccaacgacauagaaaagaaaauaugcaaaauggaaaaaugcagcucagucuucaauguagucaacuccuccaucggacucauaaugguccuaucauuccucuuccuaaacuaaggacuagucccuguucccagagcccacuuuuuuuucuuuuuuugaaauaaaauagccugucuuucagaucuaaaaaaaaaaaaaaaaaaaaaaaaaaaaaaaaaaaaaaaaaaaaaaaaaaaaaaaaaaaaaaaaugcaucccccccccccccccccccccccccccccccaaaggcucuuuucagagccaccagaauu

SEQ ID NO: 6532 - RNA, 1732 nt, Artificial Sequence
  mRNA Design a-3 (A64-N5-C30-hSL-N5) comprising derived and/or modified sequence from Pf(3D7)__XP_001351122.1__Pf-CSP_L(G4SG4)_TM domain HA (opt11)
aggagagggcgcuuggcuugcaaggacccugagcugcggcauugaagcacacccaacccaacucgacugaagucagccucacugaaccggaucugagaaucuucucucucugggcuugccagggcucuccgaaccuagcuagcauccucuucaauuccaacuagaaagcuuaccaugaugcgcaaacucgccauccucagcgucagcucguuccucuucgucgaagcacuauuccaagaauaccaguguuacggcucauccucaaacacacgcgugcucaacgaacuaaacuacgacaacgccggcaccaaccucuacaacgaacuagaaaugaacuauuacggcaagcaagaaaacugguacucacucaaaaaaaacagccgaagccuaggcgagaacgacgacgggaacaacgaagacaacgaaaaacuacgcaaacccaagcacaaaaaacugaaacaaccagccgacggaaauccagaccccaacgcaaacccgaacguagaccccaacgcgaaccccaacguggacccgaacgcaaacccgaacguagacccaaacgcaaacccaaacgcgaacccaaacgcaaacccaaacgcuaacccaaacgcaaaccccaacgccaaccccaacgcgaacccaaacgcaaacccaaacgcaaacccaaacgcaaacccgaacgcaaacccaaacgccaacccaaacgcgaacccaaacgccaacccaaacgcaaacccaaacgcaaacccaaacgcaaacccaaacguagacccgaacgccaacccgaaugcaaacccaaacgcaaacccgaacgcaaacccaaacgcgaacccgaacgccaacccaaacgcaaacccgaacgcaaaccccaacgccaacccaaacgcaaaccccaacgcaaaccccaacgcaaacccgaacgcaaacccaaacgcaaacccaaacgccaaccccaacgccaaccccaacgcaaacccgaacgccaacccaaacaaaaacaaccaaggcaacgggcaaggacacaacaugccaaacgaccccaaccgaaacgucgacgaaaacgccaacgccaacuccgcagucaaaaacaacaacaacgaagaacccucagacaaacacauaaaagaauaccucaacaaaauccaaaacucacucucaaccgaguggucacccugcagugugaccuguggcaacggaauacaaguacgcauaaaacccggaucagccaacaaaccgaaagacgaacuagacuacgccaacgacauagaaaaaaaaauaugcaaaauggagaaaugcagcucugucuucaacgucgucaacagcucaaucggacucauaaugguccucuccuuccuauuccucaacggcggagggggcucaggcggcggaggaaaauuagaauccaccagaaucuaucagauucucgccauauacagcacagucgcaagcucgcuuguccuugucguaucacuaggcgcaaucucauucuggaugugcuccaacggaagccugcaaugccgcauuugcauauaaggacuagucccuguucccagagcccacuuuuuuuucuuuuuuugaaauaaaauagccugucuuucagaucuaaaaaaaaaaaaaaaaaaaaaaaaaaaaaaaaaaaaaaaaaaaaaaaaaaaaaaaaaaaaaaaaugcaucccccccccccccccccccccccccccccccaaaggcucuuuucagagccaccagaauu

SEQ ID NO: 6533 - RNA, 1606 nt, Artificial Sequence
  mRNA Design a-3 (A64-N5-C30-hSL-N5) comprising derived and/or modified sequence from Pf(3D7)__XP_001351122.1__Pf-CSP(199-377)_L(PVTN)_HBsAg (opt11)
aggagagggcgcuuggcuugcaaggacccugagcugcggcauugaagcacacccaacccaacucgacugaagucagccucacugaaccggaucugagaaucuucucucucugggcuugccagggcucuccgaaccuagcuagcauccucuucaauuccaacuagaaagcuuaccauggaccccaacgccaaccccaacgccaaccccaacgccaaucccaacgcuaaccccaacgccaaccccaacgcaaaccccaacgccaacccaaacgccaaccccaacgcaaaccccaacgccaaucccaaugccaaccccaacgccaaccccaacgcgaaccccaacgccaaccccaacgcaaacccaaacgccaaccccaacgccaaccccaacgccaaccccaacaaaaacaaccaaggcaacggccaaggccacaacaugcccaacgaccccaaccgcaacguagacgagaacgccaacgccaacagcgcugucaaaaacaacaacaacgaggaacccuccgacaaacacaucaaagaauaccuuaacaaaauccaaaacucucucuccaccgaguggucccccugcucagucacaugcggcaacggcauacaaguucguaucaaacccggcucagcaaacaaacccaaagacgaacucgacuacgcaaacgacauagaaaagaaaaucugcaaaauggaaaaauguucauccguccccgucaccaacauggaaaacaucacuuccggauuccucgguccccuacucguacuccaagccggcuucuuccuccucacccgcauccucaccaucccccaaucacuugacuccugguggaccucccucaacuuccucggcggcucccccgucugccuaggccaaaacagccaaucccccacuagcaaccacucccccacauccugcccacccaucugccccggauaucgauggaugugccuucgccgauucauaaucuuccucuucauccuccuacucugccucaucuuccuccucguccuucuagauuaccaaggcaugcuccccgucugcccccuuauccccggcuccaccaccacaaacaccggccccugcaaaaccugcacaacccccgcccaaggcaauagcauguuccccuccugcugcugcacuaaaccaacagacggcaacuguaccugcaucccaaucccaucaucaugggccuucgccaaauaccucugggaaugggcaucuguacgauucuccuggcucucccuucucguacccuucguccagugguucgucggccucucccccaccguauggcuauccgccaucuggaugaugugguacuggggccccucccuauacuccaucgucuccccauucauaccacuccuacccaucuucuucugccucugggucuacaucugaggacuagucccuguucccagagcccacuuuuuuuucuuuuuuugaaauaaaauagccugucuuucagaucuaaaaaaaaaaaaaaaaaaaaaaaaaaaaaaaaaaaaaaaaaaaaaaaaaaaaaaaaaaaaaaaaugcaucccccccccccccccccccccccccccccccaaaggcucuuuucagagccaccagaauu

SEQ ID NO: 6534 - RNA, 1648 nt, Artificial Sequence
  mRNA Design a-3 (A64-N5-C30-hSL-N5) comprising derived and/or modified sequence from Pf(3D7)__XP_001351122.1__Pf-CSP(199-387)_L(PVTN)_HBsAg (opt11)
aggagagggcgcuuggcuugcaaggacccugagcugcggcauugaagcacacccaacccaacucgacugaagucagccucacugaaccggaucugagaaucuucucucucugggcuugccagggcucuccgaaccuagcuagcauccucuucaauuccaacuagaaagcuuaccaugauggcccccgaccccaacgcaaauccaaacgcaaaccccaacgccaacccuaacgcaaaccccaacgccaacccaaacgccaaucccaacgccaacccuaacgccaaccccaacgcaaaccccaacgccaaccccaacgccaacccuaacgcaaaccccaacgccaacccaaacgcaaaccccaacgccaaccccaacgccaaccccaacgcaaacccaaacgcaaaccccaacaaaaacaaccaaggaaacggacaaggccacaacaugccuaacgaccccaaucgcaacgucgacgaaaacgcaaacgccaacuccgccgucaaaaacaacaacaacgaagaacccucugacaaacacaucaaagaauaccucaacaagauccaaaacucccuauccaccgaauggucccccugcuccgucacuugcgguaauggcauccaaguccgcauaaaaccaggauccgcaaacaaacccaaagacgaacuagacuacgccaacgacauagaaaagaaaaucugcaaaauggaaaaaugcuccucagucuucaaugucguaaacuccuccauuggccuaggccccgucaccaacauggaaaacauuaccuccggauuccucgguccucuccucguccuccaagccggauucuuucuccucacacgaauccucacuaucccucaaucccuggacucaugguggaccucccucaacuuccugggcggcucccccgucugccucggccaaaacagccaauccccaaccuccaaucacucccccacaagcugcccucccauaugccccggcuaccgcuggaugugccuccgucgcuucaucauauuccucuucauacuucuccucugccucaucuuccuccuuguccugcuagacuaccaaggcaugcuccccgucugcccacucauccccgguuccaccacaacaaacaccggccccugcaaaacaugcaccacacccgcccaagguaacuccauguuccccuccugcugcugcaccaaaccaaccgacggcaacugcacuugcauucccauccccucauccugggccuucgccaaauaccucugggaaugggcauccguccguuucucauggcuaucucuccuaguaccauucguacaaugguucguuggccucucccccaccguauggcucuccgccauauggaugaugugguacuggggcccuucacuuuacuccaucgucucacccuucaucccacuccuacccaucuucuucugccuuuggguauacaucuaaggacuagucccuguucccagagcccacuuuuuuuucuuuuuuugaaauaaaauagccugucuuucagaucuaaaaaaaaaaaaaaaaaaaaaaaaaaaaaaaaaaaaaaaaaaaaaaaaaaaaaaaaaaaaaaaaugcaucccccccccccccccccccccccccccccccaaaggcucuuuucagagccaccagaauu

SEQ ID NO: 6535 - RNA, 832 nt, Artificial Sequence
  mRNA Design a-3 (A64-N5-C30-hSL-N5) comprising derived and/or modified sequence from Pf(3D7)__XP_001351122.1__HsALB_Pf-CSP(19-152) (opt11)
aggagagggcgcuuggcuugcaaggacccugagcugcggcauugaagcacacccaacccaacucgacugaagucagccucacugaaccggaucugagaaucuucucucucugggcuugccagggcucuccgaaccuagcuagcauccucuucaauuccaacuagaaagcuuaccaugaaaugggucaccuucaucucccuccucuuccucuucuccagcgcauacucccucuuccaagaauaccaaugcuacggcuccuccuccaacacccgcguccucaacgaacucaacuacgacaacgccggcaccaaccucuacaacgaacucgaaaugaacuacuacggcaaacaagaaaacugguacucccucaaaaaaaacucccgcucccuaggcgaaaacgacgacggaaacaacgaagacaacgaaaaacuccgcaaacccaaacacaaaaaacucaaacaacccgccgacggaaaccccgaccccaacgccaacccaaacgucgaccccaacgccaaccccaacgucgaccccaacgccaaccccaacgucgaccccaacgccaaccccaacgcaaacccaaacgcaaacccaaacgccaaccccaacgccaaccccaacgccaaccccuaaggacuagucccuguucccagagcccacuuuuuuuucuuuuuuugaaauaaaauagccugucuuucagaucuaaaaaaaaaaaaaaaaaaaaaaaaaaaaaaaaaaaaaaaaaaaaaaaaaaaaaaaaaaaaaaaaugcaucccccccccccccccccccccccccccccccaaaggcucuuuucagagccaccagaauu

SEQ ID NO: 6536 - RNA, 952 nt, Artificial Sequence
  mRNA Design a-3 (A64-N5-C30-hSL-N5) comprising derived and/or modified sequence from Pf(3D7)__XP_001351122.1__HsALB_Pf-CSP(19-192) (opt11)
aggagagggcgcuuggcuugcaaggacccugagcugcggcauugaagcacacccaacccaacucgacugaagucagccucacugaaccggaucugagaaucuucucucucugggcuugccagggcucuccgaaccuagcuagcauccucuucaauuccaacuagaaagcuuaccaugaaauggguaaccuucauaucccuccucuuccuauucucgagcgccuacucccucuuccaagaauaccaaugcuacggcucauccuccaacacccgcguccucaacgaacucaacuacgacaacgccggcaccaaccucuacaacgaacuagagaugaacuacuacggcaaacaagaaaacugguacucacucaaaaaaaacucccgaucccuaggagaaaacgacgacggcaacaacgaagacaacgaaaaacuacgaaaacccaaacacaaaaaacucaaacaacccgccgacggcaaccccgaccccaacgccaaccccaacgucgaccccaacgccaacccaaacguagaccccaacgccaaccccaacgucgacccaaacgccaaccccaacgccaaccccaacgccaacccaaacgcaaacccaaacgcaaacccaaacgccaacccaaacgccaaccccaacgccaaccccaacgcaaaccccaacgcaaaccccaacgccaacccaaacgcaaaccccaacgccaacccaaacgccaacccaaacgccaaccccaacgcaaaccccuaaggacuagucccuguucccagagcccacuuuuuuuucuuuuuuugaaauaaaauagccugucuuucagaucuaaaaaaaaaaaaaaaaaaaaaaaaaaaaaaaaaaaaaaaaaaaaaaaaaaaaaaaaaaaaaaaaugcaucccccccccccccccccccccccccccccccaaaggcucuuuucagagccaccagaauu

SEQ ID NO: 6537 - RNA, 1192 nt, Artificial Sequence
  mRNA Design a-3 (A64-N5-C30-hSL-N5) comprising derived and/or modified sequence from Pf(3D7)__XP_001351122.1__HsALB_Pf-CSP(19-272) (opt11)
aggagagggcgcuuggcuugcaaggacccugagcugcggcauugaagcacacccaacccaacucgacugaagucagccucacugaaccggaucugagaaucuucucucucugggcuugccagggcucuccgaaccuagcuagcauccucuucaauuccaacuagaaagcuuaccaugaaauggguaaccuucaucucccuccucuuccuauucucaucagcauacucacucuuccaagaauaccaaugcuacggcucgagcucaaacacacgcguacucaacgaacugaacuacgacaacgccggaaccaaccucuacaaugaacucgaaaugaacuacuacggcaaacaagagaacugguacucacucaaaaaaaacagcagaagccucggagaaaacgacgacggaaacaacgaagacaacgaaaaacuccgcaaacccaagcacaaaaaacuaaaacaacccgcagacggaaaccccgaccccaacgcaaacccgaacgucgacccaaacgccaacccaaacguagaccccaacgcgaacccaaacguagacccaaacgccaacccaaacgcaaaccccaacgccaaccccaacgcaaacccaaacgccaacccaaacgcaaaccccaaugcaaaccccaacgcaaacccaaacgccaaccccaacgcaaacccaaacgcaaacccaaacgcaaacccaaacgcaaacccaaacgcgaacccaaacgcaaacccaaacgcaaacccgaacgcaaacccaaacguagacccaaacgcaaaccccaacgccaacccaaacgcaaacccaaacgcaaacccaaacgcaaacccaaacgcgaacccaaacgccaacccaaacgcaaacccaaacgcaaacccaaacgcaaacccaaacgcaaacccaaacgcaaacccaaacgcaaacccgaacgcgaacccaaacgcaaacccaaacgcgaacccgaacgcaaaccccaacgcaaacccauaaggacuagucccuguucccagagcccacuuuuuuuucuuuuuuugaaauaaaauagccugucuuucagaucuaaaaaaaaaaaaaaaaaaaaaaaaaaaaaaaaaaaaaaaaaaaaaaaaaaaaaaaaaaaaaaaaugcaucccccccccccccccccccccccccccccccaaaggcucuuuucagagccaccagaauu

SEQ ID NO: 6538 - RNA, 1354 nt, Artificial Sequence
  mRNA Design a-3 (A64-N5-C30-hSL-N5) comprising derived and/or modified sequence from Pf(3D7)__XP_001351122.1__HsALB_Pf-CSP(19-272)_L(AAY)_Pf-CSP(310-3 27)_L(AAY)_Pf-CSP(346-375) (opt11)
aggagagggcgcuuggcuugcaaggacccugagcugcggcauugaagcacacccaacccaacucgacugaagucagccucacugaaccggaucugagaaucuucucucucugggcuugccagggcucuccgaaccuagcuagcauccucuucaauuccaacuagaaagcuuaccaugaaaugggucaccuucaucucacuccuauuccuauucuccuccgcauacucacucuuccaagaauaccagugcuacggaucaagcuccaacacacgcguacuaaacgaacugaacuacgacaacgccggaaccaaccucuacaacgaacucgaaaugaauuacuacggcaaacaagagaacugguacucacucaaaaaaaacagcagaucccuaggcgaaaacgacgacggaaacaacgaagacaacgaaaaacuacgcaaacccaaacacaaaaaacuaaaacaacccgcagacggaaacccagauccaaacgcaaacccaaacguagacccaaacgccaacccaaacguagacccaaacgcaaacccaaacguagaccccaacgcaaacccaaacgcaaacccgaacgccaacccaaacgcaaaccccaacgccaacccaaacgcaaacccaaacgcaaacccaaacgcaaacccaaacgccaaccccaacgcgaacccaaacgcaaacccuaacgccaacccaaacgcaaacccaaacgcaaacccgaacgcaaacccaaacgcaaacccaaacgcaaacccgaacguagacccaaacgcaaacccaaacgcaaacccaaacgcaaacccaaacgccaacccaaacgccaacccaaacgcaaaccccaacgcaaaccccaacgcgaacccaaacgccaaccccaacgcaaacccaaacgccaacccaaacgccaacccgaacgcaaacccaaacgccaacccaaacgccaacccgaacgcaaacccaaacgccaacccaaacgccaacccagccgcguacgaacccucagauaaacacauaaaagaauaccucaacaaaauccaaaacucacuagcagccuacaucaaaccaggauccgccaacaaacccaaggacgaacucgacuacgcaaacgacaucgaaaaaaaaaucugcaaaauggaaaaaugcucaugaggacuagucccuguucccagagcccacuuuuuuuucuuuuuuugaaauaaaauagccugucuuucagaucuaaaaaaaaaaaaaaaaaaaaaaaaaaaaaaaaaaaaaaaaaaaaaaaaaaaaaaaaaaaaaaaaugcaucccccccccccccccccccccccccccccccaaaggcucuuuucagagccaccagaauu

SEQ ID NO: 6539 - RNA, 1315 nt, Artificial Sequence
  mRNA Design a-3 (A64-N5-C30-hSL-N5) comprising derived and/or modified sequence from Pf(3D7)__XP_001351122.1__HsALB_Pf-CSP(19-272)_L(AAY)_Pf-CSP(346-3 65)_L(AAY)_P2 (opt11)
aggagagggcgcuuggcuugcaaggacccugagcugcggcauugaagcacacccaacccaacucgacugaagucagccucacugaaccggaucugagaaucuucucucucugggcuugccagggcucuccgaaccuagcuagcauccucuucaauuccaacuagaaagcuuaccaugaaaugggucaccuucaucucacuccuauuccuauucucgagcgcauacucacucuuccaagaauaccaaugcuauggcuccagcucaaacacacgcguccuaaacgaacucaacuacgacaacgccggaacaaaccucuacaacgaacucgaaaugaacuacuacggcaaacaagaaaacugguacucgcucaaaaaaaacucccgaagucuaggcgaaaacgacgacggaaacaacgaagacaacgaaaaacuacgcaaacccaaacacaaaaaacuaaaacaacccgcagacggaaaccccgacccaaacgcaaaccccaacguagacccaaacgcaaaccccaacguagacccaaacgcaaacccgaacguagacccaaacgccaacccaaacgccaaccccaacgcaaacccaaacgccaaccccaacgcaaacccaaacgcaaacccaaacgcaaacccaaacgcaaacccaaacgccaaccccaacgccaacccaaacgccaaccccaacgcgaaccccaacgcgaacccaaacgccaacccaaacgcaaaccccaacgcaaacccaaacgcaaacccaaacgucgacccaaacgcaaacccaaacgcaaacccgaacgcaaacccaaacgcaaaccccaacgccaacccaaacgcgaacccaaacgccaacccaaacgccaacccaaacgcaaacccaaacgccaacccaaacgcaaacccaaacgcaaaccccaacgcaaaccccaacgcaaacccaaacgccaaccccaacgcaaaccccaacgcaaacccaaacgccaacccagccgcauacauaaaacccggcuccgccaacaaaccaaaagacgaacuagacuacgccaacgacauagaagcagccuaccaauacaucaaagccaacagcaaauucauaggaauaaccgagcuauaaggacuagucccuguucccagagcccacuuuuuuuucuuuuuuugaaauaaaauagccugucuuucagaucuaaaaaaaaaaaaaaaaaaaaaaaaaaaaaaaaaaaaaaaaaaaaaaaaaaaaaaaaaaaaaaaaugcaucccccccccccccccccccccccccccccccaaaggcucuuuucagagccaccagaauu

SEQ ID NO: 6540 - RNA, 1309 nt, Artificial Sequence
  mRNA Design a-3 (A64-N5-C30-hSL-N5) comprising derived and/or modified sequence from Pf(3D7)__XP_001351122.1__HsALB_Pf-CSP(19-272)_L(AAY)_Pf-CSP(346-3 65)_L(AAY)_PADRE (opt11)
aggagagggcgcuuggcuugcaaggacccugagcugcggcauugaagcacacccaacccaacucgacugaagucagccucacugaaccggaucugagaaucuucucucucugggcuugccagggcucuccgaaccuagcuagcauccucuucaauuccaacuagaaagcuuaccaugaaauggguaaccuucaucucgcuacuguuccucuucucauccgcauacucccucuuccaagaauaccaaugcuacggcucauccucaaacacacgaguacuaaacgaacucaacuacgacaacgccggaaccaaccuauacaacgaacucgaaaugaacuacuacggcaaacaagaaaacugguacucacucaaaaaaaacucccgaucccucggcgaaaacgacgacggaaacaacgaagacaacgaaaaacugagaaaacccaaacacaaaaaacuaaaacaaccagccgacggcaacccagaccccaacgcaaaccccaacguagacccaaacgccaaccccaacguagacccaaacgcaaacccaaacguagaccccaacgccaacccaaacgccaacccaaacgccaaccccaacgcaaacccaaacgcaaacccaaacgcaaacccaaacgccaacccaaacgcaaacccaaacgccaacccgaacgcaaaccccaacgcaaacccaaacgcaaaccccaacgccaacccaaacgcaaacccaaacgcaaaccccaacgcaaacccaaaugcgaacccaaacguggacccgaacgcaaaccccaacgccaacccaaacgcaaaccccaacgccaaccccaacgccaaccccaacgcaaaccccaacgccaaccccaacgccaacccaaacgccaacccaaacgcgaacccaaacgcaaaccccaacgcaaacccaaacgcaaacccaaacgcaaacccaaacgcaaaccccaacgcaaacccaaacgcaaacccaaacgcaaaccccgcagccuacauuaaaccaggcuccgccaacaaacccaaagacgaacucgacuacgccaacgacauagaagcagccuacgccaaauucguagccgcauggacacucaaagccgcagccuaaggacuagucccuguucccagagcccacuuuuuuuucuuuuuuugaaauaaaauagccugucuuucagaucuaaaaaaaaaaaaaaaaaaaaaaaaaaaaaaaaaaaaaaaaaaaaaaaaaaaaaaaaaaaaaaaaugcaucccccccccccccccccccccccccccccccaaaggcucuuuucagagccaccagaauu

SEQ ID NO: 6541 - RNA, 1366 nt, Artificial Sequence
  mRNA Design a-3 (A64-N5-C30-hSL-N5) comprising derived and/or modified sequence from Pf(3D7)__XP_001351122.1__HsALB_Pf-CSP(19-272)_L(G4S)_Pf-CSP(310-3 27)_L(G4S)_Pf-CSP(346-375) (opt11)
aggagagggcgcuuggcuugcaaggacccugagcugcggcauugaagcacacccaacccaacucgacugaagucagccucacugaaccggaucugagaaucuucucucucugggcuugccagggcucuccgaaccuagcuagcauccucuucaauuccaacuagaaagcuuaccaugaaaugggucaccuucaucucccuacuauuccucuucucaucagccuacucacucuuccaagaguaccaaugcuacggcucaagcucaaacacacgcguacucaacgaacuaaacuacgacaacgcaggcaccaaccucuacaacgaacucgagaugaacuacuacggcaaacaagaaaacugguacucacucaaaaaaaacucccgcagccucggcgaaaacgacgacggcaacaacgaagauaacgagaaacuacgcaaacccaaacacaaaaaacuaaaacaacccgccgacggaaacccagacccaaacgccaacccaaacguagacccaaacgcaaacccaaacguagacccaaacgccaaccccaacguagacccaaacgccaacccaaacgccaacccaaacgcaaacccaaacgcaaacccaaacgcgaacccaaacgcaaaccccaacgccaacccaaacgcaaacccaaacgccaaccccaacgcaaacccaaacgcaaaccccaacgcaaacccaaacgccaaccccaacgcaaaccccaacgcaaacccaaacgcaaacccaaacgcaaacccaaacgucgacccaaacgcaaaccccaacgcaaacccaaacgcaaacccaaacgccaacccaaacgcaaacccaaacgccaacccaaacgcaaaccccaacgcaaaccccaacgccaacccaaacgcaaaccccaacgcgaacccaaacgcaaacccaaacgcaaacccaaacgcaaaccccaacgcaaaccccaacgcaaacccaaacgcaaacccaaacgcaaacccaggcggcggcggaagcgaacccucggacaaacacauaaaagaauaccucaacaaaauccaaaacucccucggaggcggaggcuccaucaaacccggaagcgcaaacaaacccaaagacgaacucgacuacgcaaacgacaucgagaaaaaaauaugcaaaauggaaaaaugcucauaaggacuagucccuguucccagagcccacuuuuuuuucuuuuuuugaaauaaaauagccugucuuucagaucuaaaaaaaaaaaaaaaaaaaaaaaaaaaaaaaaaaaaaaaaaaaaaaaaaaaaaaaaaaaaaaaaugcaucccccccccccccccccccccccccccccccaaaggcucuuuucagagccaccagaauu

SEQ ID NO: 6542 - RNA, 1351 nt, Artificial Sequence
  mRNA Design a-3 (A64-N5-C30-hSL-N5) comprising derived and/or modified sequence from Pf(3D7)__XP_001351122.1__HsALB_Pf-CSP(19-272)_L(G4S)_Pf-CSP(310-3 27)_Pf-CSP(346-375) (opt11)
aggagagggcgcuuggcuugcaaggacccugagcugcggcauugaagcacacccaacccaacucgacugaagucagccucacugaaccggaucugagaaucuucucucucugggcuugccagggcucuccgaaccuagcuagcauccucuucaauuccaacuagaaagcuuaccaugaaauggguaaccuucaucucacuccuauuccucuucuccuccgcauacucgcucuuccaagaauaccaaugcuacggcucaagcucaaacacccgcguccucaacgaacucaacuacgacaacgccgguaccaaccuauacaacgaacucgaaaugaacuacuacggcaaacaagaaaacugguacucacucaaaaaaaacuccaggucccuaggagaaaacgacgauggcaacaacgaagacaacgaaaaacuccgaaagccaaaacacaaaaaacuaaaacagcccgcagacggcaacccagacccaaacgcaaacccaaacguagacccaaacgcgaaccccaacguagacccaaacgcaaacccaaacguagacccaaacgcaaaccccaacgcaaacccaaacgcaaaccccaacgcaaaccccaacgcaaacccaaacgcaaacccaaacgcaaacccaaacgcaaacccaaacgcaaaccccaacgccaaccccaacgcaaacccaaacgcaaacccaaacgcaaacccaaacgcaaacccaaacgcaaaccccaacgccaacccaaacgcaaacccaaacguagacccaaacgcaaacccaaacgcaaacccaaacgcaaaccccaacgccaacccaaacgcaaacccaaacgcaaacccaaacgcaaacccaaacgcaaauccaaacgcuaacccaaacgcaaacccgaacgcaaaccccaaugcaaaccccaacgcaaacccaaacgccaacccaaacgcaaacccaaacgcgaacccaaacgcaaacccaaacgcaaacccaggcggaggcggauccgaacccuccgacaaacacauaaaagaauaccuaaacaaaauccaaaacucucucauaaaacccggaucagccaacaaaccaaaagacgaacuagacuacgccaaugacauagaaaaaaaaauaugcaagauggaaaaaugcagcuaaggacuagucccuguucccagagcccacuuuuuuuucuuuuuuugaaauaaaauagccugucuuucagaucuaaaaaaaaaaaaaaaaaaaaaaaaaaaaaaaaaaaaaaaaaaaaaaaaaaaaaaaaaaaaaaaaugcaucccccccccccccccccccccccccccccccaaaggcucuuuucagagccaccagaauu

SEQ ID NO: 6543 - RNA, 1351 nt, Artificial Sequence
  mRNA Design a-3 (A64-N5-C30-hSL-N5) comprising derived and/or modified sequence from Pf(3D7)__XP_001351122.1__HsALB_Pf-CSP(19-325) (opt11)
aggagagggcgcuuggcuugcaaggacccugagcugcggcauugaagcacacccaacccaacucgacugaagucagccucacugaaccggaucugagaaucuucucucucugggcuugccagggcucuccgaaccuagcuagcauccucuucaauuccaacuagaaagcuuaccaugaaauggguaaccuucaucucacuccuguuccuauucucauccgcauacucacucuuccaagaauaccaaugcuacggcucgucuucaaacacccgcguacucaacgaacucaacuacgacaacgccggaaccaaccucuacaacgaacucgaaaugaacuacuacggcaaacaagaaaacugguacucacucaaaaaaaacagccgaagccuaggcgaaaacgacgacggaaacaaugaagacaacgaaaaacuccgcaaacccaaacacaaaaaacucaaacaaccagcagacggaaaccccgacccgaacgcaaacccaaacguagacccaaacgcaaacccaaacguagacccaaacgcgaacccaaacguagaccccaacgcaaacccaaacgcaaacccaaacgcaaacccaaacgccaaccccaacgccaacccaaacgccaacccaaacgcaaacccgaacgcgaacccaaacgcaaaccccaacgcaaacccaaacgcaaacccaaacgcgaacccaaacgccaacccaaacgccaacccaaacgcaaacccaaacgccaacccaaacgcaaaccccaacguggaccccaacgcaaacccaaacgcaaacccaaacgccaaccccaacgcaaacccaaacgcaaacccuaacgcaaacccaaacgcaaaccccaacgcgaacccaaacgcaaacccaaacgcaaacccaaacgcaaaccccaacgcaaacccaaacgccaacccaaacgccaacccaaacgcgaauccaaacgcaaaccccaacgcaaacccaaacgcaaacccgaacaaaaacaaccaagggaacggacaaggacacaacaugccaaacgaccccaaccgcaacgucgacgaaaacgccaacgccaacuccgcaguaaaaaacaacaacaacgaagaacccuccgacaaacacauaaaagaauaccucaacaagauacaaaacuagggacuagucccuguucccagagcccacuuuuuuuucuuuuuuugaaauaaaauagccugucuuucagaucuaaaaaaaaaaaaaaaaaaaaaaaaaaaaaaaaaaaaaaaaaaaaaaaaaaaaaaaaaaaaaaaaugcaucccccccccccccccccccccccccccccccaaaggcucuuuucagagccaccagaauu

SEQ ID NO: 6544 - RNA, 1528 nt, Artificial Sequence
  mRNA Design a-3 (A64-N5-C30-hSL-N5) comprising derived and/or modified sequence from Pf(3D7)__XP_001351122.1__HsALB_Pf-CSP(19-384) (opt11)
aggagagggcgcuuggcuugcaaggacccugagcugcggcauugaagcacacccaacccaacucgacugaagucagccucacugaaccggaucugagaaucuucucucucugggcuugccagggcucuccgaaccuagcuagcauccucuucaauuccaacuagaaagcuuaccaugaaauggguaaccuucaucucacuacucuuccuauucucaagcgcguacucacucuuccaagaauaccaaugcuacggcucgagcucaaacacccgcguucucaacgaacuaaacuacgacaacgccggaaccaaccuauacaacgaacuugaaaugaacuacuacggcaaacaagaaaacugguacucgcucaaaaaaaacuccaggagccuaggcgaaaacgacgacggaaacaacgaagacaacgagaaacuaagaaaacccaaacacaaaaaacucaaacagcccgcggacggaaaccccgacccaaacgcaaaccccaacguagacccgaacgccaacccaaacguagacccaaacgcaaacccaaacguagaccccaacgcaaacccgaacgccaacccaaacgcaaacccaaaugcgaaccccaacgcgaacccaaacgcaaacccgaacgcaaaccccaacgccaacccaaacgcaaacccaaacgcaaaccccaacgcaaacccaaacgcgaacccaaacgcaaacccaaacgcgaacccgaacgcaaacccaaacgcaaacccgaacgcaaacccaaacguagacccaaacgccaacccaaacgcaaacccaaacgcaaaccccaacgcaaacccaaacgcaaacccgaacgcaaacccaaacgcaaacccaaacgcgaacccaaacgcaaaccccaacgcaaacccaaacgcaaacccuaacgcaaacccgaacgcaaacccaaacgccaacccaaacgcgaaccccaacgcaaacccaaacgccaacccaaacgccaacccgaacaaaaacaaccaaggaaacggacaaggacacaacaugccaaacgaccccaaccgaaacgucgacgaaaacgcaaacgccaacagugccgucaaaaacaacaacaaugaagaacccucagacaaacacauaaaagaauaccuaaacaaaauccagaacucgcucucaaccgaauggucacccugcagcgucaccugcggcaacggaauacaaguacgcaucaaaccaggcucggccaacaaaccaaaagacgaauuagacuacgcaaacgacaucgaaaaaaaaauaugcaaaauggaaaaaugcagcucagucuucaacguagucaauagcucauaaggacuagucccuguucccagagcccacuuuuuuuucuuuuuuugaaauaaaauagccugucuuucagaucuaaaaaaaaaaaaaaaaaaaaaaaaaaaaaaaaaaaaaaaaaaaaaaaaaaaaaaaaaaaaaaaaugcaucccccccccccccccccccccccccccccccaaaggcucuuuucagagccaccagaauu

SEQ ID NO: 6545 - RNA, 1666 nt, Artificial Sequence
  mRNA Design a-3 (A64-N5-C30-hSL-N5) comprising derived and/or modified sequence from Pf(3D7)__XP_001351122.1__HsALB_Pf-CSP(19-384)_TM domain HA (opt11)
aggagagggcgcuuggcuugcaaggacccugagcugcggcauugaagcacacccaacccaacucgacugaagucagccucacugaaccggaucugagaaucuucucucucugggcuugccagggcucuccgaaccuagcuagcauccucuucaauuccaacuagaaagcuuaccaugaagugggucaccuucaucucccuccuauuccucuucucuagcgcguacucacucuuccaagaauaccaaugcuacggauccagcucaaacacacgcguccucaaugaacugaacuacgauaacgccggaaccaaccucuacaacgaacucgaaaugaacuacuacggcaaacaagaaaacugguacucacuaaagaaaaauagcaggucccucggcgaaaacgacgacgggaacaacgaagauaacgaaaaacuacgcaaacccaagcacaagaaacuaaaacagccagcagacggaaacccagaccccaacgccaacccaaacgucgaccccaacgcaaacccaaacguagauccgaacgcaaacccaaacgucgauccaaacgcaaacccaaacgcaaacccaaacgcuaaccccaacgccaacccaaacgcaaacccgaacgcaaaccccaacgcgaacccgaacgcaaacccaaacgcaaacccaaacgccaacccaaacgcaaacccaaacgcaaacccaaacgccaacccaaacgcaaaccccaacgcgaaccccaacgcaaaccccaacgcaaacccaaacgucgacccaaacgcaaaccccaacgcaaaccccaacgcaaaccccaaugcaaacccaaacgcgaaccccaacgcaaacccaaacgcgaacccaaaugcaaaccccaacgccaaccccaacgccaacccgaacgcaaacccaaacgccaacccaaacgccaacccaaacgcaaaucccaacgccaacccaaacgcgaacccgaacgcaaacccaaacgcaaacccgaacaaaaacaaccaaggaaacggucaaggacacaacaugccaaacgaccccaaccgcaacgucgacgaaaacgccaaugccaacagcgccgucaaaaacaacaacaacgaagaacccucagacaaacacaucaaagaguaccuaaacaagauccaaaacucccucuccaccgaauggucccccugcagcguaaccugcggaaacggcauccaaguccgcauaaaaccaggcucagccaacaaaccaaaagaugaacucgacuacgcaaacgacauagaaaagaaaaucugcaaaauggaaaaaugcagcuccguauucaacgugguuaacuccucaaaacuagaauccacccgcaucuaccaaauacucgcaauauacagcacaguagccagcucacucguccuagucgucucccucggagccaucagcuucuggaugugcuccaacggaaguuuacaaugucgcauaugcauauaaggacuagucccuguucccagagcccacuuuuuuuucuuuuuuugaaauaaaauagccugucuuucagaucuaaaaaaaaaaaaaaaaaaaaaaaaaaaaaaaaaaaaaaaaaaaaaaaaaaaaaaaaaaaaaaaaugcaucccccccccccccccccccccccccccccccaaaggcucuuuucagagccaccagaauu

SEQ ID NO: 6546 - RNA, 1378 nt, Artificial Sequence
  mRNA Design a-3 (A64-N5-C30-hSL-N5) comprising derived and/or modified sequence from Pf(3D7)__XP_001351122.1__HsALB_Pf-CSP(82-397) (opt11)
aggagagggcgcuuggcuugcaaggacccugagcugcggcauugaagcacacccaacccaacucgacugaagucagccucacugaaccggaucugagaaucuucucucucugggcuugccagggcucuccgaaccuagcuagcauccucuucaauuccaacuagaaagcuuaccaugaaaugggucaccuucaucucacuccuguuccucuucucauccgccuacagcgacaacgaaaaacugcgcaaacccaaacacaagaaacucaaacaaccagccgacggcaaccccgaccccaacgccaacccaaacguagaccccaacgccaaccccaacguagacccaaacgccaacccaaacguggaccccaacgcaaacccaaacgccaacccaaacgccaauccaaacgccaacccaaacgcaaacccaaacgcaaaccccaacgccaacccuaacgccaaccccaacgcaaacccaaacgccaaccccaacgccaaccccaacgcaaaccccaacgcaaacccuaacgccaaccccaacgccaaccccaacgcaaacccaaacgccaaccccaacguagacccaaacgccaaccccaacgcaaaccccaacgccaacccaaacgcaaacccaaacgccaaccccaacgccaaccccaacgcaaacccaaacgcaaacccaaaugcaaaccccaacgccaaccccaacgccaaccccaacgcaaaccccaacgcaaaccccaacgcaaacccgaacgccaacccaaacgccaacccaaacgccaaccccaacgcaaaccccaacaaaaacaaccaaggcaacggacaaggacacaacaugcccaacgaccccaaccgcaacgucgacgaaaacgccaacgccaacuccgccgucaaaaacaacaacaacgaagaacccuccgacaaacacaucaaagaauaccucaacaaaauccaaaacucccucucaaccgaauggucacccugcuccguaaccugcggcaacggcauccaaguccgcaucaaacccggcucagccaacaaacccaaagacgaacucgacuacgccaaugacaucgaaaagaaaauaugcaaaauggaaaaaugcuccuccgucuucaacgucgucaacuccuccaucggccucaucaugguccucucguuccuauuccuaaacuaaggacuagucccuguucccagagcccacuuuuuuuucuuuuuuugaaauaaaauagccugucuuucagaucuaaaaaaaaaaaaaaaaaaaaaaaaaaaaaaaaaaaaaaaaaaaaaaaaaaaaaaaaaaaaaaaaugcaucccccccccccccccccccccccccccccccaaaggcucuuuucagagccaccagaauu

SEQ ID NO: 6547 - RNA, 730 nt, Artificial Sequence
  mRNA Design a-3 (A64-N5-C30-hSL-N5) comprising derived and/or modified sequence from Pf(3D7)__XP_001351122.1__HsALB_Pf-CSP(93-192) (opt11)
aggagagggcgcuuggcuugcaaggacccugagcugcggcauugaagcacacccaacccaacucgacugaagucagccucacugaaccggaucugagaaucuucucucucugggcuugccagggcucuccgaaccuagcuagcauccucuucaauuccaacuagaaagcuuaccaugaaauggguaaccuucaucucacuccuauuccuauucucaagcgcauacucaaaacuaaaacaacccgcagacggaaacccagacccaaacgcaaacccaaacguagacccaaacgcaaacccaaacguagacccaaacgcaaacccaaacguagacccaaacgcaaacccaaacgcaaacccaaacgcaaacccaaacgcaaacccaaacgcaaaccccaacgcaaacccaaacgcaaacccaaacgcaaacccaaacgcaaacccaaacgcaaacccaaacgcaaacccaaacgcaaacccaaacgcaaacccaaacgcaaacccaaacgccaacccaaacgcaaacccauaaggacuagucccuguucccagagcccacuuuuuuuucuuuuuuugaaauaaaauagccugucuuucagaucuaaaaaaaaaaaaaaaaaaaaaaaaaaaaaaaaaaaaaaaaaaaaaaaaaaaaaaaaaaaaaaaaugcaucccccccccccccccccccccccccccccccaaaggcucuuuucagagccaccagaauu

SEQ ID NO: 6548 - RNA, 970 nt, Artificial Sequence
  mRNA Design a-3 (A64-N5-C30-hSL-N5) comprising derived and/or modified sequence from Pf(3D7)__XP_001351122.1__HsALB_Pf-CSP(93-272) (opt11)
aggagagggcgcuuggcuugcaaggacccugagcugcggcauugaagcacacccaacccaacucgacugaagucagccucacugaaccggaucugagaaucuucucucucugggcuugccagggcucuccgaaccuagcuagcauccucuucaauuccaacuagaaagcuuaccaugaaaugggucaccuucaucucacuccuauuccuauucucauccgcauacucaaaacuaaaacaacccgccgacggaaacccagacccaaacgcaaacccaaacguagacccaaacgcaaacccaaacguagacccaaacgcaaacccaaacguagacccaaacgcaaacccaaacgccaacccaaacgcaaauccaaacgcaaacccaaacgcaaacccaaacgcaaacccaaacgcaaacccaaacgccaacccaaacgccaacccaaacgcaaacccaaacgcaaacccaaacgcaaacccaaacgcaaacccaaacgcaaacccaaacgccaaccccaacgcaaacccaaacgcaaaccccaacguagacccaaacgcaaacccaaacgccaaccccaacgcaaaccccaacgccaaccccaacgccaacccaaacgccaacccaaacgcaaacccaaacgcaaacccaaacgcaaacccaaacgcaaacccaaacgcaaacccaaacgcaaacccaaacgcaaacccaaacgcaaacccaaacgccaacccaaacgcaaacccaaacgcaaacccgaacgcaaacccauaaggacuagucccuguucccagagcccacuuuuuuuucuuuuuuugaaauaaaauagccugucuuucagaucuaaaaaaaaaaaaaaaaaaaaaaaaaaaaaaaaaaaaaaaaaaaaaaaaaaaaaaaaaaaaaaaaugcaucccccccccccccccccccccccccccccccaaaggcucuuuucagagccaccagaauu

SEQ ID NO: 6549 - RNA, 1345 nt, Artificial Sequence
  mRNA Design a-3 (A64-N5-C30-hSL-N5) comprising derived and/or modified sequence from Pf(3D7)__XP_001351122.1__HsALB_Pf-CSP(93-397) (opt11)
aggagagggcgcuuggcuugcaaggacccugagcugcggcauugaagcacacccaacccaacucgacugaagucagccucacugaaccggaucugagaaucuucucucucugggcuugccagggcucuccgaaccuagcuagcauccucuucaauuccaacuagaaagcuuaccaugaaaugggucacauucaucucacuccuauuccuauucucaagcgccuacuccaaacucaaacaacccgccgacggcaacccagacccaaacgccaaccccaacgucgacccaaacgccaacccaaacgucgacccaaacgcaaacccaaacgucgaccccaacgccaaccccaacgccaaccccaacgccaacccaaacgccaaucccaacgccaaccccaacgccaacccaaacgcaaaccccaacgccaauccaaacgccaaccccaacgcaaaccccaacgccaaccccaacgcaaacccaaacgcaaacccaaacgcaaaccccaacgccaaccccaacgcaaaccccaacgccaaccccaacgucgaccccaacgccaacccaaacgccaacccaaacgccaaccccaacgccaaccccaacgcaaacccaaacgcgaaccccaacgcaaaccccaacgccaacccgaacgccaacccgaacgcaaacccaaacgccaaccccaacgcaaaccccaacgcaaacccaaacgcgaaccccaacgccaacccaaacgccaacccaaacgcgaacccaaacgccaaccccaacaaaaacaaccaagggaacggacaaggccacaacaugcccaacgaccccaaccgcaacgucgacgaaaacgccaacgccaacuccgccgucaaaaacaacaacaacgaagaacccuccgacaaacacauaaaagaauaccuaaacaaaauccaaaacucacucucuacugaauggucccccugcucagucaccugcggcaacggcauacaaguccgcauaaaacccggcucggccaacaaaccaaaagacgaacuagacuacgcaaacgacaucgaaaaaaaaauaugcaaaauggaaaaaugcuccucagucuucaacguaguaaacuccuccaucggccucauaaugguccucuccuuccuauuccucaacuaaggacuagucccuguucccagagcccacuuuuuuuucuuuuuuugaaauaaaauagccugucuuucagaucuaaaaaaaaaaaaaaaaaaaaaaaaaaaaaaaaaaaaaaaaaaaaaaaaaaaaaaaaaaaaaaaaugcaucccccccccccccccccccccccccccccccaaaggcucuuuucagagccaccagaauu

SEQ ID NO: 6550 - RNA, 715 nt, Artificial Sequence
  mRNA Design a-3 (A64-N5-C30-hSL-N5) comprising derived and/or modified sequence from Pf(3D7)__XP_001351122.1__HsALB_Pf-CSP(98-192) (opt11)
aggagagggcgcuuggcuugcaaggacccugagcugcggcauugaagcacacccaacccaacucgacugaagucagccucacugaaccggaucugagaaucuucucucucugggcuugccagggcucuccgaaccuagcuagcauccucuucaauuccaacuagaaagcuuaccaugaaaugggucacauucauaagccuacucuuccucuucagcucagccuacuccgcagacggaaacccagacccaaacgcaaacccaaacguagacccaaacgcaaacccaaacguagacccaaacgcaaacccaaacguagacccaaacgcaaacccaaacgcaaacccaaacgcaaacccaaacgcaaacccaaacgcaaacccaaacgcaaacccaaacgcaaacccaaacgcaaacccaaacgcaaacccaaacgcaaaccccaacgcaaacccaaacgcaaacccaaacgcaaacccaaacgcaaacccaaacgcaaacccaaacgcaaacccauaaggacuagucccuguucccagagcccacuuuuuuuucuuuuuuugaaauaaaauagccugucuuucagaucuaaaaaaaaaaaaaaaaaaaaaaaaaaaaaaaaaaaaaaaaaaaaaaaaaaaaaaaaaaaaaaaaugcaucccccccccccccccccccccccccccccccaaaggcucuuuucagagccaccagaauu

SEQ ID NO: 6551 - RNA, 955 nt, Artificial Sequence
  mRNA Design a-3 (A64-N5-C30-hSL-N5) comprising derived and/or modified sequence from Pf(3D7)__XP_001351122.1__HsALB_Pf-CSP(98-272) (opt11)
aggagagggcgcuuggcuugcaaggacccugagcugcggcauugaagcacacccaacccaacucgacugaagucagccucacugaaccggaucugagaaucuucucucucugggcuugccagggcucuccgaaccuagcuagcauccucuucaauuccaacuagaaagcuuaccaugaaauggguaaccuucauaagccuacucuuccuauucucaucagccuacagcgcagacggaaacccagaccccaacgcaaacccaaacguagacccaaacgcaaacccaaacguagaccccaacgcaaacccaaacguagacccaaacgccaacccaaacgcaaacccaaacgcaaacccaaacgccaacccaaacgcaaacccaaacgccaacccaaacgcaaacccaaacgcaaacccaaacgcaaacccaaacgcaaacccaaacgcaaacccaaacgcaaacccaaacgccaacccaaacgcaaacccaaacgcaaacccaaacgcaaacccaaacgccaaccccaacguagacccaaacgccaaccccaacgcaaacccaaacgcaaacccaaacgcaaacccaaacgcaaacccaaacgcaaacccaaacgcaaacccaaacgcaaacccaaacgcaaacccgaacgccaacccaaacgcaaacccaaacgcaaacccaaacgcaaacccaaacgcaaacccaaacgcaaaccccaacgcaaacccaaacgcaaacccaaacgcaaacccauaaggacuagucccuguucccagagcccacuuuuuuuucuuuuuuugaaauaaaauagccugucuuucagaucuaaaaaaaaaaaaaaaaaaaaaaaaaaaaaaaaaaaaaaaaaaaaaaaaaaaaaaaaaaaaaaaaugcaucccccccccccccccccccccccccccccccaaaggcucuuuucagagccaccagaauu

SEQ ID NO: 6552 - RNA, 1261 nt, Artificial Sequence
  mRNA Design a-3 (A64-N5-C30-hSL-N5) comprising derived and/or modified sequence from Pf(3D7)__XP_001351122.1__HsALB_Pf-CSP(98-374) (opt11)
aggagagggcgcuuggcuugcaaggacccugagcugcggcauugaagcacacccaacccaacucgacugaagucagccucacugaaccggaucugagaaucuucucucucugggcuugccagggcucuccgaaccuagcuagcauccucuucaauuccaacuagaaagcuuaccaugaaauggguaaccuucauaucccuacucuuccuuuucuccucggccuacuccgcagacggaaacccagacccaaacgcaaaccccaacguagacccaaacgcaaacccaaauguagacccaaacgcaaacccaaacguggacccaaacgcgaaccccaacgcaaaccccaacgcaaacccaaacgccaacccaaacgcaaacccaaacgccaacccaaacgcaaaccccaacgccaaccccaacgccaacccaaacgcaaacccaaacgcaaaccccaacgcaaacccaaacgccaacccaaacgccaacccaaacgccaaccccaacgcaaacccaaacgccaacccaaacguagacccaaacgcaaacccaaacgcaaacccaaacgcaaaccccaacgcaaaccccaacgcaaacccaaacgcaaacccaaacgcaaacccaaacgcaaacccaaacgccaacccaaacgcgaaccccaacgccaacccaaacgcaaacccaaacgccaacccaaacgccaacccaaacgcaaaccccaacgcaaacccaaacgcaaacccaaacgccaacccgaacaaaaacaaccaaggcaacggccaaggacacaacaugccaaacgaccccaaccgcaacguagacgaaaacgccaacgcaaacuccgcagucaaaaacaacaacaacgaagaacccuccgacaaacacauaaaagaauaccuaaacaaaauccaaaacucgcucucaaccgaauggucccccugcuccgucaccugcggcaacggcauccaaguacgcaucaaaccaggcucagcaaacaaaccaaaagacgaacucgacuacgccaacgacauagaaaaaaaaauaugcaaaauggagaaaugcuaaggacuagucccuguucccagagcccacuuuuuuuucuuuuuuugaaauaaaauagccugucuuucagaucuaaaaaaaaaaaaaaaaaaaaaaaaaaaaaaaaaaaaaaaaaaaaaaaaaaaaaaaaaaaaaaaaugcaucccccccccccccccccccccccccccccccaaaggcucuuuucagagccaccagaauu

SEQ ID NO: 6553 - RNA, 1330 nt, Artificial Sequence
  mRNA Design a-3 (A64-N5-C30-hSL-N5) comprising derived and/or modified sequence from Pf(3D7)__XP_001351122.1__HsALB_Pf-CSP(98-397) (opt11)
aggagagggcgcuuggcuugcaaggacccugagcugcggcauugaagcacacccaacccaacucgacugaagucagccucacugaaccggaucugagaaucuucucucucugggcuugccagggcucuccgaaccuagcuagcauccucuucaauuccaacuagaaagcuuaccaugaaauggguaaccuucaucagccuacuauuccuauucagcuccgccuacagcgccgacggaaacccagacccaaacgccaaccccaacgucgacccaaacgccaaccccaacguagacccaaacgccaaccccaacgucgaccccaacgccaaccccaacgccaacccaaacgccaacccuaacgccaacccaaacgccaacccgaacgccaaccccaacgcgaacccaaacgccaacccaaacgcaaaccccaacgccaaccccaacgccaaccccaacgcaaaccccaacgcaaacccaaacgccaacccaaacgccaaccccaacgccaaccccaaugcaaacccaaacgucgaccccaacgccaacccaaacgccaaccccaacgccaaccccaacgccaaccccaacgcaaaccccaacgccaaccccaacgcgaaccccaacgccaaccccaacgccaacccaaacgccaaccccaacgccaaccccaacgccaaccccaacgcuaaccccaacgcaaacccaaacgccaacccaaacgccaacccaaacgccaaccccaacgccaacccaaacaaaaacaaccaaggcaacggacaaggacacaacaugccaaacgaccccaaccgcaacgucgacgaaaaugccaacgccaacuccgccgucaaaaacaacaacaacgaagaacccuccgacaaacacaucaaagaauaccuaaacaaaauacaaaacucucucucaaccgaauggucccccugcuccgucacaugcggcaacggcauccaaguccgcaucaaaccaggaucagccaauaaacccaaagacgaacucgacuacgccaacgacauagaaaaaaaaaucugcaaaauggaaaaaugcagcucagucuucaacgucgucaacuccucaaucggacuuauaaugguccuauccuuccucuuccuuaacuaaggacuagucccuguucccagagcccacuuuuuuuucuuuuuuugaaauaaaauagccugucuuucagaucuaaaaaaaaaaaaaaaaaaaaaaaaaaaaaaaaaaaaaaaaaaaaaaaaaaaaaaaaaaaaaaaaugcaucccccccccccccccccccccccccccccccaaaggcucuuuucagagccaccagaauu

SEQ ID NO: 6554 - RNA, 1657 nt, Artificial Sequence
  mRNA Design a-3 (A64-N5-C30-hSL-N5) comprising derived and/or modified sequence from Pf(3D7)__XP_001351122.1__HsALB_Pf-CSP(199-377)_L(PVTN)_HBsAg (opt11)
aggagagggcgcuuggcuugcaaggacccugagcugcggcauugaagcacacccaacccaacucgacugaagucagccucacugaaccggaucugagaaucuucucucucugggcuugccagggcucuccgaaccuagcuagcauccucuucaauuccaacuagaaagcuuaccaugaaaugggucacauucaucucgcuccucuuccuauucuccuccgccuacuccgacccuaacgccaaucccaacgccaaccccaacgccaaccccaacgccaaccccaacgccaaccccaaugcaaacccaaacgcaaaccccaacgccaaccccaacgcaaacccaaaugcaaaccccaacgcaaaccccaacgccaaccccaaugccaaccccaacgcuaaccccaacgccaauccaaacgccaaccccaacgcaaaccccaacgccaacccuaacaaaaauaaccaaggcaacggccaaggacacaacaugcccaacgaccccaaccgaaaugucgacgaaaacgcuaacgcuaacagcgccgucaaaaacaacaacaacgaagaacccuccgacaaacacauuaaagaauaccucaacaaaauccaaaacucccucuccaccgaauggucccccugcucuguaacuugcggcaacggcauccaaguccgcauaaaacccggaucagcaaacaaacccaaagacgaacucgacuacgcaaacgacauugagaagaaaaucugcaaaauggaaaaaugcucaucaguacccgucacuaacauggaaaacaucaccuccggcuuccucggcccccuccuaguccuacaagccgguuucuuccuucuuacacgcauccuaaccaucccacaaucccuagacuccugguggacaucuuuaaacuuccuuggaggauccccugucugccucggccaaaacucccaauccccaaccucuaaccacucucccacauccugcccucccauaugccccgguuaccgcuggaugugccuccgccgcuucaucaucuuccucuucauacuccucuuaugccucaucuuccuccucguacuacucgacuaccaagguaugcuacccguaugcccucucauccccggcuccaccacaaccaacaccggccccugcaaaacaugcaccacccccgcacagggcaauuccauguuccccuccugcuguugcaccaaacccacagacggcaacuguaccugcauccccauccccuccucuugggcauuugccaaauaccucugggaaugggccuccguccgauucucuuggcuuucacuccucguucccuucguacaaugguucgucggccuaucacccaccgucuggcucuccgccaucuggaugaugugguacuggggcccuucacuuuacuccauagucagccccuucauaccacuccuccccaucuucuucugccuauggguauacaucuaaggacuagucccuguucccagagcccacuuuuuuuucuuuuuuugaaauaaaauagccugucuuucagaucuaaaaaaaaaaaaaaaaaaaaaaaaaaaaaaaaaaaaaaaaaaaaaaaaaaaaaaaaaaaaaaaaugcaucccccccccccccccccccccccccccccccaaaggcucuuuucagagccaccagaauu

SEQ ID NO: 6555 - RNA, 1435 nt, Artificial Sequence
  mRNA Design a-1 (hSL-A64-N5) comprising derived and/or modified sequence from Pf(3D7)__XP_001351122.1__Pf-CSP (wt)
aggagagucccgcagucggcguccagcggcucugcuuguucgugugugugucguugcaggccuuauucaagcuuaccaugaugagaaaauuagcuauuuuaucuguuucuuccuuuuuauuuguugaggccuuauuccaggaauaccagugcuauggaaguucgucaaacacaaggguucuaaaugaauuaaauuaugauaaugcaggcacuaauuuauauaaugaauuagaaaugaauuauuaugggaaacaggaaaauugguauagucuuaaaaaaaauaguagaucacuuggagaaaaugaugauggaaauaacgaagacaacgagaaauuaaggaaaccaaaacauaaaaaauuaaagcaaccagcggaugguaauccugauccaaaugcaaacccaaauguagaucccaaugccaacccaaauguagauccaaaugcaaacccaaauguagauccaaaugcaaacccaaaugcaaacccaaaugcaaacccaaaugcaaacccaaaugcaaacccaaaugcaaacccaaaugcaaacccaaaugcaaacccaaaugcaaacccaaaugcaaacccaaaugcaaacccaaaugcaaacccaaaugcaaacccaaaugcaaaccccaaugcaaauccuaaugcaaacccaaaugcaaacccaaacguagauccuaaugcaaauccaaaugcaaacccaaacgcaaaccccaaugcaaauccuaaugcaaaccccaaugcaaauccuaaugcaaauccuaaugccaauccaaaugcaaauccaaaugcaaacccaaacgcaaaccccaaugcaaauccuaaugccaauccaaaugcaaauccaaaugcaaacccaaaugcaaacccaaaugcaaaccccaaugcaaauccuaauaaaaacaaucaagguaauggacaaggucacaauaugccaaaugacccaaaccgaaauguagaugaaaaugcuaaugccaacagugcuguaaaaaauaauaauaacgaagaaccaagugauaagcacauaaaagaauauuuaaacaaaauacaaaauucucuuucaacugaaugguccccauguaguguaacuuguggaaaugguauucaaguuagaauaaagccuggcucugcuaauaaaccuaaagacgaauuagauuaugcaaaugauauugaaaaaaaaauuuguaaaauggaaaaauguuccaguguguuuaaugucguaaauaguucaauaggauuaauaaugguauuauccuucuuguuccuuaauuagggacuagucccuguucccagagcccacuuuuuuuucuuuuuuugaaauaaaauagccugucuuucagaucucaaaggcucuuuucagagccaccaaaaaaaaaaaaaaaaaaaaaaaaaaaaaaaaaaaaaaaaaaaaaaaaaaaaaaaaaaaaaaaaagaauu

SEQ ID NO: 6556 - RNA, 1366 nt, Artificial Sequence
  mRNA Design a-1 (hSL-A64-N5) comprising derived and/or modified sequence from Pf(3D7)__XP_001351122.1__Pf-CSP(1-374) (wt)
aggagagucccgcagucggcguccagcggcucugcuuguucgugugugugucguugcaggccuuauucaagcuuaccaugaugagaaaauuagcuauuuuaucuguuucuuccuuuuuauuuguugaggccuuauuccaggaauaccagugcuauggaaguucgucaaacacaaggguucuaaaugaauuaaauuaugauaaugcaggcacuaauuuauauaaugaauuagaaaugaauuauuaugggaaacaggaaaauugguauagucuuaaaaaaaauaguagaucacuuggagaaaaugaugauggaaauaacgaagacaacgagaaauuaaggaaaccaaaacauaaaaaauuaaagcaaccagcggaugguaauccugauccaaaugcaaacccaaauguagaucccaaugccaacccaaauguagauccaaaugcaaacccaaauguagauccaaaugcaaacccaaaugcaaacccaaaugcaaacccaaaugcaaacccaaaugcaaacccaaaugcaaacccaaaugcaaacccaaaugcaaacccaaaugcaaacccaaaugcaaacccaaaugcaaacccaaaugcaaacccaaaugcaaacccaaaugcaaaccccaaugcaaauccuaaugcaaacccaaaugcaaacccaaacguagauccuaaugcaaauccaaaugcaaacccaaacgcaaaccccaaugcaaauccuaaugcaaaccccaaugcaaauccuaaugcaaauccuaaugccaauccaaaugcaaauccaaaugcaaacccaaacgcaaaccccaaugcaaauccuaaugccaauccaaaugcaaauccaaaugcaaacccaaaugcaaacccaaaugcaaaccccaaugcaaauccuaauaaaaacaaucaagguaauggacaaggucacaauaugccaaaugacccaaaccgaaauguagaugaaaaugcuaaugccaacagugcuguaaaaaauaauaauaacgaagaaccaagugauaagcacauaaaagaauauuuaaacaaaauacaaaauucucuuucaacugaaugguccccauguaguguaacuuguggaaaugguauucaaguuagaauaaagccuggcucugcuaauaaaccuaaagacgaauuagauuaugcaaaugauauugaaaaaaaaauuuguaaaauggaaaaauguugaggacuagucccuguucccagagcccacuuuuuuuucuuuuuuugaaauaaaauagccugucuuucagaucucaaaggcucuuuucagagccaccaaaaaaaaaaaaaaaaaaaaaaaaaaaaaaaaaaaaaaaaaaaaaaaaaaaaaaaaaaaaaaaaagaauu

SEQ ID NO: 6557 - RNA, 1219 nt, Artificial Sequence
  mRNA Design a-1 (hSL-A64-N5) comprising derived and/or modified sequence from Pf(3D7)__XP_001351122.1__Pf-CSP(1-325) (wt)
aggagagucccgcagucggcguccagcggcucugcuuguucgugugugugucguugcaggccuuauucaagcuuaccaugaugagaaaauuagcuauuuuaucuguuucuuccuuuuuauuuguugaggccuuauuccaggaauaccagugcuauggaaguucgucaaacacaaggguucuaaaugaauuaaauuaugauaaugcaggcacuaauuuauauaaugaauuagaaaugaauuauuaugggaaacaggaaaauugguauagucuuaaaaaaaauaguagaucacuuggagaaaaugaugauggaaauaacgaagacaacgagaaauuaaggaaaccaaaacauaaaaaauuaaagcaaccagcggaugguaauccugauccaaaugcaaacccaaauguagaucccaaugccaacccaaauguagauccaaaugcaaacccaaauguagauccaaaugcaaacccaaaugcaaacccaaaugcaaacccaaaugcaaacccaaaugcaaacccaaaugcaaacccaaaugcaaacccaaaugcaaacccaaaugcaaacccaaaugcaaacccaaaugcaaacccaaaugcaaacccaaaugcaaacccaaaugcaaaccccaaugcaaauccuaaugcaaacccaaaugcaaacccaaacguagauccuaaugcaaauccaaaugcaaacccaaacgcaaaccccaaugcaaauccuaaugcaaaccccaaugcaaauccuaaugcaaauccuaaugccaauccaaaugcaaauccaaaugcaaacccaaacgcaaaccccaaugcaaauccuaaugccaauccaaaugcaaauccaaaugcaaacccaaaugcaaacccaaaugcaaaccccaaugcaaauccuaauaaaaacaaucaagguaauggacaaggucacaauaugccaaaugacccaaaccgaaauguagaugaaaaugcuaaugccaacagugcuguaaaaaauaauaauaacgaagaaccaagugauaagcacauaaaagaauauuuaaacaaaauacaaaauugaggacuagucccuguucccagagcccacuuuuuuuucuuuuuuugaaauaaaauagccugucuuucagaucucaaaggcucuuuucagagccaccaaaaaaaaaaaaaaaaaaaaaaaaaaaaaaaaaaaaaaaaaaaaaaaaaaaaaaaaaaaaaaaaagaauu

SEQ ID NO: 6558 - RNA, 1435 nt, Artificial Sequence
  mRNA Design a-1 (hSL-A64-N5) comprising derived and/or modified sequence from Pf(3D7)__XP_001351122.1__Pf-CSP (opt1)
aggagagucccgcagucggcguccagcggcucugcuuguucgugugugugucguugcaggccuuauucaagcuuaccaugaugcgcaagcuggccauccucagcguguccagcuuccuguucgucgaggcccuguuccaggaguaccagugcuacggcuccagcuccaacacccgggugcucaacgagcugaacuacgacaacgcggggaccaaccuguacaacgagcucgagaugaacuacuacggcaagcaggagaacugguacagccugaagaagaacucccgcagccugggggagaacgacgacggcaacaacgaggacaacgagaagcuccggaagcccaagcacaagaagcugaagcagccggccgacgggaaccccgaccccaacgccaaccccaacguggacccgaacgccaaccccaacgucgaccccaacgccaaccccaacguggacccgaacgcgaaccccaacgccaaccccaacgccaaccccaacgccaacccgaacgcgaaccccaacgccaaccccaacgccaaccccaacgccaacccgaacgccaaccccaacgcgaaccccaacgccaaccccaacgccaacccgaacgccaaccccaacgccaaccccaacgcgaaccccaacgccaacccgaacgccaaccccaacguggaccccaacgccaaccccaacgccaacccgaacgcgaaccccaacgccaaccccaacgccaacccgaacgccaaccccaacgccaaccccaacgcgaaccccaacgccaacccgaacgccaaccccaacgccaaccccaacgcgaaccccaacgccaacccgaacgccaaccccaacgccaaccccaacgccaaccccaacgcgaacccgaacgccaaccccaacaagaacaaccagggcaacggccaggggcacaacaugcccaacgaccccaaccgcaacgucgacgagaacgccaacgccaacuccgccgugaagaacaacaacaacgaggagccgagcgacaagcacaucaaggaguaccugaacaagauccagaacucccucagcacggaguggucccccugcagcgugaccugcggcaacgggauccagguccggaucaagcccggcuccgcgaacaagcccaaggacgagcuggacuacgccaacgacaucgagaagaagaucugcaagauggagaagugcagcuccguguucaacguggucaacagcuccaucgggcugaucauggugcucagcuuccuguuccugaacugaggacuagucccuguucccagagcccacuuuuuuuucuuuuuuugaaauaaaauagccugucuuucagaucucaaaggcucuuuucagagccaccaaaaaaaaaaaaaaaaaaaaaaaaaaaaaaaaaaaaaaaaaaaaaaaaaaaaaaaaaaaaaaaaagaauu

SEQ ID NO: 6559 - RNA, 1366 nt, Artificial Sequence
  mRNA Design a-1 (hSL-A64-N5) comprising derived and/or modified sequence from Pf(3D7)__XP_001351122.1__Pf-CSP(1-374) (opt1)
aggagagucccgcagucggcguccagcggcucugcuuguucgugugugugucguugcaggccuuauucaagcuuaccaugaugcgcaagcuggccauccucagcguguccagcuuccuguucgucgaggcccuguuccaggaguaccagugcuacggcuccagcuccaacacccgggugcucaacgagcugaacuacgacaacgcggggaccaaccuguacaacgagcucgagaugaacuacuacggcaagcaggagaacugguacagccugaagaagaacucccgcagccugggggagaacgacgacggcaacaacgaggacaacgagaagcuccggaagcccaagcacaagaagcugaagcagccggccgacgggaaccccgaccccaacgccaaccccaacguggacccgaacgccaaccccaacgucgaccccaacgccaaccccaacguggacccgaacgcgaaccccaacgccaaccccaacgccaaccccaacgccaacccgaacgcgaaccccaacgccaaccccaacgccaaccccaacgccaacccgaacgccaaccccaacgcgaaccccaacgccaaccccaacgccaacccgaacgccaaccccaacgccaaccccaacgcgaaccccaacgccaacccgaacgccaaccccaacguggaccccaacgccaaccccaacgccaacccgaacgcgaaccccaacgccaaccccaacgccaacccgaacgccaaccccaacgccaaccccaacgcgaaccccaacgccaacccgaacgccaaccccaacgccaaccccaacgcgaaccccaacgccaacccgaacgccaaccccaacgccaaccccaacgccaaccccaacgcgaacccgaacgccaaccccaacaagaacaaccagggcaacggccaggggcacaacaugcccaacgaccccaaccgcaacgucgacgagaacgccaacgccaacuccgccgugaagaacaacaacaacgaggagccgagcgacaagcacaucaaggaguaccugaacaagauccagaacucccucagcacggaguggucccccugcagcgugaccugcggcaacgggauccagguccggaucaagcccggcuccgcgaacaagcccaaggacgagcuggacuacgccaacgacaucgagaagaagaucugcaagauggagaagugcugaggacuagucccuguucccagagcccacuuuuuuuucuuuuuuugaaauaaaauagccugucuuucagaucucaaaggcucuuuucagagccaccaaaaaaaaaaaaaaaaaaaaaaaaaaaaaaaaaaaaaaaaaaaaaaaaaaaaaaaaaaaaaaaaagaauu

SEQ ID NO: 6560 - RNA, 1219 nt, Artificial Sequence
  mRNA Design a-1 (hSL-A64-N5) comprising derived and/or modified sequence from Pf(3D7)__XP_001351122.1__Pf-CSP(1-325) (opt1)
aggagagucccgcagucggcguccagcggcucugcuuguucgugugugugucguugcaggccuuauucaagcuuaccaugaugcgcaagcuggccauccucagcguguccagcuuccuguucgucgaggcccuguuccaggaguaccagugcuacggcuccagcuccaacacccgggugcucaacgagcugaacuacgacaacgcggggaccaaccuguacaacgagcucgagaugaacuacuacggcaagcaggagaacugguacagccugaagaagaacucccgcagccugggggagaacgacgacggcaacaacgaggacaacgagaagcuccggaagcccaagcacaagaagcugaagcagccggccgacgggaaccccgaccccaacgccaaccccaacguggacccgaacgccaaccccaacgucgaccccaacgccaaccccaacguggacccgaacgcgaaccccaacgccaaccccaacgccaaccccaacgccaacccgaacgcgaaccccaacgccaaccccaacgccaaccccaacgccaacccgaacgccaaccccaacgcgaaccccaacgccaaccccaacgccaacccgaacgccaaccccaacgccaaccccaacgcgaaccccaacgccaacccgaacgccaaccccaacguggaccccaacgccaaccccaacgccaacccgaacgcgaaccccaacgccaaccccaacgccaacccgaacgccaaccccaacgccaaccccaacgcgaaccccaacgccaacccgaacgccaaccccaacgccaaccccaacgcgaaccccaacgccaacccgaacgccaaccccaacgccaaccccaacgccaaccccaacgcgaacccgaacgccaaccccaacaagaacaaccagggcaacggccaggggcacaacaugcccaacgaccccaaccgcaacgucgacgagaacgccaacgccaacuccgccgugaagaacaacaacaacgaggagccgagcgacaagcacaucaaggaguaccugaacaagauccagaacugaggacuagucccuguucccagagcccacuuuuuuuucuuuuuuugaaauaaaauagccugucuuucagaucucaaaggcucuuuucagagccaccaaaaaaaaaaaaaaaaaaaaaaaaaaaaaaaaaaaaaaaaaaaaaaaaaaaaaaaaaaaaaaaaagaauu

SEQ ID NO: 6561 - RNA, 1435 nt, Artificial Sequence
  mRNA Design a-1 (hSL-A64-N5) comprising derived and/or modified sequence from Pf(3D7)__XP_001351122.1__HsALB_Pf-CSP(19-397) (opt1) R8523/R8525
aggagagucccgcagucggcguccagcggcucugcuuguucgugugugugucguugcaggccuuauucaagcuuaccaugaagugggugaccuucaucagccugcucuuccuguucuccagcgccuacucccuguuccaggaguaccagugcuacggcuccagcuccaacacccgggugcucaacgagcugaacuacgacaacgcggggaccaaccuguacaacgagcucgagaugaacuacuacggcaagcaggagaacugguacagccugaagaagaacucccgcagccugggggagaacgacgacggcaacaacgaggacaacgagaagcuccggaagcccaagcacaagaagcugaagcagccggccgacgggaaccccgaccccaacgccaaccccaacguggacccgaacgccaaccccaacgucgaccccaacgccaaccccaacguggacccgaacgcgaaccccaacgccaaccccaacgccaaccccaacgccaacccgaacgcgaaccccaacgccaaccccaacgccaaccccaacgccaacccgaacgccaaccccaacgcgaaccccaacgccaaccccaacgccaacccgaacgccaaccccaacgccaaccccaacgcgaaccccaacgccaacccgaacgccaaccccaacguggaccccaacgccaaccccaacgccaacccgaacgcgaaccccaacgccaaccccaacgccaacccgaacgccaaccccaacgccaaccccaacgcgaaccccaacgccaacccgaacgccaaccccaacgccaaccccaacgcgaaccccaacgccaacccgaacgccaaccccaacgccaaccccaacgccaaccccaacgcgaacccgaacgccaaccccaacaagaacaaccagggcaacggccaggggcacaacaugcccaacgaccccaaccgcaacgucgacgagaacgccaacgccaacuccgccgugaagaacaacaacaacgaggagccgagcgacaagcacaucaaggaguaccugaacaagauccagaacucccucagcacggaguggucccccugcagcgugaccugcggcaacgggauccagguccggaucaagcccggcuccgcgaacaagcccaaggacgagcuggacuacgccaacgacaucgagaagaagaucugcaagauggagaagugcagcuccguguucaacguggucaacagcuccaucgggcugaucauggugcucagcuuccuguuccugaacugaggacuagucccuguucccagagcccacuuuuuuuucuuuuuuugaaauaaaauagccugucuuucagaucucaaaggcucuuuucagagccaccaaaaaaaaaaaaaaaaaaaaaaaaaaaaaaaaaaaaaaaaaaaaaaaaaaaaaaaaaaaaaaaaagaauu

SEQ ID NO: 6562 - RNA, 1453 nt, Artificial Sequence
  mRNA Design a-1 (hSL-A64-N5) comprising derived and/or modified sequence from Pf(3D7)__XP_001351122.1__HsIns-iso1_Pf-CSP(19-397) (opt1)
aggagagucccgcagucggcguccagcggcucugcuuguucgugugugugucguugcaggccuuauucaagcuuaccauggcccuguggaugcgccuccugccccugcucgcccugcuggcgcucuggggcccggaccccgccgccgcccuguuccaggaguaccagugcuacggcuccagcuccaacacccgggugcucaacgagcugaacuacgacaacgcggggaccaaccuguacaacgagcucgagaugaacuacuacggcaagcaggagaacugguacagccugaagaagaacucccgcagccugggggagaacgacgacggcaacaacgaggacaacgagaagcuccggaagcccaagcacaagaagcugaagcagccggccgacgggaaccccgaccccaacgccaaccccaacguggacccgaacgccaaccccaacgucgaccccaacgccaaccccaacguggacccgaacgcgaaccccaacgccaaccccaacgccaaccccaacgccaacccgaacgcgaaccccaacgccaaccccaacgccaaccccaacgccaacccgaacgccaaccccaacgcgaaccccaacgccaaccccaacgccaacccgaacgccaaccccaacgccaaccccaacgcgaaccccaacgccaacccgaacgccaaccccaacguggaccccaacgccaaccccaacgccaacccgaacgcgaaccccaacgccaaccccaacgccaacccgaacgccaaccccaacgccaaccccaacgcgaaccccaacgccaacccgaacgccaaccccaacgccaaccccaacgcgaaccccaacgccaacccgaacgccaaccccaacgccaaccccaacgccaaccccaacgcgaacccgaacgccaaccccaacaagaacaaccagggcaacggccaggggcacaacaugcccaacgaccccaaccgcaacgucgacgagaacgccaacgccaacuccgccgugaagaacaacaacaacgaggagccgagcgacaagcacaucaaggaguaccugaacaagauccagaacucccucagcacggaguggucccccugcagcgugaccugcggcaacgggauccagguccggaucaagcccggcuccgcgaacaagcccaaggacgagcuggacuacgccaacgacaucgagaagaagaucugcaagauggagaagugcagcuccguguucaacguggucaacagcuccaucgggcugaucauggugcucagcuuccuguuccugaacugaggacuagucccuguucccagagcccacuuuuuuuucuuuuuuugaaauaaaauagccugucuuucagaucucaaaggcucuuuucagagccaccaaaaaaaaaaaaaaaaaaaaaaaaaaaaaaaaaaaaaaaaaaaaaaaaaaaaaaaaaaaaaaaaagaauu

SEQ ID NO: 6563 - RNA, 1432 nt, Artificial Sequence
  mRNA Design a-1 (hSL-A64-N5) comprising derived and/or modified sequence from Pf(3D7)__XP_001351122.1__HsSPARC_Pf-CSP(19-397) (opt1)
aggagagucccgcagucggcguccagcggcucugcuuguucgugugugugucguugcaggccuuauucaagcuuaccaugcgcgccuggaucuucuuccugcucugccuggccggccgggcccuggcccuguuccaggaguaccagugcuacggcuccagcuccaacacccgggugcucaacgagcugaacuacgacaacgcggggaccaaccuguacaacgagcucgagaugaacuacuacggcaagcaggagaacugguacagccugaagaagaacucccgcagccugggggagaacgacgacggcaacaacgaggacaacgagaagcuccggaagcccaagcacaagaagcugaagcagccggccgacgggaaccccgaccccaacgccaaccccaacguggacccgaacgccaaccccaacgucgaccccaacgccaaccccaacguggacccgaacgcgaaccccaacgccaaccccaacgccaaccccaacgccaacccgaacgcgaaccccaacgccaaccccaacgccaaccccaacgccaacccgaacgccaaccccaacgcgaaccccaacgccaaccccaacgccaacccgaacgccaaccccaacgccaaccccaacgcgaaccccaacgccaacccgaacgccaaccccaacguggaccccaacgccaaccccaacgccaacccgaacgcgaaccccaacgccaaccccaacgccaacccgaacgccaaccccaacgccaaccccaacgcgaaccccaacgccaacccgaacgccaaccccaacgccaaccccaacgcgaaccccaacgccaacccgaacgccaaccccaacgccaaccccaacgccaaccccaacgcgaacccgaacgccaaccccaacaagaacaaccagggcaacggccaggggcacaacaugcccaacgaccccaaccgcaacgucgacgagaacgccaacgccaacuccgccgugaagaacaacaacaacgaggagccgagcgacaagcacaucaaggaguaccugaacaagauccagaacucccucagcacggaguggucccccugcagcgugaccugcggcaacgggauccagguccggaucaagcccggcuccgcgaacaagcccaaggacgagcuggacuacgccaacgacaucgagaagaagaucugcaagauggagaagugcagcuccguguucaacguggucaacagcuccaucgggcugaucauggugcucagcuuccuguuccugaacugaggacuagucccuguucccagagcccacuuuuuuuucuuuuuuugaaauaaaauagccugucuuucagaucucaaaggcucuuuucagagccaccaaaaaaaaaaaaaaaaaaaaaaaaaaaaaaaaaaaaaaaaaaaaaaaaaaaaaaaaaaaaaaaaagaauu

SEQ ID NO: 6564 - RNA, 1435 nt, Artificial Sequence
  mRNA Design a-1 (hSL-A64-N5) comprising derived and/or modified sequence from Pf(3D7)__XP_001351122.1__IgE_Pf-CSP(19-397) (opt1)
aggagagucccgcagucggcguccagcggcucugcuuguucgugugugugucguugcaggccuuauucaagcuuaccauggacuggaccuggauccuguuccucguggccgccgcgacccgcguccacagccuguuccaggaguaccagugcuacggcuccagcuccaacacccgggugcucaacgagcugaacuacgacaacgcggggaccaaccuguacaacgagcucgagaugaacuacuacggcaagcaggagaacugguacagccugaagaagaacucccgcagccugggggagaacgacgacggcaacaacgaggacaacgagaagcuccggaagcccaagcacaagaagcugaagcagccggccgacgggaaccccgaccccaacgccaaccccaacguggacccgaacgccaaccccaacgucgaccccaacgccaaccccaacguggacccgaacgcgaaccccaacgccaaccccaacgccaaccccaacgccaacccgaacgcgaaccccaacgccaaccccaacgccaaccccaacgccaacccgaacgccaaccccaacgcgaaccccaacgccaaccccaacgccaacccgaacgccaaccccaacgccaaccccaacgcgaaccccaacgccaacccgaacgccaaccccaacguggaccccaacgccaaccccaacgccaacccgaacgcgaaccccaacgccaaccccaacgccaacccgaacgccaaccccaacgccaaccccaacgcgaaccccaacgccaacccgaacgccaaccccaacgccaaccccaacgcgaaccccaacgccaacccgaacgccaaccccaacgccaaccccaacgccaaccccaacgcgaacccgaacgccaaccccaacaagaacaaccagggcaacggccaggggcacaacaugcccaacgaccccaaccgcaacgucgacgagaacgccaacgccaacuccgccgugaagaacaacaacaacgaggagccgagcgacaagcacaucaaggaguaccugaacaagauccagaacucccucagcacggaguggucccccugcagcgugaccugcggcaacgggauccagguccggaucaagcccggcuccgcgaacaagcccaaggacgagcuggacuacgccaacgacaucgagaagaagaucugcaagauggagaagugcagcuccguguucaacguggucaacagcuccaucgggcugaucauggugcucagcuuccuguuccugaacugaggacuagucccuguucccagagcccacuuuuuuuucuuuuuuugaaauaaaauagccugucuuucagaucucaaaggcucuuuucagagccaccaaaaaaaaaaaaaaaaaaaaaaaaaaaaaaaaaaaaaaaaaaaaaaaaaaaaaaaaaaaaaaaaagaauu

SEQ ID NO: 6565 - RNA, 1600 nt, Artificial Sequence
  mRNA Design a-1 (hSL-A64-N5) comprising derived and/or modified sequence from Pf(3D7)__XP_001351122.1__Pf-CSP_L(G4SG4)_TM domain HA (opt1)
aggagagucccgcagucggcguccagcggcucugcuuguucgugugugugucguugcaggccuuauucaagcuuaccaugaugcgcaagcuggccauccucagcguguccagcuuccuguucgucgaggcccuguuccaggaguaccagugcuacggcuccagcuccaacacccgggugcucaacgagcugaacuacgacaacgcggggaccaaccuguacaacgagcucgagaugaacuacuacggcaagcaggagaacugguacagccugaagaagaacucccgcagccugggggagaacgacgacggcaacaacgaggacaacgagaagcuccggaagcccaagcacaagaagcugaagcagccggccgacgggaaccccgaccccaacgccaaccccaacguggacccgaacgccaaccccaacgucgaccccaacgccaaccccaacguggacccgaacgcgaaccccaacgccaaccccaacgccaaccccaacgccaacccgaacgcgaaccccaacgccaaccccaacgccaaccccaacgccaacccgaacgccaaccccaacgcgaaccccaacgccaaccccaacgccaacccgaacgccaaccccaacgccaaccccaacgcgaaccccaacgccaacccgaacgccaaccccaacguggaccccaacgccaaccccaacgccaacccgaacgcgaaccccaacgccaaccccaacgccaacccgaacgccaaccccaacgccaaccccaacgcgaaccccaacgccaacccgaacgccaaccccaacgccaaccccaacgcgaaccccaacgccaacccgaacgccaaccccaacgccaaccccaacgccaaccccaacgcgaacccgaacgccaaccccaacaagaacaaccagggcaacggccaggggcacaacaugcccaacgaccccaaccgcaacgucgacgagaacgccaacgccaacuccgccgugaagaacaacaacaacgaggagccgagcgacaagcacaucaaggaguaccugaacaagauccagaacucccucagcacggaguggucccccugcagcgugaccugcggcaacgggauccagguccggaucaagcccggcuccgcgaacaagcccaaggacgagcuggacuacgccaacgacaucgagaagaagaucugcaagauggagaagugcagcuccguguucaacguggucaacagcuccaucgggcugaucauggugcucagcuuccuguuccugaacggcgggggcgggagcggcgggggcggcaagcucgaguccacgcggaucuaccagauccuggcgaucuacagcaccgucgccagcucccuggugcucguggucagccugggggccaucuccuucuggaugugcagcaacggcucccugcagugccgcaucugcaucugaggacuagucccuguucccagagcccacuuuuuuuucuuuuuuugaaauaaaauagccugucuuucagaucucaaaggcucuuuucagagccaccaaaaaaaaaaaaaaaaaaaaaaaaaaaaaaaaaaaaaaaaaaaaaaaaaaaaaaaaaaaaaaaaagaauu

SEQ ID NO: 6566 - RNA, 1474 nt, Artificial Sequence
  mRNA Design a-1 (hSL-A64-N5) comprising derived and/or modified sequence from Pf(3D7)__XP_001351122.1__Pf-CSP(199-377)_L(PVTN)_HBsAg (opt1)
aggagagucccgcagucggcguccagcggcucugcuuguucgugugugugucguugcaggccuuauucaagcuuaccauggaccccaacgccaaccccaacgccaacccgaacgcgaaccccaacgccaaccccaacgccaacccgaacgccaaccccaacgccaaccccaacgcgaaccccaacgccaacccgaacgccaaccccaacgccaaccccaacgcgaaccccaacgccaacccgaacgccaaccccaacgccaaccccaacgccaaccccaacgcgaacccgaacgccaaccccaacaagaacaaccagggcaacggccaggggcacaacaugcccaacgaccccaaccgcaacgucgacgagaacgccaacgccaacuccgccgugaagaacaacaacaacgaggagccgagcgacaagcacaucaaggaguaccugaacaagauccagaacucccucagcacggaguggucccccugcagcgugaccugcggcaacgggauccagguccggaucaagcccggcuccgcgaacaagcccaaggacgagcuggacuacgccaacgacaucgagaagaagaucugcaagauggagaagugcagcuccgugccggugacgaacauggagaacaucaccagcggcuuccuggggccccuccuggugcugcaggccggcuucuuccuccugacccgcauccugaccaucccgcagucccucgacagcugguggaccucccugaacuuccucgggggcagccccgucugccuggggcagaacucccagagccccaccuccaaccacagccccaccuccugcccgcccaucugccccggcuaccgguggaugugccugcgccgguucaucaucuuccuguucauccuccugcugugccucaucuuccugcuggugcuccuggacuaccagggcaugcugcccgugugcccgcucauccccgggagcacgaccaccaacaccggccccugcaagacgugcaccacccccgcccaggggaacuccauguucccgagcugcugcugcaccaagcccacggacggcaacugcacgugcauccccauccccuccagcugggcguucgccaaguaccugugggagugggccuccguccgcuucagcuggcugucccuccuggugccguucgugcagugguucgucgggcugagccccaccguguggcucuccgccaucuggaugaugugguacuggggccccagccuguacagcaucgugucccccuucaucccgcugcuccccaucuucuucugccugugggucuacaucugaggacuagucccuguucccagagcccacuuuuuuuucuuuuuuugaaauaaaauagccugucuuucagaucucaaaggcucuuuucagagccaccaaaaaaaaaaaaaaaaaaaaaaaaaaaaaaaaaaaaaaaaaaaaaaaaaaaaaaaaaaaaaaaaagaauu

SEQ ID NO: 6567 - RNA, 1516 nt, Artificial Sequence
  mRNA Design a-1 (hSL-A64-N5) comprising derived and/or modified sequence from Pf(3D7)__XP_001351122.1__Pf-CSP(199-387)_L(PVTN)_HBsAg (opt1)
aggagagucccgcagucggcguccagcggcucugcuuguucgugugugugucguugcaggccuuauucaagcuuaccaugauggccccggaccccaacgccaaccccaacgccaacccgaacgcgaaccccaacgccaaccccaacgccaacccgaacgccaaccccaacgccaaccccaacgcgaaccccaacgccaacccgaacgccaaccccaacgccaaccccaacgcgaaccccaacgccaacccgaacgccaaccccaacgccaaccccaacgccaaccccaacgcgaacccgaacgccaaccccaacaagaacaaccagggcaacggccaggggcacaacaugcccaacgaccccaaccgcaacgucgacgagaacgccaacgccaacuccgccgugaagaacaacaacaacgaggagccgagcgacaagcacaucaaggaguaccugaacaagauccagaacucccucagcacggaguggucccccugcagcgugaccugcggcaacgggauccagguccggaucaagcccggcuccgcgaacaagcccaaggacgagcuggacuacgccaacgacaucgagaagaagaucugcaagauggagaagugcagcuccguguucaacguggucaacagcuccaucgggcuggggccggugacgaacauggagaacaucaccagcggcuuccuggggccccuccuggugcugcaggccggcuucuuccuccugacccgcauccugaccaucccgcagucccucgacagcugguggaccucccugaacuuccucgggggcagccccgucugccuggggcagaacucccagagccccaccuccaaccacagccccaccuccugcccgcccaucugccccggcuaccgguggaugugccugcgccgguucaucaucuuccuguucauccuccugcugugccucaucuuccugcuggugcuccuggacuaccagggcaugcugcccgugugcccgcucauccccgggagcacgaccaccaacaccggccccugcaagacgugcaccacccccgcccaggggaacuccauguucccgagcugcugcugcaccaagcccacggacggcaacugcacgugcauccccauccccuccagcugggcguucgccaaguaccugugggagugggccuccguccgcuucagcuggcugucccuccuggugccguucgugcagugguucgucgggcugagccccaccguguggcucuccgccaucuggaugaugugguacuggggccccagccuguacagcaucgugucccccuucaucccgcugcuccccaucuucuucugccugugggucuacaucugaggacuagucccuguucccagagcccacuuuuuuuucuuuuuuugaaauaaaauagccugucuuucagaucucaaaggcucuuuucagagccaccaaaaaaaaaaaaaaaaaaaaaaaaaaaaaaaaaaaaaaaaaaaaaaaaaaaaaaaaaaaaaaaaagaauu

SEQ ID NO: 6568 - RNA, 700 nt, Artificial Sequence
  mRNA Design a-1 (hSL-A64-N5) comprising derived and/or modified sequence from Pf(3D7)__XP_001351122.1__HsALB_Pf-CSP(19-152) (opt1)
aggagagucccgcagucggcguccagcggcucugcuuguucgugugugugucguugcaggccuuauucaagcuuaccaugaagugggugaccuucaucagccugcucuuccuguucuccagcgccuacucccuguuccaggaguaccagugcuacggcuccagcuccaacacccgggugcucaacgagcugaacuacgacaacgcggggaccaaccuguacaacgagcucgagaugaacuacuacggcaagcaggagaacugguacagccugaagaagaacucccgcagccugggggagaacgacgacggcaacaacgaggacaacgagaagcuccggaagcccaagcacaagaagcugaagcagccggccgacgggaaccccgaccccaacgccaaccccaacguggacccgaacgccaaccccaacgucgaccccaacgccaaccccaacguggacccgaacgcgaaccccaacgccaaccccaacgccaaccccaacgccaacccgaacgcgaaccccaacgccaaccccugaggacuagucccuguucccagagcccacuuuuuuuucuuuuuuugaaauaaaauagccugucuuucagaucucaaaggcucuuuucagagccaccaaaaaaaaaaaaaaaaaaaaaaaaaaaaaaaaaaaaaaaaaaaaaaaaaaaaaaaaaaaaaaaaagaauu

SEQ ID NO: 6569 - RNA, 820 nt, Artificial Sequence
  mRNA Design a-1 (hSL-A64-N5) comprising derived and/or modified sequence from Pf(3D7)__XP_001351122.1__HsALB_Pf-CSP(19-192) (opt1)
aggagagucccgcagucggcguccagcggcucugcuuguucgugugugugucguugcaggccuuauucaagcuuaccaugaagugggugaccuucaucagccugcucuuccuguucuccagcgccuacucccuguuccaggaguaccagugcuacggcuccagcuccaacacccgggugcucaacgagcugaacuacgacaacgcggggaccaaccuguacaacgagcucgagaugaacuacuacggcaagcaggagaacugguacagccugaagaagaacucccgcagccugggggagaacgacgacggcaacaacgaggacaacgagaagcuccggaagcccaagcacaagaagcugaagcagccggccgacgggaaccccgaccccaacgccaaccccaacguggacccgaacgccaaccccaacgucgaccccaacgccaaccccaacguggacccgaacgcgaaccccaacgccaaccccaacgccaaccccaacgccaacccgaacgcgaaccccaacgccaaccccaacgccaaccccaacgccaacccgaacgccaaccccaacgcgaaccccaacgccaaccccaacgccaacccgaacgccaaccccaacgccaaccccaacgcgaaccccaacgccaacccgugaggacuagucccuguucccagagcccacuuuuuuuucuuuuuuugaaauaaaauagccugucuuucagaucucaaaggcucuuuucagagccaccaaaaaaaaaaaaaaaaaaaaaaaaaaaaaaaaaaaaaaaaaaaaaaaaaaaaaaaaaaaaaaaaagaauu

SEQ ID NO: 6570 - RNA, 1060 nt, Artificial Sequence
  mRNA Design a-1 (hSL-A64-N5) comprising derived and/or modified sequence from Pf(3D7)__XP_001351122.1__HsALB_Pf-CSP(19-272) (opt1)
aggagagucccgcagucggcguccagcggcucugcuuguucgugugugugucguugcaggccuuauucaagcuuaccaugaagugggugaccuucaucagccugcucuuccuguucuccagcgccuacucccuguuccaggaguaccagugcuacggcuccagcuccaacacccgggugcucaacgagcugaacuacgacaacgcggggaccaaccuguacaacgagcucgagaugaacuacuacggcaagcaggagaacugguacagccugaagaagaacucccgcagccugggggagaacgacgacggcaacaacgaggacaacgagaagcuccggaagcccaagcacaagaagcugaagcagccggccgacgggaaccccgaccccaacgccaaccccaacguggacccgaacgccaaccccaacgucgaccccaacgccaaccccaacguggacccgaacgcgaaccccaacgccaaccccaacgccaaccccaacgccaacccgaacgcgaaccccaacgccaaccccaacgccaaccccaacgccaacccgaacgccaaccccaacgcgaaccccaacgccaaccccaacgccaacccgaacgccaaccccaacgccaaccccaacgcgaaccccaacgccaacccgaacgccaaccccaacguggaccccaacgccaaccccaacgccaacccgaacgcgaaccccaacgccaaccccaacgccaacccgaacgccaaccccaacgccaaccccaacgcgaaccccaacgccaacccgaacgccaaccccaacgccaaccccaacgcgaaccccaacgccaacccgaacgccaaccccaacgccaaccccaacgccaaccccaacgcgaacccgaacgccaaccccugaggacuagucccuguucccagagcccacuuuuuuuucuuuuuuugaaauaaaauagccugucuuucagaucucaaaggcucuuuucagagccaccaaaaaaaaaaaaaaaaaaaaaaaaaaaaaaaaaaaaaaaaaaaaaaaaaaaaaaaaaaaaaaaaagaauu

SEQ ID NO: 6571 - RNA, 1222 nt, Artificial Sequence
  mRNA Design a-1 (hSL-A64-N5) comprising derived and/or modified sequence from Pf(3D7)__XP_001351122.1__HsALB_Pf-CSP(19-272)_L(AAY)_Pf-CSP(310-3 27)_L(AAY)_Pf-CSP(346-375) (opt1)
aggagagucccgcagucggcguccagcggcucugcuuguucgugugugugucguugcaggccuuauucaagcuuaccaugaagugggugaccuucaucagccugcucuuccuguucuccagcgccuacucccuguuccaggaguaccagugcuacggcuccagcuccaacacccgggugcucaacgagcugaacuacgacaacgcggggaccaaccuguacaacgagcucgagaugaacuacuacggcaagcaggagaacugguacagccugaagaagaacucccgcagccugggggagaacgacgacggcaacaacgaggacaacgagaagcuccggaagcccaagcacaagaagcugaagcagccggccgacgggaaccccgaccccaacgccaaccccaacguggacccgaacgccaaccccaacgucgaccccaacgccaaccccaacguggacccgaacgcgaaccccaacgccaaccccaacgccaaccccaacgccaacccgaacgcgaaccccaacgccaaccccaacgccaaccccaacgccaacccgaacgccaaccccaacgcgaaccccaacgccaaccccaacgccaacccgaacgccaaccccaacgccaaccccaacgcgaaccccaacgccaacccgaacgccaaccccaacguggaccccaacgccaaccccaacgccaacccgaacgcgaaccccaacgccaaccccaacgccaacccgaacgccaaccccaacgccaaccccaacgcgaaccccaacgccaacccgaacgccaaccccaacgccaaccccaacgcgaaccccaacgccaacccgaacgccaaccccaacgccaaccccaacgccaaccccaacgcgaacccgaacgccaaccccgccgcguaugagccgagcgacaagcacaucaaggaguaccugaacaagauccagaacucccucgcggccuacaucaagcccggcuccgcgaacaagcccaaggacgagcuggacuacgccaacgacaucgagaagaagaucugcaagauggagaagugcagcugaggacuagucccuguucccagagcccacuuuuuuuucuuuuuuugaaauaaaauagccugucuuucagaucucaaaggcucuuuucagagccaccaaaaaaaaaaaaaaaaaaaaaaaaaaaaaaaaaaaaaaaaaaaaaaaaaaaaaaaaaaaaaaaaagaauu

SEQ ID NO: 6572 - RNA, 1183 nt, Artificial Sequence
  mRNA Design a-1 (hSL-A64-N5) comprising derived and/or modified sequence from Pf(3D7)__XP_001351122.1__HsALB_Pf-CSP(19-272)_L(AAY)_Pf-CSP(346-3 65)_L(AAY)_P2 (opt1)
aggagagucccgcagucggcguccagcggcucugcuuguucgugugugugucguugcaggccuuauucaagcuuaccaugaagugggugaccuucaucagccugcucuuccuguucuccagcgccuacucccuguuccaggaguaccagugcuacggcuccagcuccaacacccgggugcucaacgagcugaacuacgacaacgcggggaccaaccuguacaacgagcucgagaugaacuacuacggcaagcaggagaacugguacagccugaagaagaacucccgcagccugggggagaacgacgacggcaacaacgaggacaacgagaagcuccggaagcccaagcacaagaagcugaagcagccggccgacgggaaccccgaccccaacgccaaccccaacguggacccgaacgccaaccccaacgucgaccccaacgccaaccccaacguggacccgaacgcgaaccccaacgccaaccccaacgccaaccccaacgccaacccgaacgcgaaccccaacgccaaccccaacgccaaccccaacgccaacccgaacgccaaccccaacgcgaaccccaacgccaaccccaacgccaacccgaacgccaaccccaacgccaaccccaacgcgaaccccaacgccaacccgaacgccaaccccaacguggaccccaacgccaaccccaacgccaacccgaacgcgaaccccaacgccaaccccaacgccaacccgaacgccaaccccaacgccaaccccaacgcgaaccccaacgccaacccgaacgccaaccccaacgccaaccccaacgcgaaccccaacgccaacccgaacgccaaccccaacgccaaccccaacgccaaccccaacgcgaacccgaacgccaaccccgccgcguauaucaagcccggcuccgcgaacaagcccaaggacgagcuggacuacgccaacgacaucgaggcggccuaccaguacaucaaggccaacagcaaguucaucggcaucaccgagcugugaggacuagucccuguucccagagcccacuuuuuuuucuuuuuuugaaauaaaauagccugucuuucagaucucaaaggcucuuuucagagccaccaaaaaaaaaaaaaaaaaaaaaaaaaaaaaaaaaaaaaaaaaaaaaaaaaaaaaaaaaaaaaaaaagaauu

SEQ ID NO: 6573 - RNA, 1177 nt, Artificial Sequence
  mRNA Design a-1 (hSL-A64-N5) comprising derived and/or modified sequence from Pf(3D7)__XP_001351122.1__HsALB_Pf-CSP(19-272)_L(AAY)_Pf-CSP(346-3 65)_L(AAY)_PADRE (opt1)
aggagagucccgcagucggcguccagcggcucugcuuguucgugugugugucguugcaggccuuauucaagcuuaccaugaagugggugaccuucaucagccugcucuuccuguucuccagcgccuacucccuguuccaggaguaccagugcuacggcuccagcuccaacacccgggugcucaacgagcugaacuacgacaacgcggggaccaaccuguacaacgagcucgagaugaacuacuacggcaagcaggagaacugguacagccugaagaagaacucccgcagccugggggagaacgacgacggcaacaacgaggacaacgagaagcuccggaagcccaagcacaagaagcugaagcagccggccgacgggaaccccgaccccaacgccaaccccaacguggacccgaacgccaaccccaacgucgaccccaacgccaaccccaacguggacccgaacgcgaaccccaacgccaaccccaacgccaaccccaacgccaacccgaacgcgaaccccaacgccaaccccaacgccaaccccaacgccaacccgaacgccaaccccaacgcgaaccccaacgccaaccccaacgccaacccgaacgccaaccccaacgccaaccccaacgcgaaccccaacgccaacccgaacgccaaccccaacguggaccccaacgccaaccccaacgccaacccgaacgcgaaccccaacgccaaccccaacgccaacccgaacgccaaccccaacgccaaccccaacgcgaaccccaacgccaacccgaacgccaaccccaacgccaaccccaacgcgaaccccaacgccaacccgaacgccaaccccaacgccaaccccaacgccaaccccaacgcgaacccgaacgccaaccccgccgcguauaucaagcccggcuccgcgaacaagcccaaggacgagcuggacuacgccaacgacaucgaggcggccuacgccaaguucguggccgccuggacccugaaggcggccgccugaggacuagucccuguucccagagcccacuuuuuuuucuuuuuuugaaauaaaauagccugucuuucagaucucaaaggcucuuuucagagccaccaaaaaaaaaaaaaaaaaaaaaaaaaaaaaaaaaaaaaaaaaaaaaaaaaaaaaaaaaaaaaaaaagaauu

SEQ ID NO: 6574 - RNA, 1234 nt, Artificial Sequence
  mRNA Design a-1 (hSL-A64-N5) comprising derived and/or modified sequence from Pf(3D7)__XP_001351122.1__HsALB_Pf-CSP(19-272)_L(G4S)_Pf-CSP(310-3 27)_L(G4S)_Pf-CSP(346-375) (opt1)
aggagagucccgcagucggcguccagcggcucugcuuguucgugugugugucguugcaggccuuauucaagcuuaccaugaagugggugaccuucaucagccugcucuuccuguucuccagcgccuacucccuguuccaggaguaccagugcuacggcuccagcuccaacacccgggugcucaacgagcugaacuacgacaacgcggggaccaaccuguacaacgagcucgagaugaacuacuacggcaagcaggagaacugguacagccugaagaagaacucccgcagccugggggagaacgacgacggcaacaacgaggacaacgagaagcuccggaagcccaagcacaagaagcugaagcagccggccgacgggaaccccgaccccaacgccaaccccaacguggacccgaacgccaaccccaacgucgaccccaacgccaaccccaacguggacccgaacgcgaaccccaacgccaaccccaacgccaaccccaacgccaacccgaacgcgaaccccaacgccaaccccaacgccaaccccaacgccaacccgaacgccaaccccaacgcgaaccccaacgccaaccccaacgccaacccgaacgccaaccccaacgccaaccccaacgcgaaccccaacgccaacccgaacgccaaccccaacguggaccccaacgccaaccccaacgccaacccgaacgcgaaccccaacgccaaccccaacgccaacccgaacgccaaccccaacgccaaccccaacgcgaaccccaacgccaacccgaacgccaaccccaacgccaaccccaacgcgaaccccaacgccaacccgaacgccaaccccaacgccaaccccaacgccaaccccaacgcgaacccgaacgccaaccccggaggcggaggaucugagccgagcgacaagcacaucaaggaguaccugaacaagauccagaacucccucggcggagguggaaguaucaagcccggcuccgcgaacaagcccaaggacgagcuggacuacgccaacgacaucgagaagaagaucugcaagauggagaagugcagcugaggacuagucccuguucccagagcccacuuuuuuuucuuuuuuugaaauaaaauagccugucuuucagaucucaaaggcucuuuucagagccaccaaaaaaaaaaaaaaaaaaaaaaaaaaaaaaaaaaaaaaaaaaaaaaaaaaaaaaaaaaaaaaaaagaauu

SEQ ID NO: 6575 - RNA, 1219 nt, Artificial Sequence
  mRNA Design a-1 (hSL-A64-N5) comprising derived and/or modified sequence from Pf(3D7)__XP_001351122.1__HsALB_Pf-CSP(19-272)_L(G4S)_Pf-CSP(310-3 27)_Pf-CSP(346-375) (opt1)
aggagagucccgcagucggcguccagcggcucugcuuguucgugugugugucguugcaggccuuauucaagcuuaccaugaagugggugaccuucaucagccugcucuuccuguucuccagcgccuacucccuguuccaggaguaccagugcuacggcuccagcuccaacacccgggugcucaacgagcugaacuacgacaacgcggggaccaaccuguacaacgagcucgagaugaacuacuacggcaagcaggagaacugguacagccugaagaagaacucccgcagccugggggagaacgacgacggcaacaacgaggacaacgagaagcuccggaagcccaagcacaagaagcugaagcagccggccgacgggaaccccgaccccaacgccaaccccaacguggacccgaacgccaaccccaacgucgaccccaacgccaaccccaacguggacccgaacgcgaaccccaacgccaaccccaacgccaaccccaacgccaacccgaacgcgaaccccaacgccaaccccaacgccaaccccaacgccaacccgaacgccaaccccaacgcgaaccccaacgccaaccccaacgccaacccgaacgccaaccccaacgccaaccccaacgcgaaccccaacgccaacccgaacgccaaccccaacguggaccccaacgccaaccccaacgccaacccgaacgcgaaccccaacgccaaccccaacgccaacccgaacgccaaccccaacgccaaccccaacgcgaaccccaacgccaacccgaacgccaaccccaacgccaaccccaacgcgaaccccaacgccaacccgaacgccaaccccaacgccaaccccaacgccaaccccaacgcgaacccgaacgccaaccccggaggcggaggaucugagccgagcgacaagcacaucaaggaguaccugaacaagauccagaacucccucaucaagcccggcuccgcgaacaagcccaaggacgagcuggacuacgccaacgacaucgagaagaagaucugcaagauggagaagugcagcugaggacuagucccuguucccagagcccacuuuuuuuucuuuuuuugaaauaaaauagccugucuuucagaucucaaaggcucuuuucagagccaccaaaaaaaaaaaaaaaaaaaaaaaaaaaaaaaaaaaaaaaaaaaaaaaaaaaaaaaaaaaaaaaaagaauu

SEQ ID NO: 6576 - RNA, 1219 nt, Artificial Sequence
  mRNA Design a-1 (hSL-A64-N5) comprising derived and/or modified sequence from Pf(3D7)__XP_001351122.1__HsALB_Pf-CSP(19-325) (opt1)
aggagagucccgcagucggcguccagcggcucugcuuguucgugugugugucguugcaggccuuauucaagcuuaccaugaagugggugaccuucaucagccugcucuuccuguucuccagcgccuacucccuguuccaggaguaccagugcuacggcuccagcuccaacacccgggugcucaacgagcugaacuacgacaacgcggggaccaaccuguacaacgagcucgagaugaacuacuacggcaagcaggagaacugguacagccugaagaagaacucccgcagccugggggagaacgacgacggcaacaacgaggacaacgagaagcuccggaagcccaagcacaagaagcugaagcagccggccgacgggaaccccgaccccaacgccaaccccaacguggacccgaacgccaaccccaacgucgaccccaacgccaaccccaacguggacccgaacgcgaaccccaacgccaaccccaacgccaaccccaacgccaacccgaacgcgaaccccaacgccaaccccaacgccaaccccaacgccaacccgaacgccaaccccaacgcgaaccccaacgccaaccccaacgccaacccgaacgccaaccccaacgccaaccccaacgcgaaccccaacgccaacccgaacgccaaccccaacguggaccccaacgccaaccccaacgccaacccgaacgcgaaccccaacgccaaccccaacgccaacccgaacgccaaccccaacgccaaccccaacgcgaaccccaacgccaacccgaacgccaaccccaacgccaaccccaacgcgaaccccaacgccaacccgaacgccaaccccaacgccaaccccaacgccaaccccaacgcgaacccgaacgccaaccccaacaagaacaaccagggcaacggccaggggcacaacaugcccaacgaccccaaccgcaacgucgacgagaacgccaacgccaacuccgccgugaagaacaacaacaacgaggagccgagcgacaagcacaucaaggaguaccugaacaagauccagaacugaggacuagucccuguucccagagcccacuuuuuuuucuuuuuuugaaauaaaauagccugucuuucagaucucaaaggcucuuuucagagccaccaaaaaaaaaaaaaaaaaaaaaaaaaaaaaaaaaaaaaaaaaaaaaaaaaaaaaaaaaaaaaaaaagaauu

SEQ ID NO: 6577 - RNA, 1396 nt, Artificial Sequence
  mRNA Design a-1 (hSL-A64-N5) comprising derived and/or modified sequence from Pf(3D7)__XP_001351122.1__HsALB_Pf-CSP(19-384) (opt1)
aggagagucccgcagucggcguccagcggcucugcuuguucgugugugugucguugcaggccuuauucaagcuuaccaugaagugggugaccuucaucagccugcucuuccuguucuccagcgccuacucccuguuccaggaguaccagugcuacggcuccagcuccaacacccgggugcucaacgagcugaacuacgacaacgcggggaccaaccuguacaacgagcucgagaugaacuacuacggcaagcaggagaacugguacagccugaagaagaacucccgcagccugggggagaacgacgacggcaacaacgaggacaacgagaagcuccggaagcccaagcacaagaagcugaagcagccggccgacgggaaccccgaccccaacgccaaccccaacguggacccgaacgccaaccccaacgucgaccccaacgccaaccccaacguggacccgaacgcgaaccccaacgccaaccccaacgccaaccccaacgccaacccgaacgcgaaccccaacgccaaccccaacgccaaccccaacgccaacccgaacgccaaccccaacgcgaaccccaacgccaaccccaacgccaacccgaacgccaaccccaacgccaaccccaacgcgaaccccaacgccaacccgaacgccaaccccaacguggaccccaacgccaaccccaacgccaacccgaacgcgaaccccaacgccaaccccaacgccaacccgaacgccaaccccaacgccaaccccaacgcgaaccccaacgccaacccgaacgccaaccccaacgccaaccccaacgcgaaccccaacgccaacccgaacgccaaccccaacgccaaccccaacgccaaccccaacgcgaacccgaacgccaaccccaacaagaacaaccagggcaacggccaggggcacaacaugcccaacgaccccaaccgcaacgucgacgagaacgccaacgccaacuccgccgugaagaacaacaacaacgaggagccgagcgacaagcacaucaaggaguaccugaacaagauccagaacucccucagcacggaguggucccccugcagcgugaccugcggcaacgggauccagguccggaucaagcccggcuccgcgaacaagcccaaggacgagcuggacuacgccaacgacaucgagaagaagaucugcaagauggagaagugcagcuccguguucaacguggucaacagcuccugaggacuagucccuguucccagagcccacuuuuuuuucuuuuuuugaaauaaaauagccugucuuucagaucucaaaggcucuuuucagagccaccaaaaaaaaaaaaaaaaaaaaaaaaaaaaaaaaaaaaaaaaaaaaaaaaaaaaaaaaaaaaaaaaagaauu

SEQ ID NO: 6578 - RNA, 1534 nt, Artificial Sequence
  mRNA Design a-1 (hSL-A64-N5) comprising derived and/or modified sequence from Pf(3D7)__XP_001351122.1__HsALB_Pf-CSP(19-384)_TM domain HA (opt1)
aggagagucccgcagucggcguccagcggcucugcuuguucgugugugugucguugcaggccuuauucaagcuuaccaugaagugggugaccuucaucagccugcucuuccuguucuccagcgccuacucccuguuccaggaguaccagugcuacggcuccagcuccaacacccgggugcucaacgagcugaacuacgacaacgcggggaccaaccuguacaacgagcucgagaugaacuacuacggcaagcaggagaacugguacagccugaagaagaacucccgcagccugggggagaacgacgacggcaacaacgaggacaacgagaagcuccggaagcccaagcacaagaagcugaagcagccggccgacgggaaccccgaccccaacgccaaccccaacguggacccgaacgccaaccccaacgucgaccccaacgccaaccccaacguggacccgaacgcgaaccccaacgccaaccccaacgccaaccccaacgccaacccgaacgcgaaccccaacgccaaccccaacgccaaccccaacgccaacccgaacgccaaccccaacgcgaaccccaacgccaaccccaacgccaacccgaacgccaaccccaacgccaaccccaacgcgaaccccaacgccaacccgaacgccaaccccaacguggaccccaacgccaaccccaacgccaacccgaacgcgaaccccaacgccaaccccaacgccaacccgaacgccaaccccaacgccaaccccaacgcgaaccccaacgccaacccgaacgccaaccccaacgccaaccccaacgcgaaccccaacgccaacccgaacgccaaccccaacgccaaccccaacgccaaccccaacgcgaacccgaacgccaaccccaacaagaacaaccagggcaacggccaggggcacaacaugcccaacgaccccaaccgcaacgucgacgagaacgccaacgccaacuccgccgugaagaacaacaacaacgaggagccgagcgacaagcacaucaaggaguaccugaacaagauccagaacucccucagcacggaguggucccccugcagcgugaccugcggcaacgggauccagguccggaucaagcccggcuccgcgaacaagcccaaggacgagcuggacuacgccaacgacaucgagaagaagaucugcaagauggagaagugcagcuccguguucaacguggucaacagcuccaagcucgaguccacgcggaucuaccagauccuggcgaucuacagcaccgucgccagcucccuggugcucguggucagccugggggccaucuccuucuggaugugcagcaacggcucccugcagugccgcaucugcaucugaggacuagucccuguucccagagcccacuuuuuuuucuuuuuuugaaauaaaauagccugucuuucagaucucaaaggcucuuuucagagccaccaaaaaaaaaaaaaaaaaaaaaaaaaaaaaaaaaaaaaaaaaaaaaaaaaaaaaaaaaaaaaaaaagaauu

SEQ ID NO: 6579 - RNA, 1246 nt, Artificial Sequence
  mRNA Design a-1 (hSL-A64-N5) comprising derived and/or modified sequence from Pf(3D7)__XP_001351122.1__HsALB_Pf-CSP(82-397) (opt1)
aggagagucccgcagucggcguccagcggcucugcuuguucgugugugugucguugcaggccuuauucaagcuuaccaugaagugggugaccuucaucagccugcucuuccuguucuccagcgccuacuccgacaacgagaagcuccggaagcccaagcacaagaagcugaagcagccggccgacgggaaccccgaccccaacgccaaccccaacguggacccgaacgccaaccccaacgucgaccccaacgccaaccccaacguggacccgaacgcgaaccccaacgccaaccccaacgccaaccccaacgccaacccgaacgcgaaccccaacgccaaccccaacgccaaccccaacgccaacccgaacgccaaccccaacgcgaaccccaacgccaaccccaacgccaacccgaacgccaaccccaacgccaaccccaacgcgaaccccaacgccaacccgaacgccaaccccaacguggaccccaacgccaaccccaacgccaacccgaacgcgaaccccaacgccaaccccaacgccaacccgaacgccaaccccaacgccaaccccaacgcgaaccccaacgccaacccgaacgccaaccccaacgccaaccccaacgcgaaccccaacgccaacccgaacgccaaccccaacgccaaccccaacgccaaccccaacgcgaacccgaacgccaaccccaacaagaacaaccagggcaacggccaggggcacaacaugcccaacgaccccaaccgcaacgucgacgagaacgccaacgccaacuccgccgugaagaacaacaacaacgaggagccgagcgacaagcacaucaaggaguaccugaacaagauccagaacucccucagcacggaguggucccccugcagcgugaccugcggcaacgggauccagguccggaucaagcccggcuccgcgaacaagcccaaggacgagcuggacuacgccaacgacaucgagaagaagaucugcaagauggagaagugcagcuccguguucaacguggucaacagcuccaucgggcugaucauggugcucagcuuccuguuccugaacugaggacuagucccuguucccagagcccacuuuuuuuucuuuuuuugaaauaaaauagccugucuuucagaucucaaaggcucuuuucagagccaccaaaaaaaaaaaaaaaaaaaaaaaaaaaaaaaaaaaaaaaaaaaaaaaaaaaaaaaaaaaaaaaaagaauu

SEQ ID NO: 6580 - RNA, 598 nt, Artificial Sequence
  mRNA Design a-1 (hSL-A64-N5) comprising derived and/or modified sequence from Pf(3D7)__XP_001351122.1__HsALB_Pf-CSP(93-192) (opt1)
aggagagucccgcagucggcguccagcggcucugcuuguucgugugugugucguugcaggccuuauucaagcuuaccaugaagugggugaccuucaucagccugcucuuccuguucuccagcgccuacuccaagcugaagcagccggccgacgggaaccccgaccccaacgccaaccccaacguggacccgaacgccaaccccaacgucgaccccaacgccaaccccaacguggacccgaacgcgaaccccaacgccaaccccaacgccaaccccaacgccaacccgaacgcgaaccccaacgccaaccccaacgccaaccccaacgccaacccgaacgccaaccccaacgcgaaccccaacgccaaccccaacgccaacccgaacgccaaccccaacgccaaccccaacgcgaaccccaacgccaacccgugaggacuagucccuguucccagagcccacuuuuuuuucuuuuuuugaaauaaaauagccugucuuucagaucucaaaggcucuuuucagagccaccaaaaaaaaaaaaaaaaaaaaaaaaaaaaaaaaaaaaaaaaaaaaaaaaaaaaaaaaaaaaaaaaagaauu

SEQ ID NO: 6581 - RNA, 838 nt, Artificial Sequence
  mRNA Design a-1 (hSL-A64-N5) comprising derived and/or modified sequence from Pf(3D7)__XP_001351122.1__HsALB_Pf-CSP(93-272) (opt1)
aggagagucccgcagucggcguccagcggcucugcuuguucgugugugugucguugcaggccuuauucaagcuuaccaugaagugggugaccuucaucagccugcucuuccuguucuccagcgccuacuccaagcugaagcagccggccgacgggaaccccgaccccaacgccaaccccaacguggacccgaacgccaaccccaacgucgaccccaacgccaaccccaacguggacccgaacgcgaaccccaacgccaaccccaacgccaaccccaacgccaacccgaacgcgaaccccaacgccaaccccaacgccaaccccaacgccaacccgaacgccaaccccaacgcgaaccccaacgccaaccccaacgccaacccgaacgccaaccccaacgccaaccccaacgcgaaccccaacgccaacccgaacgccaaccccaacguggaccccaacgccaaccccaacgccaacccgaacgcgaaccccaacgccaaccccaacgccaacccgaacgccaaccccaacgccaaccccaacgcgaaccccaacgccaacccgaacgccaaccccaacgccaaccccaacgcgaaccccaacgccaacccgaacgccaaccccaacgccaaccccaacgccaaccccaacgcgaacccgaacgccaaccccugaggacuagucccuguucccagagcccacuuuuuuuucuuuuuuugaaauaaaauagccugucuuucagaucucaaaggcucuuuucagagccaccaaaaaaaaaaaaaaaaaaaaaaaaaaaaaaaaaaaaaaaaaaaaaaaaaaaaaaaaaaaaaaaaagaauu

SEQ ID NO: 6582 - RNA, 1213 nt, Artificial Sequence
  mRNA Design a-1 (hSL-A64-N5) comprising derived and/or modified sequence from Pf(3D7)__XP_001351122.1__HsALB_Pf-CSP(93-397) (opt1)
aggagagucccgcagucggcguccagcggcucugcuuguucgugugugugucguugcaggccuuauucaagcuuaccaugaagugggugaccuucaucagccugcucuuccuguucuccagcgccuacuccaagcugaagcagccggccgacgggaaccccgaccccaacgccaaccccaacguggacccgaacgccaaccccaacgucgaccccaacgccaaccccaacguggacccgaacgcgaaccccaacgccaaccccaacgccaaccccaacgccaacccgaacgcgaaccccaacgccaaccccaacgccaaccccaacgccaacccgaacgccaaccccaacgcgaaccccaacgccaaccccaacgccaacccgaacgccaaccccaacgccaaccccaacgcgaaccccaacgccaacccgaacgccaaccccaacguggaccccaacgccaaccccaacgccaacccgaacgcgaaccccaacgccaaccccaacgccaacccgaacgccaaccccaacgccaaccccaacgcgaaccccaacgccaacccgaacgccaaccccaacgccaaccccaacgcgaaccccaacgccaacccgaacgccaaccccaacgccaaccccaacgccaaccccaacgcgaacccgaacgccaaccccaacaagaacaaccagggcaacggccaggggcacaacaugcccaacgaccccaaccgcaacgucgacgagaacgccaacgccaacuccgccgugaagaacaacaacaacgaggagccgagcgacaagcacaucaaggaguaccugaacaagauccagaacucccucagcacggaguggucccccugcagcgugaccugcggcaacgggauccagguccggaucaagcccggcuccgcgaacaagcccaaggacgagcuggacuacgccaacgacaucgagaagaagaucugcaagauggagaagugcagcuccguguucaacguggucaacagcuccaucgggcugaucauggugcucagcuuccuguuccugaacugaggacuagucccuguucccagagcccacuuuuuuuucuuuuuuugaaauaaaauagccugucuuucagaucucaaaggcucuuuucagagccaccaaaaaaaaaaaaaaaaaaaaaaaaaaaaaaaaaaaaaaaaaaaaaaaaaaaaaaaaaaaaaaaaagaauu

SEQ ID NO: 6583 - RNA, 583 nt, Artificial Sequence
  mRNA Design a-1 (hSL-A64-N5) comprising derived and/or modified sequence from Pf(3D7)__XP_001351122.1__HsALB_Pf-CSP(98-192) (opt1)
aggagagucccgcagucggcguccagcggcucugcuuguucgugugugugucguugcaggccuuauucaagcuuaccaugaagugggugaccuucaucagccugcucuuccuguucuccagcgccuacuccgccgacgggaaccccgaccccaacgccaaccccaacguggacccgaacgccaaccccaacgucgaccccaacgccaaccccaacguggacccgaacgcgaaccccaacgccaaccccaacgccaaccccaacgccaacccgaacgcgaaccccaacgccaaccccaacgccaaccccaacgccaacccgaacgccaaccccaacgcgaaccccaacgccaaccccaacgccaacccgaacgccaaccccaacgccaaccccaacgcgaaccccaacgccaacccgugaggacuagucccuguucccagagcccacuuuuuuuucuuuuuuugaaauaaaauagccugucuuucagaucucaaaggcucuuuucagagccaccaaaaaaaaaaaaaaaaaaaaaaaaaaaaaaaaaaaaaaaaaaaaaaaaaaaaaaaaaaaaaaaaagaauu

SEQ ID NO: 6584 - RNA, 823 nt, Artificial Sequence
  mRNA Design a-1 (hSL-A64-N5) comprising derived and/or modified sequence from Pf(3D7)__XP_001351122.1__HsALB_Pf-CSP(98-272) (opt1)
aggagagucccgcagucggcguccagcggcucugcuuguucgugugugugucguugcaggccuuauucaagcuuaccaugaagugggugaccuucaucagccugcucuuccuguucuccagcgccuacuccgccgacgggaaccccgaccccaacgccaaccccaacguggacccgaacgccaaccccaacgucgaccccaacgccaaccccaacguggacccgaacgcgaaccccaacgccaaccccaacgccaaccccaacgccaacccgaacgcgaaccccaacgccaaccccaacgccaaccccaacgccaacccgaacgccaaccccaacgcgaaccccaacgccaaccccaacgccaacccgaacgccaaccccaacgccaaccccaacgcgaaccccaacgccaacccgaacgccaaccccaacguggaccccaacgccaaccccaacgccaacccgaacgcgaaccccaacgccaaccccaacgccaacccgaacgccaaccccaacgccaaccccaacgcgaaccccaacgccaacccgaacgccaaccccaacgccaaccccaacgcgaaccccaacgccaacccgaacgccaaccccaacgccaaccccaacgccaaccccaacgcgaacccgaacgccaaccccugaggacuagucccuguucccagagcccacuuuuuuuucuuuuuuugaaauaaaauagccugucuuucagaucucaaaggcucuuuucagagccaccaaaaaaaaaaaaaaaaaaaaaaaaaaaaaaaaaaaaaaaaaaaaaaaaaaaaaaaaaaaaaaaaagaauu

SEQ ID NO: 6585 - RNA, 1129 nt, Artificial Sequence
  mRNA Design a-1 (hSL-A64-N5) comprising derived and/or modified sequence from Pf(3D7)__XP_001351122.1__HsALB_Pf-CSP(98-374) (opt1)
aggagagucccgcagucggcguccagcggcucugcuuguucgugugugugucguugcaggccuuauucaagcuuaccaugaagugggugaccuucaucagccugcucuuccuguucuccagcgccuacuccgccgacgggaaccccgaccccaacgccaaccccaacguggacccgaacgccaaccccaacgucgaccccaacgccaaccccaacguggacccgaacgcgaaccccaacgccaaccccaacgccaaccccaacgccaacccgaacgcgaaccccaacgccaaccccaacgccaaccccaacgccaacccgaacgccaaccccaacgcgaaccccaacgccaaccccaacgccaacccgaacgccaaccccaacgccaaccccaacgcgaaccccaacgccaacccgaacgccaaccccaacguggaccccaacgccaaccccaacgccaacccgaacgcgaaccccaacgccaaccccaacgccaacccgaacgccaaccccaacgccaaccccaacgcgaaccccaacgccaacccgaacgccaaccccaacgccaaccccaacgcgaaccccaacgccaacccgaacgccaaccccaacgccaaccccaacgccaaccccaacgcgaacccgaacgccaaccccaacaagaacaaccagggcaacggccaggggcacaacaugcccaacgaccccaaccgcaacgucgacgagaacgccaacgccaacuccgccgugaagaacaacaacaacgaggagccgagcgacaagcacaucaaggaguaccugaacaagauccagaacucccucagcacggaguggucccccugcagcgugaccugcggcaacgggauccagguccggaucaagcccggcuccgcgaacaagcccaaggacgagcuggacuacgccaacgacaucgagaagaagaucugcaagauggagaagugcugaggacuagucccuguucccagagcccacuuuuuuuucuuuuuuugaaauaaaauagccugucuuucagaucucaaaggcucuuuucagagccaccaaaaaaaaaaaaaaaaaaaaaaaaaaaaaaaaaaaaaaaaaaaaaaaaaaaaaaaaaaaaaaaaagaauu

SEQ ID NO: 6586 - RNA, 1198 nt, Artificial Sequence
  mRNA Design a-1 (hSL-A64-N5) comprising derived and/or modified sequence from Pf(3D7)__XP_001351122.1__HsALB_Pf-CSP(98-397) (opt1)
aggagagucccgcagucggcguccagcggcucugcuuguucgugugugugucguugcaggccuuauucaagcuuaccaugaagugggugaccuucaucagccugcucuuccuguucuccagcgccuacuccgccgacgggaaccccgaccccaacgccaaccccaacguggacccgaacgccaaccccaacgucgaccccaacgccaaccccaacguggacccgaacgcgaaccccaacgccaaccccaacgccaaccccaacgccaacccgaacgcgaaccccaacgccaaccccaacgccaaccccaacgccaacccgaacgccaaccccaacgcgaaccccaacgccaaccccaacgccaacccgaacgccaaccccaacgccaaccccaacgcgaaccccaacgccaacccgaacgccaaccccaacguggaccccaacgccaaccccaacgccaacccgaacgcgaaccccaacgccaaccccaacgccaacccgaacgccaaccccaacgccaaccccaacgcgaaccccaacgccaacccgaacgccaaccccaacgccaaccccaacgcgaaccccaacgccaacccgaacgccaaccccaacgccaaccccaacgccaaccccaacgcgaacccgaacgccaaccccaacaagaacaaccagggcaacggccaggggcacaacaugcccaacgaccccaaccgcaacgucgacgagaacgccaacgccaacuccgccgugaagaacaacaacaacgaggagccgagcgacaagcacaucaaggaguaccugaacaagauccagaacucccucagcacggaguggucccccugcagcgugaccugcggcaacgggauccagguccggaucaagcccggcuccgcgaacaagcccaaggacgagcuggacuacgccaacgacaucgagaagaagaucugcaagauggagaagugcagcuccguguucaacguggucaacagcuccaucgggcugaucauggugcucagcuuccuguuccugaacugaggacuagucccuguucccagagcccacuuuuuuuucuuuuuuugaaauaaaauagccugucuuucagaucucaaaggcucuuuucagagccaccaaaaaaaaaaaaaaaaaaaaaaaaaaaaaaaaaaaaaaaaaaaaaaaaaaaaaaaaaaaaaaaaagaauu

SEQ ID NO: 6587 - RNA, 1525 nt, Artificial Sequence
  mRNA Design a-1 (hSL-A64-N5) comprising derived and/or modified sequence from Pf(3D7)__XP_001351122.1__HsALB_Pf-CSP(199-377)_L(PVTN)_HBsAg (opt1)
aggagagucccgcagucggcguccagcggcucugcuuguucgugugugugucguugcaggccuuauucaagcuuaccaugaaguggguaaccuuuauuucccuucuuuuucucuuuagcucggcuuauuccgaccccaacgccaaccccaacgccaacccgaacgcgaaccccaacgccaaccccaacgccaacccgaacgccaaccccaacgccaaccccaacgcgaaccccaacgccaacccgaacgccaaccccaacgccaaccccaacgcgaaccccaacgccaacccgaacgccaaccccaacgccaaccccaacgccaaccccaacgcgaacccgaacgccaaccccaacaagaacaaccagggcaacggccaggggcacaacaugcccaacgaccccaaccgcaacgucgacgagaacgccaacgccaacuccgccgugaagaacaacaacaacgaggagccgagcgacaagcacaucaaggaguaccugaacaagauccagaacucccucagcacggaguggucccccugcagcgugaccugcggcaacgggauccagguccggaucaagcccggcuccgcgaacaagcccaaggacgagcuggacuacgccaacgacaucgagaagaagaucugcaagauggagaagugcagcuccgugccggugacgaacauggagaacaucaccagcggcuuccuggggccccuccuggugcugcaggccggcuucuuccuccugacccgcauccugaccaucccgcagucccucgacagcugguggaccucccugaacuuccucgggggcagccccgucugccuggggcagaacucccagagccccaccuccaaccacagccccaccuccugcccgcccaucugccccggcuaccgguggaugugccugcgccgguucaucaucuuccuguucauccuccugcugugccucaucuuccugcuggugcuccuggacuaccagggcaugcugcccgugugcccgcucauccccgggagcacgaccaccaacaccggccccugcaagacgugcaccacccccgcccaggggaacuccauguucccgagcugcugcugcaccaagcccacggacggcaacugcacgugcauccccauccccuccagcugggcguucgccaaguaccugugggagugggccuccguccgcuucagcuggcugucccuccuggugccguucgugcagugguucgucgggcugagccccaccguguggcucuccgccaucuggaugaugugguacuggggccccagccuguacagcaucgugucccccuucaucccgcugcuccccaucuucuucugccugugggucuacaucugaggacuagucccuguucccagagcccacuuuuuuuucuuuuuuugaaauaaaauagccugucuuucagaucucaaaggcucuuuucagagccaccaaaaaaaaaaaaaaaaaaaaaaaaaaaaaaaaaaaaaaaaaaaaaaaaaaaaaaaaaaaaaaaaagaauu

SEQ ID NO: 6588 - RNA, 1435 nt, Artificial Sequence; identical to SEQ ID NO: 6558
  mRNA Design a-1 (hSL-A64-N5) comprising derived and/or modified sequence from Pf(3D7)__XP_001351122.1__Pf-CSP (opt1)

SEQ ID NO: 6589 - RNA, 1366 nt, Artificial Sequence; identical to SEQ ID NO: 6559
  mRNA Design a-1 (hSL-A64-N5) comprising derived and/or modified sequence from Pf(3D7)__XP_001351122.1__Pf-CSP(1-374) (opt1)

SEQ ID NO: 6590 - RNA, 1219 nt, Artificial Sequence; identical to SEQ ID NO: 6560
  mRNA Design a-1 (hSL-A64-N5) comprising derived and/or modified sequence from Pf(3D7)__XP_001351122.1__Pf-CSP(1-325) (opt1)

SEQ ID NO: 6591 - RNA, 1435 nt, Artificial Sequence
  mRNA Design a-1 (hSL-A64-N5) comprising derived and/or modified sequence from Pf(3D7)__XP_001351122.1__HsALB_Pf-CSP(19-397) (opt1)
aggagagucccgcagucggcguccagcggcucugcuuguucgugugugugucguugcaggccuuauucaagcuuaccaugaagugggugaccuucaucagccuccuguuccuguucuccagcgccuacucccuguuccaggaguaccagugcuacggcagcuccagcaacacccgcguccucaacgagcugaacuacgacaacgccgggacgaaccuguacaacgagcucgagaugaacuacuacggcaagcaggagaacugguacucccugaagaagaacagccggucccugggggagaacgacgacggcaacaacgaggacaacgagaagcuccgcaagcccaagcacaagaagcugaagcagccggcggacgggaaccccgaccccaacgccaaccccaacguggacccgaacgccaaccccaacguggaccccaacgccaaccccaacgucgacccgaacgccaaccccaacgcgaaccccaacgccaaccccaacgccaacccgaacgccaaccccaacgcgaaccccaacgccaaccccaacgccaacccgaacgccaaccccaacgccaaccccaacgcgaaccccaacgccaacccgaacgccaaccccaacgccaaccccaacgccaaccccaacgcgaacccgaacgccaaccccaacguggaccccaacgccaaccccaacgccaacccgaacgccaaccccaacgcgaaccccaacgccaacccgaacgccaaccccaacgccaaccccaacgccaaccccaacgcgaacccgaacgccaaccccaacgccaaccccaacgccaaccccaacgcgaacccgaacgccaaccccaacgccaaccccaacgccaaccccaacgccaacccgaacgcgaaccccaacaagaacaaccagggcaacggccaggggcacaacaugcccaacgaccccaaccggaacguggacgagaacgccaacgccaacagcgccgucaagaacaacaacaacgaggagccguccgacaagcacaucaaggaguaccugaacaagauccagaacagccucuccaccgaguggagccccugcuccgugaccugcggcaacgggauccaggugcgcaucaagcccggcagcgccaacaagcccaaggacgagcuggacuacgcgaacgacaucgagaagaagaucugcaagauggagaagugcuccagcgucuucaacguggugaacuccagcaucgggcugaucaugguccucagcuuccuguuccugaacugaggacuagucccuguucccagagcccacuuuuuuuucuuuuuuugaaauaaaauagccugucuuucagaucucaaaggcucuuuucagagccaccaaaaaaaaaaaaaaaaaaaaaaaaaaaaaaaaaaaaaaaaaaaaaaaaaaaaaaaaaaaaaaaaagaauu

SEQ ID NO: 6592 - RNA, 1453 nt, Artificial Sequence
  mRNA Design a-1 (hSL-A64-N5) comprising derived and/or modified sequence from Pf(3D7)__XP_001351122.1__HsIns-iso1_Pf-CSP(19-397) (opt1)
aggagagucccgcagucggcguccagcggcucugcuuguucgugugugugucguugcaggccuuauucaagcuuaccauggcccuguggaugcgccuccugccccugcucgcccugcuggcgcucuggggcccggaccccgccgccgcccuguuccaggaguaccagugcuacgggagcuccagcaacacccgggugcugaacgagcucaacuacgacaacgccggcaccaaccuguacaacgagcuggagaugaacuacuacgggaagcaggagaacugguacucccucaagaagaacagccgcucccugggcgagaacgacgacgggaacaacgaggacaacgagaagcugcggaagcccaagcacaagaagcucaagcagcccgcggacggcaacccggaccccaacgccaaccccaacgucgaccccaacgccaacccgaacguggaccccaacgccaaccccaacguggaccccaacgcgaacccgaacgccaaccccaacgccaaccccaacgccaaccccaacgccaacccgaacgcgaaccccaacgccaaccccaacgccaaccccaacgccaacccgaacgccaaccccaacgcgaaccccaacgccaaccccaacgccaacccgaacgccaaccccaacgccaaccccaacgcgaaccccaacgccaacccgaacgucgaccccaacgccaaccccaacgccaacccgaacgccaaccccaacgcgaaccccaacgccaaccccaacgccaacccgaacgccaaccccaacgcgaaccccaacgccaaccccaacgccaacccgaacgccaaccccaacgccaaccccaacgcgaaccccaacgccaacccgaacgccaaccccaacgccaaccccaacgccaaccccaacgcgaacccgaacaagaacaaccagggcaacgggcagggccacaacaugcccaacgaccccaaccgcaacguggacgagaacgccaacgccaacagcgccgugaagaacaacaacaacgaggagcccuccgacaagcacaucaaggaguaccugaacaagauccagaacagccuguccacggaguggagcccgugcuccgugaccugcgggaacggcauccagguccggaucaagcccgggagcgccaacaagcccaaggacgagcucgacuacgcgaacgacaucgagaagaagaucugcaagauggagaagugcuccagcguguucaacgucgugaacuccagcaucggccugaucauggugcuguccuuccucuuccugaacugaggacuagucccuguucccagagcccacuuuuuuuucuuuuuuugaaauaaaauagccugucuuucagaucucaaaggcucuuuucagagccaccaaaaaaaaaaaaaaaaaaaaaaaaaaaaaaaaaaaaaaaaaaaaaaaaaaaaaaaaaaaaaaaaagaauu

SEQ ID NO: 6593 - RNA, 1432 nt, Artificial Sequence
  mRNA Design a-1 (hSL-A64-N5) comprising derived and/or modified sequence from Pf(3D7)__XP_001351122.1__HsSPARC_Pf-CSP(19-397) (opt1)
aggagagucccgcagucggcguccagcggcucugcuuguucgugugugugucguugcaggccuuauucaagcuuaccaugcgcgccuggaucuucuuccugcucugccuggccggccgggcgcuggcccucuuccaggaguaccagugcuacgggagcuccagcaacacccgcgugcugaacgagcugaacuacgacaacgccggcaccaaccucuacaacgagcuggagaugaacuacuacgggaagcaggagaacugguacucccugaagaagaacagccggucccucggcgagaacgacgacgggaacaacgaggacaacgagaagcugcgcaagcccaagcacaagaagcugaagcagccggccgacggcaaccccgaccccaacgccaaccccaacgucgacccgaacgcgaaccccaacguggaccccaacgccaaccccaacguggacccgaacgccaaccccaacgccaaccccaacgcgaaccccaacgccaacccgaacgccaaccccaacgccaaccccaacgccaaccccaacgcgaacccgaacgccaaccccaacgccaaccccaacgccaaccccaacgccaacccgaacgcgaaccccaacgccaaccccaacgccaaccccaacgccaacccgaacgccaaccccaacgucgaccccaacgcgaaccccaacgccaacccgaacgccaaccccaacgccaaccccaacgccaacccgaacgcgaaccccaacgccaaccccaacgccaaccccaacgccaacccgaacgcgaaccccaacgccaaccccaacgccaaccccaacgccaacccgaacgccaaccccaacgcgaaccccaacgccaaccccaacgccaacccgaacgccaaccccaacaagaacaaccagggcaacgggcagggccacaacaugcccaacgaccccaaccggaacguggacgagaacgccaacgcgaacagcgccgugaagaacaacaacaacgaggagccguccgacaagcacaucaaggaguaccucaacaagauccagaacagccuguccacggaguggagccccugcuccgugaccugcgggaacggcauccagguccgcaucaagcccgggagcgccaacaagcccaaggacgagcuggacuacgccaacgacaucgagaagaagaucugcaagauggagaagugcuccagcguguucaacgucgugaacuccagcaucggccucaucauggugcuguccuuccuguuccucaacugaggacuagucccuguucccagagcccacuuuuuuuucuuuuuuugaaauaaaauagccugucuuucagaucucaaaggcucuuuucagagccaccaaaaaaaaaaaaaaaaaaaaaaaaaaaaaaaaaaaaaaaaaaaaaaaaaaaaaaaaaaaaaaaaagaauu

SEQ ID NO: 6594 - RNA, 1435 nt, Artificial Sequence
  mRNA Design a-1 (hSL-A64-N5) comprising derived and/or modified sequence from Pf(3D7)__XP_001351122.1__IgE_Pf-CSP(19-397) (opt1)
aggagagucccgcagucggcguccagcggcucugcuuguucgugugugugucguugcaggccuuauucaagcuuaccauggacuggaccuggauccuguuccucguggccgccgcgacccgcguccacagccuguuccaggaguaccagugcuacggcuccagcuccaacacgcgggugcugaacgagcucaacuacgacaacgccgggaccaaccuguacaacgagcuggagaugaacuacuacggcaagcaggagaacugguacagccucaagaagaacucccgcagccugggggagaacgacgacggcaacaacgaggacaacgagaagcugcggaagcccaagcacaagaagcucaagcagccggccgacgggaaccccgaccccaacgccaaccccaacguggacccgaacgccaaccccaacgucgaccccaacgcgaaccccaacguggacccgaacgccaaccccaacgccaaccccaacgccaaccccaacgcgaacccgaacgccaaccccaacgccaaccccaacgccaaccccaacgccaacccgaacgcgaaccccaacgccaaccccaacgccaaccccaacgccaacccgaacgccaaccccaacgcgaaccccaacgccaaccccaacgccaacccgaacgccaaccccaacguggaccccaacgccaaccccaacgcgaacccgaacgccaaccccaacgccaaccccaacgccaacccgaacgccaaccccaacgcgaaccccaacgccaaccccaacgccaacccgaacgccaaccccaacgcgaaccccaacgccaaccccaacgccaacccgaacgccaaccccaacgccaaccccaacgcgaaccccaacgccaacccgaacgccaaccccaacaagaacaaccagggcaacggccaggggcacaacaugcccaacgaccccaaccgcaacgucgacgagaacgccaacgccaacuccgcggugaagaacaacaacaacgaggagccgagcgacaagcacaucaaggaguaccugaacaagauccagaacucccugagcaccgaguggucccccugcagcgugaccugcggcaacgggauccagguccggaucaagcccggcuccgccaacaagcccaaggacgagcucgacuacgccaacgacaucgagaagaagaucugcaagauggagaagugcagcuccguguucaacguggucaacagcuccaucgggcugaucauggugcugagcuuccucuuccugaacugaggacuagucccuguucccagagcccacuuuuuuuucuuuuuuugaaauaaaauagccugucuuucagaucucaaaggcucuuuucagagccaccaaaaaaaaaaaaaaaaaaaaaaaaaaaaaaaaaaaaaaaaaaaaaaaaaaaaaaaaaaaaaaaaagaauu

SEQ ID NO: 6595 - RNA, 1600 nt, Artificial Sequence
  mRNA Design a-1 (hSL-A64-N5) comprising derived and/or modified sequence from Pf(3D7)__XP_001351122.1__Pf-CSP_L(G4SG4)_TM domain HA (opt1)
aggagagucccgcagucggcguccagcggcucugcuuguucgugugugugucguugcaggccuuauucaagcuuaccaugaugcgcaagcuggccauccucagcguguccagcuuccuguucgucgaggcccuguuccaggaguaccagugcuacggcuccagcuccaacacccgggugcucaacgagcugaacuacgacaacgcggggaccaaccuguacaacgagcucgagaugaacuacuacggcaagcaggagaacugguacagccugaagaagaacucccgcagccugggggagaacgacgacggcaacaacgaggacaacgagaagcuccggaagcccaagcacaagaagcugaagcagccggccgacgggaaccccgaccccaacgccaaccccaacguggacccgaacgccaaccccaacgucgaccccaacgccaaccccaacguggacccgaacgcgaaccccaacgccaaccccaacgccaaccccaacgccaacccgaacgcgaaccccaacgccaaccccaacgccaaccccaacgccaacccgaacgccaaccccaacgcgaaccccaacgccaaccccaacgccaacccgaacgccaaccccaacgccaaccccaacgcgaaccccaacgccaacccgaacgccaaccccaacguggaccccaacgccaaccccaacgccaacccgaacgcgaaccccaacgccaaccccaacgccaacccgaacgccaaccccaacgccaaccccaacgcgaaccccaacgccaacccgaacgccaaccccaacgccaaccccaacgcgaaccccaacgccaacccgaacgccaaccccaacgccaaccccaacgccaaccccaacgcgaacccgaacgccaaccccaacaagaacaaccagggcaacggccaggggcacaacaugcccaacgaccccaaccgcaacgucgacgagaacgccaacgccaacuccgccgugaagaacaacaacaacgaggagccgagcgacaagcacaucaaggaguaccugaacaagauccagaacucccucagcacggaguggucccccugcagcgugaccugcggcaacgggauccagguccggaucaagcccggcuccgcgaacaagcccaaggacgagcuggacuacgccaacgacaucgagaagaagaucugcaagauggagaagugcagcuccguguucaacguggucaacagcuccaucgggcugaucauggugcucagcuuccuguuccugaacggcggcgggggcagcgggggcggcgggaagcucgaguccacccgcaucuaccagauccuggccaucuacagcaccguggccuccagccugguccucguggugucccugggcgccaucagcuucuggaugugcuccaacgggagccugcagugccggaucugcaucugaggacuagucccuguucccagagcccacuuuuuuuucuuuuuuugaaauaaaauagccugucuuucagaucucaaaggcucuuuucagagccaccaaaaaaaaaaaaaaaaaaaaaaaaaaaaaaaaaaaaaaaaaaaaaaaaaaaaaaaaaaaaaaaaagaauu

SEQ ID NO: 6596 - RNA, 1474 nt, Artificial Sequence
  mRNA Design a-1 (hSL-A64-N5) comprising derived and/or modified sequence from Pf(3D7)__XP_001351122.1__Pf-CSP(199-377)_L(PVTN)_HBsAg (opt1)
aggagagucccgcagucggcguccagcggcucugcuuguucgugugugugucguugcaggccuuauucaagcuuaccauggaccccaacgccaacccgaacgccaaccccaacgcgaaccccaacgccaaccccaacgccaacccgaacgccaaccccaacgccaaccccaacgcgaaccccaacgccaacccgaacgccaaccccaacgccaaccccaacgcgaaccccaacgccaacccgaacgccaaccccaacgccaaccccaacgccaaccccaacgcgaacccgaacgccaaccccaacaagaacaaccagggcaacgggcagggccacaacaugcccaacgaccccaaccgcaacguggacgagaacgccaacgccaacagcgccgucaagaacaacaacaacgaggagccguccgacaagcacaucaaggaguaccugaacaagauccagaacagccucuccaccgaguggagccccugcuccgugaccugcgggaacggcauccaggugcggaucaagcccgggagcgcgaacaagcccaaggacgagcuggacuacgccaacgacaucgagaagaagaucugcaagauggagaagugcuccagcgucccggugacgaacauggagaacaucaccuccggcuuccugggcccccuccuggugcugcaggccggguucuuccuccugacccgcauccugaccaucccccagagccucgacuccugguggacgagccugaacuuccugggcgggucccccgucugccucggccagaacagccaguccccgaccagcaaccacucccccaccagcugcccgcccaucugccccggguaccgguggaugugccugcgccgguucaucaucuuccuguucauccuccugcugugccucaucuuccugcuggugcuccuggacuaccagggcaugcugcccgugugcccccucaucccgggcuccaccacgaccaacaccgggcccugcaagaccugcacgacccccgcccagggcaacagcauguuccccagcugcugcugcaccaagccgaccgacgggaacugcacgugcauccccauccccuccagcugggccuucgcgaaguaccugugggagugggccuccguccgcuucagcuggcugucccuccuggugcccuucgugcagugguucgucggccugagcccgaccguguggcucuccgccaucuggaugaugugguacuggggccccagccuguacuccaucgugagccccuucaucccccugcucccgaucuucuucugccugugggucuacaucugaggacuagucccuguucccagagcccacuuuuuuuucuuuuuuugaaauaaaauagccugucuuucagaucucaaaggcucuuuucagagccaccaaaaaaaaaaaaaaaaaaaaaaaaaaaaaaaaaaaaaaaaaaaaaaaaaaaaaaaaaaaaaaaaagaauu

SEQ ID NO: 6597 - RNA, 1516 nt, Artificial Sequence
  mRNA Design a-1 (hSL-A64-N5) comprising derived and/or modified sequence from Pf(3D7)__XP_001351122.1__Pf-CSP(199-387)_L(PVTN)_HBsAg (opt1)
aggagagucccgcagucggcguccagcggcucugcuuguucgugugugugucguugcaggccuuauucaagcuuaccaugauggcccccgacccgaacgccaaccccaacgcgaaccccaacgccaaccccaacgccaacccgaacgccaaccccaacgccaaccccaacgcgaaccccaacgccaacccgaacgccaaccccaacgccaaccccaacgcgaaccccaacgccaacccgaacgccaaccccaacgccaaccccaacgccaaccccaacgcgaacccgaacgccaaccccaacgccaaccccaacaagaacaaccagggcaacgggcagggccacaacaugcccaacgacccgaaccgcaacguggacgagaacgccaacgccaacagcgcggucaagaacaacaacaacgaggagcccuccgacaagcacaucaaggaguaccugaacaagauccagaacagccucuccaccgaguggagccccugcuccgugaccugcgggaacggcauccaggugcggaucaagcccgggagcgccaacaagccgaaggacgagcuggacuacgccaacgacaucgagaagaagaucugcaagauggagaagugcuccagcgucuucaacguggugaacuccagcaucggccugggccccgucacgaacauggagaacaucaccuccggguuccucggcccccugcuggugcuccaggccggguucuuccugcugacccgcauccucaccaucccccagagccuggacuccugguggacgagccugaacuuccucggcggguccccggugugccugggccagaacagccagucccccaccagcaaccacucccccaccagcugcccgcccaucugccccggcuaccgguggaugugccugcgccgguucaucaucuuccucuucauccugcugcucugccugaucuuccugcucguccugcuggacuaccaggggaugcuccccgugugcccgcugauccccggcagcaccacgaccaacaccgggcccugcaagaccugcacgacccccgcccagggcaacuccauguucccgagcugcugcugcaccaagcccaccgacggcaacugcacgugcauccccauccccuccagcugggcguucgccaaguaccugugggagugggccuccgugcgcuucagcuggcucucccugcuggucccguucgugcagugguucguggggcucagccccaccgucuggcuguccgccaucuggaugaugugguacuggggccccagccuguacuccaucgugagccccuucaucccgcuccugcccaucuucuucugccuguggguguacaucugaggacuagucccuguucccagagcccacuuuuuuuucuuuuuuugaaauaaaauagccugucuuucagaucucaaaggcucuuuucagagccaccaaaaaaaaaaaaaaaaaaaaaaaaaaaaaaaaaaaaaaaaaaaaaaaaaaaaaaaaaaaaaaaaagaauu

SEQ ID NO: 6598 - RNA, 700 nt, Artificial Sequence
  mRNA Design a-1 (hSL-A64-N5) comprising derived and/or modified sequence from Pf(3D7)__XP_001351122.1__HsALB_Pf-CSP(19-152) (opt1)
aggagagucccgcagucggcguccagcggcucugcuuguucgugugugugucguugcaggccuuauucaagcuuaccaugaagugggugaccuucaucagccuccuguuccuguucuccagcgccuacucccuguuccaggaguaccagugcuacggcagcuccagcaacacccgcguccucaacgagcugaacuacgacaacgccgggacgaaccuguacaacgagcucgagaugaacuacuacggcaagcaggagaacugguacucccugaagaagaacagccggucccugggggagaacgacgacggcaacaacgaggacaacgagaagcuccgcaagcccaagcacaagaagcugaagcagccggcggacgggaaccccgaccccaacgccaaccccaacguggacccgaacgccaaccccaacguggaccccaacgccaaccccaacgucgacccgaacgccaaccccaacgcgaaccccaacgccaaccccaacgccaacccgaacgccaaccccaacgcgaaccccugaggacuagucccuguucccagagcccacuuuuuuuucuuuuuuugaaauaaaauagccugucuuucagaucucaaaggcucuuuucagagccaccaaaaaaaaaaaaaaaaaaaaaaaaaaaaaaaaaaaaaaaaaaaaaaaaaaaaaaaaaaaaaaaaagaauu

SEQ ID NO: 6599 - RNA, 820 nt, Artificial Sequence
  mRNA Design a-1 (hSL-A64-N5) comprising derived and/or modified sequence from Pf(3D7)__XP_001351122.1__HsALB_Pf-CSP(19-192) (opt1)
aggagagucccgcagucggcguccagcggcucugcuuguucgugugugugucguugcaggccuuauucaagcuuaccaugaagugggugaccuucaucagccuccuguuccuguucuccagcgccuacucccuguuccaggaguaccagugcuacggcagcuccagcaacacccgcguccucaacgagcugaacuacgacaacgccgggacgaaccuguacaacgagcucgagaugaacuacuacggcaagcaggagaacugguacucccugaagaagaacagccggucccugggggagaacgacgacggcaacaacgaggacaacgagaagcuccgcaagcccaagcacaagaagcugaagcagccggcggacgggaaccccgaccccaacgccaaccccaacguggacccgaacgccaaccccaacguggaccccaacgccaaccccaacgucgacccgaacgccaaccccaacgcgaaccccaacgccaaccccaacgccaacccgaacgccaaccccaacgcgaaccccaacgccaaccccaacgccaacccgaacgccaaccccaacgccaaccccaacgcgaaccccaacgccaacccgaacgccaaccccaacgccaaccccaacgccaaccccaacgcgaacccgugaggacuagucccuguucccagagcccacuuuuuuuucuuuuuuugaaauaaaauagccugucuuucagaucucaaaggcucuuuucagagccaccaaaaaaaaaaaaaaaaaaaaaaaaaaaaaaaaaaaaaaaaaaaaaaaaaaaaaaaaaaaaaaaaagaauu

SEQ ID NO: 6600 - RNA, 1060 nt, Artificial Sequence
  mRNA Design a-1 (hSL-A64-N5) comprising derived and/or modified sequence from Pf(3D7)__XP_001351122.1__HsALB_Pf-CSP(19-272) (opt1)
aggagagucccgcagucggcguccagcggcucugcuuguucgugugugugucguugcaggccuuauucaagcuuaccaugaagugggugaccuucaucagccuccuguuccuguucuccagcgccuacucccuguuccaggaguaccagugcuacggcagcuccagcaacacccgcguccucaacgagcugaacuacgacaacgccgggacgaaccuguacaacgagcucgagaugaacuacuacggcaagcaggagaacugguacucccugaagaagaacagccggucccugggggagaacgacgacggcaacaacgaggacaacgagaagcuccgcaagcccaagcacaagaagcugaagcagccggcggacgggaaccccgaccccaacgccaaccccaacguggacccgaacgccaaccccaacguggaccccaacgccaaccccaacgucgacccgaacgccaaccccaacgcgaaccccaacgccaaccccaacgccaacccgaacgccaaccccaacgcgaaccccaacgccaaccccaacgccaacccgaacgccaaccccaacgccaaccccaacgcgaaccccaacgccaacccgaacgccaaccccaacgccaaccccaacgccaaccccaacgcgaacccgaacgccaaccccaacguggaccccaacgccaaccccaacgccaacccgaacgccaaccccaacgcgaaccccaacgccaacccgaacgccaaccccaacgccaaccccaacgccaaccccaacgcgaacccgaacgccaaccccaacgccaaccccaacgccaaccccaacgcgaacccgaacgccaaccccaacgccaaccccaacgccaaccccaacgccaacccgaacgcgaaccccugaggacuagucccuguucccagagcccacuuuuuuuucuuuuuuugaaauaaaauagccugucuuucagaucucaaaggcucuuuucagagccaccaaaaaaaaaaaaaaaaaaaaaaaaaaaaaaaaaaaaaaaaaaaaaaaaaaaaaaaaaaaaaaaaagaauu

SEQ ID NO: 6601 - RNA, 1222 nt, Artificial Sequence
  mRNA Design a-1 (hSL-A64-N5) comprising derived and/or modified sequence from Pf(3D7)__XP_001351122.1__HsALB_Pf-CSP(19-272)_L(AAY)_Pf-CSP(310-3 27)_L(AAY)_Pf-CSP(346-375) (opt1)
aggagagucccgcagucggcguccagcggcucugcuuguucgugugugugucguugcaggccuuauucaagcuuaccaugaagugggugaccuucaucagccuccuguuccuguucuccagcgccuacucccuguuccaggaguaccagugcuacggcagcuccagcaacacccgcguccucaacgagcugaacuacgacaacgccgggacgaaccuguacaacgagcucgagaugaacuacuacggcaagcaggagaacugguacucccugaagaagaacagccggucccugggggagaacgacgacggcaacaacgaggacaacgagaagcuccgcaagcccaagcacaagaagcugaagcagccggcggacgggaaccccgaccccaacgccaaccccaacguggacccgaacgccaaccccaacguggaccccaacgccaaccccaacgucgacccgaacgccaaccccaacgcgaaccccaacgccaaccccaacgccaacccgaacgccaaccccaacgcgaaccccaacgccaaccccaacgccaacccgaacgccaaccccaacgccaaccccaacgcgaaccccaacgccaacccgaacgccaaccccaacgccaaccccaacgccaaccccaacgcgaacccgaacgccaaccccaacguggaccccaacgccaaccccaacgccaacccgaacgccaaccccaacgcgaaccccaacgccaacccgaacgccaaccccaacgccaaccccaacgccaaccccaacgcgaacccgaacgccaaccccaacgccaaccccaacgccaaccccaacgcgaacccgaacgccaaccccaacgccaaccccaacgccaaccccaacgccaacccgaacgcgaaccccgccgccuacgagcccagcgacaagcacaucaaggaguaccugaacaagauccagaacucccucgccgccuacaucaagcccggcagcgcgaacaagccgaaggacgagcuggacuacgccaacgacaucgagaagaagaucugcaagauggagaagugcuccugaggacuagucccuguucccagagcccacuuuuuuuucuuuuuuugaaauaaaauagccugucuuucagaucucaaaggcucuuuucagagccaccaaaaaaaaaaaaaaaaaaaaaaaaaaaaaaaaaaaaaaaaaaaaaaaaaaaaaaaaaaaaaaaaagaauu

SEQ ID NO: 6602 - RNA, 1183 nt, Artificial Sequence
  mRNA Design a-1 (hSL-A64-N5) comprising derived and/or modified sequence from Pf(3D7)__XP_001351122.1__HsALB_Pf-CSP(19-272)_L(AAY)_Pf-CSP(346-3 65)_L(AAY)_P2 (opt1)
aggagagucccgcagucggcguccagcggcucugcuuguucgugugugugucguugcaggccuuauucaagcuuaccaugaagugggugaccuucaucagccuccuguuccuguucuccagcgccuacucccuguuccaggaguaccagugcuacggcagcuccagcaacacccgcguccucaacgagcugaacuacgacaacgccgggacgaaccuguacaacgagcucgagaugaacuacuacggcaagcaggagaacugguacucccugaagaagaacagccggucccugggggagaacgacgacggcaacaacgaggacaacgagaagcuccgcaagcccaagcacaagaagcugaagcagccggcggacgggaaccccgaccccaacgccaaccccaacguggacccgaacgccaaccccaacguggaccccaacgccaaccccaacgucgacccgaacgccaaccccaacgcgaaccccaacgccaaccccaacgccaacccgaacgccaaccccaacgcgaaccccaacgccaaccccaacgccaacccgaacgccaaccccaacgccaaccccaacgcgaaccccaacgccaacccgaacgccaaccccaacgccaaccccaacgccaaccccaacgcgaacccgaacgccaaccccaacguggaccccaacgccaaccccaacgccaacccgaacgccaaccccaacgcgaaccccaacgccaacccgaacgccaaccccaacgccaaccccaacgccaaccccaacgcgaacccgaacgccaaccccaacgccaaccccaacgccaaccccaacgcgaacccgaacgccaaccccaacgccaaccccaacgccaaccccaacgccaacccgaacgcgaaccccgccgccuacaucaagcccggcagcgccaacaagcccaaggacgagcuggacuacgccaacgacaucgaggcggccuaccaguacaucaaggccaacuccaaguucaucggcaucaccgagcucugaggacuagucccuguucccagagcccacuuuuuuuucuuuuuuugaaauaaaauagccugucuuucagaucucaaaggcucuuuucagagccaccaaaaaaaaaaaaaaaaaaaaaaaaaaaaaaaaaaaaaaaaaaaaaaaaaaaaaaaaaaaaaaaaagaauu

SEQ ID NO: 6603 - RNA, 1177 nt, Artificial Sequence
  mRNA Design a-1 (hSL-A64-N5) comprising derived and/or modified sequence from Pf(3D7)__XP_001351122.1__HsALB_Pf-CSP(19-272)_L(AAY)_Pf-CSP(346-3 65)_L(AAY)_PADRE (opt1)
aggagagucccgcagucggcguccagcggcucugcuuguucgugugugugucguugcaggccuuauucaagcuuaccaugaagugggugaccuucaucagccuccuguuccuguucuccagcgccuacucccuguuccaggaguaccagugcuacggcagcuccagcaacacccgcguccucaacgagcugaacuacgacaacgccgggacgaaccuguacaacgagcucgagaugaacuacuacggcaagcaggagaacugguacucccugaagaagaacagccggucccugggggagaacgacgacggcaacaacgaggacaacgagaagcuccgcaagcccaagcacaagaagcugaagcagccggcggacgggaaccccgaccccaacgccaaccccaacguggacccgaacgccaaccccaacguggaccccaacgccaaccccaacgucgacccgaacgccaaccccaacgcgaaccccaacgccaaccccaacgccaacccgaacgccaaccccaacgcgaaccccaacgccaaccccaacgccaacccgaacgccaaccccaacgccaaccccaacgcgaaccccaacgccaacccgaacgccaaccccaacgccaaccccaacgccaaccccaacgcgaacccgaacgccaaccccaacguggaccccaacgccaaccccaacgccaacccgaacgccaaccccaacgcgaaccccaacgccaacccgaacgccaaccccaacgccaaccccaacgccaaccccaacgcgaacccgaacgccaaccccaacgccaaccccaacgccaaccccaacgcgaacccgaacgccaaccccaacgccaaccccaacgccaaccccaacgccaacccgaacgcgaaccccgccgccuacaucaagcccggcagcgccaacaagcccaaggacgagcuggacuacgccaacgacaucgaggcggccuacgccaaguucguggccgccuggacccucaaggcggccgccugaggacuagucccuguucccagagcccacuuuuuuuucuuuuuuugaaauaaaauagccugucuuucagaucucaaaggcucuuuucagagccaccaaaaaaaaaaaaaaaaaaaaaaaaaaaaaaaaaaaaaaaaaaaaaaaaaaaaaaaaaaaaaaaaagaauu

SEQ ID NO: 6604 - RNA, 1234 nt, Artificial Sequence
  mRNA Design a-1 (hSL-A64-N5) comprising derived and/or modified sequence from Pf(3D7)__XP_001351122.1__HsALB_Pf-CSP(19-272)_L(G4S)_Pf-CSP(310-3 27)_L(G4S)_Pf-CSP(346-375) (opt1)
aggagagucccgcagucggcguccagcggcucugcuuguucgugugugugucguugcaggccuuauucaagcuuaccaugaagugggugaccuucaucagccuccuguuccuguucuccagcgccuacucccuguuccaggaguaccagugcuacggcagcuccagcaacacccgcguccucaacgagcugaacuacgacaacgccgggacgaaccuguacaacgagcucgagaugaacuacuacggcaagcaggagaacugguacucccugaagaagaacagccggucccugggggagaacgacgacggcaacaacgaggacaacgagaagcuccgcaagcccaagcacaagaagcugaagcagccggcggacgggaaccccgaccccaacgccaaccccaacguggacccgaacgccaaccccaacguggaccccaacgccaaccccaacgucgacccgaacgccaaccccaacgcgaaccccaacgccaaccccaacgccaacccgaacgccaaccccaacgcgaaccccaacgccaaccccaacgccaacccgaacgccaaccccaacgccaaccccaacgcgaaccccaacgccaacccgaacgccaaccccaacgccaaccccaacgccaaccccaacgcgaacccgaacgccaaccccaacguggaccccaacgccaaccccaacgccaacccgaacgccaaccccaacgcgaaccccaacgccaacccgaacgccaaccccaacgccaaccccaacgccaaccccaacgcgaacccgaacgccaaccccaacgccaaccccaacgccaaccccaacgcgaacccgaacgccaaccccaacgccaaccccaacgccaaccccaacgccaacccgaacgcgaaccccggcggcgggggcagcgagcccuccgacaagcacaucaaggaguaccugaacaagauccagaacagccucgggggcgggggcuccaucaagcccggcagcgccaacaagccgaaggacgagcuggacuacgccaacgacaucgagaagaagaucugcaagauggagaagugcuccugaggacuagucccuguucccagagcccacuuuuuuuucuuuuuuugaaauaaaauagccugucuuucagaucucaaaggcucuuuucagagccaccaaaaaaaaaaaaaaaaaaaaaaaaaaaaaaaaaaaaaaaaaaaaaaaaaaaaaaaaaaaaaaaaagaauu

SEQ ID NO: 6605 - RNA, 1219 nt, Artificial Sequence
  mRNA Design a-1 (hSL-A64-N5) comprising derived and/or modified sequence from Pf(3D7)__XP_001351122.1__HsALB_Pf-CSP(19-272)_L(G4S)_Pf-CSP(310-3 27)_Pf-CSP(346-375) (opt1)
aggagagucccgcagucggcguccagcggcucugcuuguucgugugugugucguugcaggccuuauucaagcuuaccaugaagugggugaccuucaucagccuccuguuccuguucuccagcgccuacucccuguuccaggaguaccagugcuacggcagcuccagcaacacccgcguccucaacgagcugaacuacgacaacgccgggacgaaccuguacaacgagcucgagaugaacuacuacggcaagcaggagaacugguacucccugaagaagaacagccggucccugggggagaacgacgacggcaacaacgaggacaacgagaagcuccgcaagcccaagcacaagaagcugaagcagccggcggacgggaaccccgaccccaacgccaaccccaacguggacccgaacgccaaccccaacguggaccccaacgccaaccccaacgucgacccgaacgccaaccccaacgcgaaccccaacgccaaccccaacgccaacccgaacgccaaccccaacgcgaaccccaacgccaaccccaacgccaacccgaacgccaaccccaacgccaaccccaacgcgaaccccaacgccaacccgaacgccaaccccaacgccaaccccaacgccaaccccaacgcgaacccgaacgccaaccccaacguggaccccaacgccaaccccaacgccaacccgaacgccaaccccaacgcgaaccccaacgccaacccgaacgccaaccccaacgccaaccccaacgccaaccccaacgcgaacccgaacgccaaccccaacgccaaccccaacgccaaccccaacgcgaacccgaacgccaaccccaacgccaaccccaacgccaaccccaacgccaacccgaacgcgaaccccggcggcgggggcagcgagcccuccgacaagcacaucaaggaguaccugaacaagauccagaacagccucaucaagcccggguccgccaacaagccgaaggacgagcuggacuacgccaacgacaucgagaagaagaucugcaagauggagaagugcagcugaggacuagucccuguucccagagcccacuuuuuuuucuuuuuuugaaauaaaauagccugucuuucagaucucaaaggcucuuuucagagccaccaaaaaaaaaaaaaaaaaaaaaaaaaaaaaaaaaaaaaaaaaaaaaaaaaaaaaaaaaaaaaaaaagaauu

SEQ ID NO: 6606 - RNA, 1219 nt, Artificial Sequence
  mRNA Design a-1 (hSL-A64-N5) comprising derived and/or modified sequence from Pf(3D7)__XP_001351122.1__HsALB_Pf-CSP(19-325) (opt1)
aggagagucccgcagucggcguccagcggcucugcuuguucgugugugugucguugcaggccuuauucaagcuuaccaugaagugggugaccuucaucagccuccuguuccuguucuccagcgccuacucccuguuccaggaguaccagugcuacggcagcuccagcaacacccgcguccucaacgagcugaacuacgacaacgccgggacgaaccuguacaacgagcucgagaugaacuacuacggcaagcaggagaacugguacucccugaagaagaacagccggucccugggggagaacgacgacggcaacaacgaggacaacgagaagcuccgcaagcccaagcacaagaagcugaagcagccggcggacgggaaccccgaccccaacgccaaccccaacguggacccgaacgccaaccccaacguggaccccaacgccaaccccaacgucgacccgaacgccaaccccaacgcgaaccccaacgccaaccccaacgccaacccgaacgccaaccccaacgcgaaccccaacgccaaccccaacgccaacccgaacgccaaccccaacgccaaccccaacgcgaaccccaacgccaacccgaacgccaaccccaacgccaaccccaacgccaaccccaacgcgaacccgaacgccaaccccaacguggaccccaacgccaaccccaacgccaacccgaacgccaaccccaacgcgaaccccaacgccaacccgaacgccaaccccaacgccaaccccaacgccaaccccaacgcgaacccgaacgccaaccccaacgccaaccccaacgccaaccccaacgcgaacccgaacgccaaccccaacgccaaccccaacgccaaccccaacgccaacccgaacgcgaaccccaacaagaacaaccagggcaacggccaggggcacaacaugcccaacgaccccaaccggaacguggacgagaacgccaacgccaacagcgccgucaagaacaacaacaacgaggagccguccgacaagcacaucaaggaguaccugaacaagauccagaacugaggacuagucccuguucccagagcccacuuuuuuuucuuuuuuugaaauaaaauagccugucuuucagaucucaaaggcucuuuucagagccaccaaaaaaaaaaaaaaaaaaaaaaaaaaaaaaaaaaaaaaaaaaaaaaaaaaaaaaaaaaaaaaaaagaauu

SEQ ID NO: 6607 - RNA, 1396 nt, Artificial Sequence
  mRNA Design a-1 (hSL-A64-N5) comprising derived and/or modified sequence from Pf(3D7)__XP_001351122.1__HsALB_Pf-CSP(19-384) (opt1)
aggagagucccgcagucggcguccagcggcucugcuuguucgugugugugucguugcaggccuuauucaagcuuaccaugaagugggugaccuucaucagccuccuguuccuguucuccagcgccuacucccuguuccaggaguaccagugcuacggcagcuccagcaacacccgcguccucaacgagcugaacuacgacaacgccgggacgaaccuguacaacgagcucgagaugaacuacuacggcaagcaggagaacugguacucccugaagaagaacagccggucccugggggagaacgacgacggcaacaacgaggacaacgagaagcuccgcaagcccaagcacaagaagcugaagcagccggcggacgggaaccccgaccccaacgccaaccccaacguggacccgaacgccaaccccaacguggaccccaacgccaaccccaacgucgacccgaacgccaaccccaacgcgaaccccaacgccaaccccaacgccaacccgaacgccaaccccaacgcgaaccccaacgccaaccccaacgccaacccgaacgccaaccccaacgccaaccccaacgcgaaccccaacgccaacccgaacgccaaccccaacgccaaccccaacgccaaccccaacgcgaacccgaacgccaaccccaacguggaccccaacgccaaccccaacgccaacccgaacgccaaccccaacgcgaaccccaacgccaacccgaacgccaaccccaacgccaaccccaacgccaaccccaacgcgaacccgaacgccaaccccaacgccaaccccaacgccaaccccaacgcgaacccgaacgccaaccccaacgccaaccccaacgccaaccccaacgccaacccgaacgcgaaccccaacaagaacaaccagggcaacggccaggggcacaacaugcccaacgaccccaaccggaacguggacgagaacgccaacgccaacagcgccgucaagaacaacaacaacgaggagccguccgacaagcacaucaaggaguaccugaacaagauccagaacagccucuccaccgaguggagccccugcuccgugaccugcggcaacgggauccaggugcgcaucaagcccggcagcgccaacaagcccaaggacgagcuggacuacgcgaacgacaucgagaagaagaucugcaagauggagaagugcuccagcgucuucaacguggugaacuccagcugaggacuagucccuguucccagagcccacuuuuuuuucuuuuuuugaaauaaaauagccugucuuucagaucucaaaggcucuuuucagagccaccaaaaaaaaaaaaaaaaaaaaaaaaaaaaaaaaaaaaaaaaaaaaaaaaaaaaaaaaaaaaaaaaagaauu

SEQ ID NO: 6608 - RNA, 1534 nt, Artificial Sequence
  mRNA Design a-1 (hSL-A64-N5) comprising derived and/or modified sequence from Pf(3D7)__XP_001351122.1__HsALB_Pf-CSP(19-384)_TM domain HA (opt1)
aggagagucccgcagucggcguccagcggcucugcuuguucgugugugugucguugcaggccuuauucaagcuuaccaugaagugggugaccuucaucagccuccuguuccuguucuccagcgccuacucccuguuccaggaguaccagugcuacggcagcuccagcaacacccgcguccucaacgagcugaacuacgacaacgccgggacgaaccuguacaacgagcucgagaugaacuacuacggcaagcaggagaacugguacucccugaagaagaacagccggucccugggggagaacgacgacggcaacaacgaggacaacgagaagcuccgcaagcccaagcacaagaagcugaagcagccggcggacgggaaccccgaccccaacgccaaccccaacguggacccgaacgccaaccccaacguggaccccaacgccaaccccaacgucgacccgaacgccaaccccaacgcgaaccccaacgccaaccccaacgccaacccgaacgccaaccccaacgcgaaccccaacgccaaccccaacgccaacccgaacgccaaccccaacgccaaccccaacgcgaaccccaacgccaacccgaacgccaaccccaacgccaaccccaacgccaaccccaacgcgaacccgaacgccaaccccaacguggaccccaacgccaaccccaacgccaacccgaacgccaaccccaacgcgaaccccaacgccaacccgaacgccaaccccaacgccaaccccaacgccaaccccaacgcgaacccgaacgccaaccccaacgccaaccccaacgccaaccccaacgcgaacccgaacgccaaccccaacgccaaccccaacgccaaccccaacgccaacccgaacgcgaaccccaacaagaacaaccagggcaacggccaggggcacaacaugcccaacgaccccaaccggaacguggacgagaacgccaacgccaacagcgccgucaagaacaacaacaacgaggagccguccgacaagcacaucaaggaguaccugaacaagauccagaacagccucuccaccgaguggagccccugcuccgugaccugcggcaacgggauccaggugcgcaucaagcccggcagcgccaacaagcccaaggacgagcuggacuacgcgaacgacaucgagaagaagaucugcaagauggagaagugcuccagcgucuucaacguggugaacuccagcaagcuggagagcacccggaucuaccagauccucgccaucuacuccacggucgccagcucccuggugcugguggucagccucggggccaucuccuucuggaugugcagcaacggcucccugcagugccgcaucugcaucugaggacuagucccuguucccagagcccacuuuuuuuucuuuuuuugaaauaaaauagccugucuuucagaucucaaaggcucuuuucagagccaccaaaaaaaaaaaaaaaaaaaaaaaaaaaaaaaaaaaaaaaaaaaaaaaaaaaaaaaaaaaaaaaaagaauu

SEQ ID NO: 6609 - RNA, 1246 nt, Artificial Sequence
  mRNA Design a-1 (hSL-A64-N5) comprising derived and/or modified sequence from Pf(3D7)__XP_001351122.1__HsALB_Pf-CSP(82-397) (opt1)
aggagagucccgcagucggcguccagcggcucugcuuguucgugugugugucguugcaggccuuauucaagcuuaccaugaagugggugaccuucaucagccuccuguuccuguucuccagcgccuacuccgacaacgagaagcugcgcaagcccaagcacaagaagcucaagcagccggccgacggcaaccccgaccccaacgcgaaccccaacgucgacccgaacgccaaccccaacguggaccccaacgccaaccccaacguggacccgaacgccaaccccaacgccaaccccaacgcgaaccccaacgccaacccgaacgccaaccccaacgccaaccccaacgcgaaccccaacgccaacccgaacgccaaccccaacgccaaccccaacgccaaccccaacgcgaacccgaacgccaaccccaacgccaaccccaacgccaaccccaacgccaacccgaacgcgaaccccaacgucgaccccaacgccaaccccaacgccaacccgaacgccaaccccaacgccaaccccaacgcgaacccgaacgccaaccccaacgccaaccccaacgccaaccccaacgccaacccgaacgcgaaccccaacgccaaccccaacgccaaccccaacgccaacccgaacgcgaaccccaacgccaaccccaacgccaaccccaacgccaacccgaacgccaaccccaacaagaacaaccaggggaacggccaggggcacaacaugcccaacgaccccaaccggaacguggacgagaacgcgaacgccaacagcgccgugaagaacaacaacaacgaggagccguccgacaagcacaucaaggaguaccugaacaagauccagaacagccuguccaccgaguggagccccugcuccgucacgugcggcaacgggauccaggugcgcaucaagcccggcagcgccaacaagcccaaggacgagcucgacuacgccaacgacaucgagaagaagaucugcaagauggagaagugcuccagcguguucaacgucgugaacuccagcaucggccugaucauggugcuguccuuccucuuccugaacugaggacuagucccuguucccagagcccacuuuuuuuucuuuuuuugaaauaaaauagccugucuuucagaucucaaaggcucuuuucagagccaccaaaaaaaaaaaaaaaaaaaaaaaaaaaaaaaaaaaaaaaaaaaaaaaaaaaaaaaaaaaaaaaaagaauu

SEQ ID NO: 6610 - RNA, 598 nt, Artificial Sequence
  mRNA Design a-1 (hSL-A64-N5) comprising derived and/or modified sequence from Pf(3D7)__XP_001351122.1__HsALB_Pf-CSP(93-192) (opt1)
aggagagucccgcagucggcguccagcggcucugcuuguucgugugugugucguugcaggccuuauucaagcuuaccaugaagugggugaccuucaucagccuccuguuccuguucuccagcgccuacuccaagcugaagcagcccgccgacggcaacccggaccccaacgcgaaccccaacgucgaccccaacgccaacccgaacguggaccccaacgccaaccccaacguggaccccaacgccaacccgaacgccaaccccaacgcgaaccccaacgccaaccccaacgccaacccgaacgccaaccccaacgcgaaccccaacgccaaccccaacgccaacccgaacgccaaccccaacgccaaccccaacgcgaaccccaacgccaacccgaacgccaaccccaacgccaaccccaacgccaaccccugaggacuagucccuguucccagagcccacuuuuuuuucuuuuuuugaaauaaaauagccugucuuucagaucucaaaggcucuuuucagagccaccaaaaaaaaaaaaaaaaaaaaaaaaaaaaaaaaaaaaaaaaaaaaaaaaaaaaaaaaaaaaaaaaagaauu

SEQ ID NO: 6611 - RNA, 838 nt, Artificial Sequence
  mRNA Design a-1 (hSL-A64-N5) comprising derived and/or modified sequence from Pf(3D7)__XP_001351122.1__HsALB_Pf-CSP(93-272) (opt1)
aggagagucccgcagucggcguccagcggcucugcuuguucgugugugugucguugcaggccuuauucaagcuuaccaugaagugggugaccuucaucagccuccuguuccuguucuccagcgccuacuccaagcugaagcagcccgccgacggcaacccggaccccaacgcgaaccccaacgucgaccccaacgccaacccgaacguggaccccaacgccaaccccaacguggaccccaacgccaacccgaacgccaaccccaacgcgaaccccaacgccaaccccaacgccaacccgaacgccaaccccaacgcgaaccccaacgccaaccccaacgccaacccgaacgccaaccccaacgccaaccccaacgcgaaccccaacgccaacccgaacgccaaccccaacgccaaccccaacgccaaccccaacgcgaacccgaacgucgaccccaacgccaaccccaacgccaaccccaacgccaacccgaacgccaaccccaacgcgaaccccaacgccaacccgaacgccaaccccaacgccaaccccaacgccaaccccaacgcgaacccgaacgccaaccccaacgccaaccccaacgccaaccccaacgcgaacccgaacgccaaccccaacgccaaccccaacgccaaccccaacgccaacccgugaggacuagucccuguucccagagcccacuuuuuuuucuuuuuuugaaauaaaauagccugucuuucagaucucaaaggcucuuuucagagccaccaaaaaaaaaaaaaaaaaaaaaaaaaaaaaaaaaaaaaaaaaaaaaaaaaaaaaaaaaaaaaaaaagaauu

SEQ ID NO: 6612 - RNA, 1213 nt, Artificial Sequence
  mRNA Design a-1 (hSL-A64-N5) comprising derived and/or modified sequence from Pf(3D7)__XP_001351122.1__HsALB_Pf-CSP(93-397) (opt1)
aggagagucccgcagucggcguccagcggcucugcuuguucgugugugugucguugcaggccuuauucaagcuuaccaugaagugggugaccuucaucagccuccuguuccuguucuccagcgccuacuccaagcugaagcagcccgccgacggcaacccggaccccaacgcgaaccccaacgucgaccccaacgccaacccgaacguggaccccaacgccaaccccaacguggaccccaacgccaacccgaacgccaaccccaacgcgaaccccaacgccaaccccaacgccaacccgaacgccaaccccaacgcgaaccccaacgccaaccccaacgccaacccgaacgccaaccccaacgccaaccccaacgcgaaccccaacgccaacccgaacgccaaccccaacgccaaccccaacgccaaccccaacgcgaacccgaacgucgaccccaacgccaaccccaacgccaaccccaacgccaacccgaacgccaaccccaacgcgaaccccaacgccaacccgaacgccaaccccaacgccaaccccaacgccaaccccaacgcgaacccgaacgccaaccccaacgccaaccccaacgccaaccccaacgcgaacccgaacgccaaccccaacgccaaccccaacgccaaccccaacgccaacccgaacaagaacaaccaggggaacggccaggggcacaacaugcccaacgaccccaaccgcaacguggacgagaacgcgaacgccaacagcgccgugaagaacaacaacaacgaggagcccuccgacaagcacaucaaggaguaccucaacaagauccagaacagccuguccaccgaguggagcccgugcuccgucacgugcggcaacgggauccaggugcggaucaagcccggcagcgccaacaagcccaaggacgagcuggacuacgccaacgacaucgagaagaagaucugcaagauggagaagugcuccagcguguucaacgucgugaacuccagcaucggccucaucauggugcuguccuuccuguuccucaacugaggacuagucccuguucccagagcccacuuuuuuuucuuuuuuugaaauaaaauagccugucuuucagaucucaaaggcucuuuucagagccaccaaaaaaaaaaaaaaaaaaaaaaaaaaaaaaaaaaaaaaaaaaaaaaaaaaaaaaaaaaaaaaaaagaauu

SEQ ID NO: 6613 - RNA, 583 nt, Artificial Sequence
  mRNA Design a-1 (hSL-A64-N5) comprising derived and/or modified sequence from Pf(3D7)__XP_001351122.1__HsALB_Pf-CSP(98-192) (opt1)
aggagagucccgcagucggcguccagcggcucugcuuguucgugugugugucguugcaggccuuauucaagcuuaccaugaagugggugaccuucaucagccuccuguuccuguucuccagcgccuacuccgccgacggcaaccccgacccgaacgcgaaccccaacgucgaccccaacgccaaccccaacguggacccgaacgccaaccccaacguggaccccaacgccaaccccaacgccaacccgaacgcgaaccccaacgccaaccccaacgccaaccccaacgccaacccgaacgcgaaccccaacgccaaccccaacgccaaccccaacgccaacccgaacgccaaccccaacgcgaaccccaacgccaaccccaacgccaacccgaacgccaaccccaacgccaaccccugaggacuagucccuguucccagagcccacuuuuuuuucuuuuuuugaaauaaaauagccugucuuucagaucucaaaggcucuuuucagagccaccaaaaaaaaaaaaaaaaaaaaaaaaaaaaaaaaaaaaaaaaaaaaaaaaaaaaaaaaaaaaaaaaagaauu

SEQ ID NO: 6614 - RNA, 823 nt, Artificial Sequence
  mRNA Design a-1 (hSL-A64-N5) comprising derived and/or modified sequence from Pf(3D7)__XP_001351122.1__HsALB_Pf-CSP(98-272) (opt1)
aggagagucccgcagucggcguccagcggcucugcuuguucgugugugugucguugcaggccuuauucaagcuuaccaugaagugggugaccuucaucagccuccuguuccuguucuccagcgccuacuccgccgacggcaaccccgacccgaacgcgaaccccaacgucgaccccaacgccaaccccaacguggacccgaacgccaaccccaacguggaccccaacgccaaccccaacgccaacccgaacgcgaaccccaacgccaaccccaacgccaaccccaacgccaacccgaacgcgaaccccaacgccaaccccaacgccaaccccaacgccaacccgaacgccaaccccaacgcgaaccccaacgccaaccccaacgccaacccgaacgccaaccccaacgccaaccccaacgcgaaccccaacgucgacccgaacgccaaccccaacgccaaccccaacgccaaccccaacgccaacccgaacgcgaaccccaacgccaaccccaacgccaacccgaacgccaaccccaacgccaaccccaacgcgaaccccaacgccaacccgaacgccaaccccaacgccaaccccaacgcgaaccccaacgccaacccgaacgccaaccccaacgccaaccccaacgccaaccccugaggacuagucccuguucccagagcccacuuuuuuuucuuuuuuugaaauaaaauagccugucuuucagaucucaaaggcucuuuucagagccaccaaaaaaaaaaaaaaaaaaaaaaaaaaaaaaaaaaaaaaaaaaaaaaaaaaaaaaaaaaaaaaaaagaauu

SEQ ID NO: 6615 - RNA, 1129 nt, Artificial Sequence
  mRNA Design a-1 (hSL-A64-N5) comprising derived and/or modified sequence from Pf(3D7)__XP_001351122.1__HsALB_Pf-CSP(98-374) (opt1)
aggagagucccgcagucggcguccagcggcucugcuuguucgugugugugucguugcaggccuuauucaagcuuaccaugaagugggugaccuucaucagccuccuguuccuguucuccagcgccuacuccgccgacggcaaccccgacccgaacgcgaaccccaacgucgaccccaacgccaaccccaacguggacccgaacgccaaccccaacguggaccccaacgccaaccccaacgccaacccgaacgcgaaccccaacgccaaccccaacgccaaccccaacgccaacccgaacgcgaaccccaacgccaaccccaacgccaaccccaacgccaacccgaacgccaaccccaacgcgaaccccaacgccaaccccaacgccaacccgaacgccaaccccaacgccaaccccaacgcgaaccccaacgucgacccgaacgccaaccccaacgccaaccccaacgccaaccccaacgccaacccgaacgcgaaccccaacgccaaccccaacgccaacccgaacgccaaccccaacgccaaccccaacgcgaaccccaacgccaacccgaacgccaaccccaacgccaaccccaacgcgaaccccaacgccaacccgaacgccaaccccaacgccaaccccaacgccaaccccaacaagaacaaccaggggaacggccaggggcacaacaugccgaacgaccccaaccgcaacguggacgagaacgcgaacgccaacagcgccgugaagaacaacaacaacgaggagcccuccgacaagcacaucaaggaguaccugaacaagauccagaacagccucuccaccgaguggagccccugcuccgucacgugcggcaacgggauccaggugcggaucaagccgggcagcgccaacaagcccaaggacgagcuggacuacgccaacgacaucgagaagaagaucugcaagauggagaagugcugaggacuagucccuguucccagagcccacuuuuuuuucuuuuuuugaaauaaaauagccugucuuucagaucucaaaggcucuuuucagagccaccaaaaaaaaaaaaaaaaaaaaaaaaaaaaaaaaaaaaaaaaaaaaaaaaaaaaaaaaaaaaaaaaagaauu

SEQ ID NO: 6616 - RNA, 1198 nt, Artificial Sequence
  mRNA Design a-1 (hSL-A64-N5) comprising derived and/or modified sequence from Pf(3D7)__XP_001351122.1__HsALB_Pf-CSP(98-397) (opt1)
aggagagucccgcagucggcguccagcggcucugcuuguucgugugugugucguugcaggccuuauucaagcuuaccaugaagugggugaccuucaucagccuccuguuccuguucuccagcgccuacuccgccgacggcaaccccgacccgaacgcgaaccccaacgucgaccccaacgccaaccccaacguggacccgaacgccaaccccaacguggaccccaacgccaaccccaacgccaacccgaacgcgaaccccaacgccaaccccaacgccaaccccaacgccaacccgaacgcgaaccccaacgccaaccccaacgccaaccccaacgccaacccgaacgccaaccccaacgcgaaccccaacgccaaccccaacgccaacccgaacgccaaccccaacgccaaccccaacgcgaaccccaacgucgacccgaacgccaaccccaacgccaaccccaacgccaaccccaacgccaacccgaacgcgaaccccaacgccaaccccaacgccaacccgaacgccaaccccaacgccaaccccaacgcgaaccccaacgccaacccgaacgccaaccccaacgccaaccccaacgcgaaccccaacgccaacccgaacgccaaccccaacgccaaccccaacgccaaccccaacaagaacaaccaggggaacggccaggggcacaacaugccgaacgaccccaaccgcaacguggacgagaacgcgaacgccaacagcgccgugaagaacaacaacaacgaggagcccuccgacaagcacaucaaggaguaccugaacaagauccagaacagccucuccaccgaguggagccccugcuccgucacgugcggcaacgggauccaggugcggaucaagccgggcagcgccaacaagcccaaggacgagcuggacuacgccaacgacaucgagaagaagaucugcaagauggagaagugcuccagcguguucaacgucgugaacuccagcaucggccugaucauggugcucuccuuccuguuccugaacugaggacuagucccuguucccagagcccacuuuuuuuucuuuuuuugaaauaaaauagccugucuuucagaucucaaaggcucuuuucagagccaccaaaaaaaaaaaaaaaaaaaaaaaaaaaaaaaaaaaaaaaaaaaaaaaaaaaaaaaaaaaaaaaaagaauu

SEQ ID NO: 6617 - RNA, 1525 nt, Artificial Sequence
  mRNA Design a-1 (hSL-A64-N5) comprising derived and/or modified sequence from Pf(3D7)__XP_001351122.1__HsALB_Pf-CSP(199-377)_L(PVTN)_HBsAg (opt1)
aggagagucccgcagucggcguccagcggcucugcuuguucgugugugugucguugcaggccuuauucaagcuuaccaugaagugggugaccuucaucagccuccuguuccuguucuccagcgccuacuccgaccccaacgccaacccgaacgcgaaccccaacgccaaccccaacgccaaccccaacgccaacccgaacgccaaccccaacgcgaaccccaacgccaaccccaacgccaacccgaacgccaaccccaacgcgaaccccaacgccaaccccaacgccaacccgaacgccaaccccaacgccaaccccaacgcgaaccccaacgccaacccgaacgccaaccccaacaagaacaaccagggcaacgggcagggccacaacaugcccaacgaccccaaccgcaacgucgacgagaacgccaacgccaacagcgcggugaagaacaacaacaacgaggagccguccgacaagcacaucaaggaguaccugaacaagauccagaacagccucuccaccgaguggagccccugcuccgugaccugcgggaacggcauccagguccggaucaagcccgggagcgccaacaagcccaaggacgagcuggacuacgccaacgacaucgagaagaagaucugcaagauggagaagugcuccagcgugccggugaccaacauggagaacaucaccuccggcuuccugggcccccuccugguccugcaggccggguucuuccuccugacccgcauccugacgaucccccagagccucgacuccugguggaccagccugaacuuccugggcgggucccccgugugccucggccagaacagccaguccccgaccagcaaccacagccccaccuccugcccgcccaucugccccggguaccgguggaugugccugcgccgguucaucaucuuccuguucauccuccugcugugccucaucuuccugcuggugcuccuggacuaccagggcaugcugcccgucugcccccucaucccgggcagcacgaccaccaacaccgggcccugcaagacgugcaccacccccgcccagggcaacuccauguuccccagcugcugcugcaccaagccgacggacgggaacugcacgugcauccccauccccuccagcugggcguucgccaaguaccugugggagugggccuccgugcgcuucagcuggcugucccuccuggugcccuucguccagugguucgugggccugagcccgaccguguggcucuccgccaucuggaugaugugguacuggggccccagccuguacuccaucgucagccccuucaucccccugcucccgaucuucuucugccuguggguguacaucugaggacuagucccuguucccagagcccacuuuuuuuucuuuuuuugaaauaaaauagccugucuuucagaucucaaaggcucuuuucagagccaccaaaaaaaaaaaaaaaaaaaaaaaaaaaaaaaaaaaaaaaaaaaaaaaaaaaaaaaaaaaaaaaaagaauu

SEQ ID NO: 6618 - RNA, 1435 nt, Artificial Sequence
  mRNA Design a-1 (hSL-A64-N5) comprising derived and/or modified sequence from Pf(3D7)__XP_001351122.1__Pf-CSP (opt2)
aggagagucccgcagucggcguccagcggcucugcuuguucgugugugugucguugcaggccuuauucaagcuuaccaugaugcgcaagcucgccauccucuccgucuccuccuuccucuucgucgaggcccucuuccaggaguaccagugcuacggcuccuccuccaacacccgcguccucaacgagcucaacuacgacaacgccggcaccaaccucuacaacgagcucgagaugaacuacuacggcaagcaggagaacugguacucccucaagaagaacucccgcucccucggcgagaacgacgacggcaacaacgaggacaacgagaagcuccgcaagcccaagcacaagaagcucaagcagcccgccgacggcaaccccgaccccaacgccaaccccaacgucgaccccaacgccaaccccaacgucgaccccaacgccaaccccaacgucgaccccaacgccaaccccaacgccaaccccaacgccaaccccaacgccaaccccaacgccaaccccaacgccaaccccaacgccaaccccaacgccaaccccaacgccaaccccaacgccaaccccaacgccaaccccaacgccaaccccaacgccaaccccaacgccaaccccaacgccaaccccaacgccaaccccaacgccaaccccaacgucgaccccaacgccaaccccaacgccaaccccaacgccaaccccaacgccaaccccaacgccaaccccaacgccaaccccaacgccaaccccaacgccaaccccaacgccaaccccaacgccaaccccaacgccaaccccaacgccaaccccaacgccaaccccaacgccaaccccaacgccaaccccaacgccaaccccaacgccaaccccaacgccaaccccaacaagaacaaccagggcaacggccagggccacaacaugcccaacgaccccaaccgcaacgucgacgagaacgccaacgccaacuccgccgucaagaacaacaacaacgaggagcccuccgacaagcacaucaaggaguaccucaacaagauccagaacucccucuccaccgaguggucccccugcuccgucaccugcggcaacggcauccagguccgcaucaagcccggcuccgccaacaagcccaaggacgagcucgacuacgccaacgacaucgagaagaagaucugcaagauggagaagugcuccuccgucuucaacgucgucaacuccuccaucggccucaucaugguccucuccuuccucuuccucaacugaggacuagucccuguucccagagcccacuuuuuuuucuuuuuuugaaauaaaauagccugucuuucagaucucaaaggcucuuuucagagccaccaaaaaaaaaaaaaaaaaaaaaaaaaaaaaaaaaaaaaaaaaaaaaaaaaaaaaaaaaaaaaaaaagaauu

SEQ ID NO: 6619 - RNA, 1366 nt, Artificial Sequence
  mRNA Design a-1 (hSL-A64-N5) comprising derived and/or modified sequence from Pf(3D7)__XP_001351122.1__Pf-CSP(1-374) (opt2)
aggagagucccgcagucggcguccagcggcucugcuuguucgugugugugucguugcaggccuuauucaagcuuaccaugaugcgcaagcucgccauccucuccgucuccuccuuccucuucgucgaggcccucuuccaggaguaccagugcuacggcuccuccuccaacacccgcguccucaacgagcucaacuacgacaacgccggcaccaaccucuacaacgagcucgagaugaacuacuacggcaagcaggagaacugguacucccucaagaagaacucccgcucccucggcgagaacgacgacggcaacaacgaggacaacgagaagcuccgcaagcccaagcacaagaagcucaagcagcccgccgacggcaaccccgaccccaacgccaaccccaacgucgaccccaacgccaaccccaacgucgaccccaacgccaaccccaacgucgaccccaacgccaaccccaacgccaaccccaacgccaaccccaacgccaaccccaacgccaaccccaacgccaaccccaacgccaaccccaacgccaaccccaacgccaaccccaacgccaaccccaacgccaaccccaacgccaaccccaacgccaaccccaacgccaaccccaacgccaaccccaacgccaaccccaacgccaaccccaacgucgaccccaacgccaaccccaacgccaaccccaacgccaaccccaacgccaaccccaacgccaaccccaacgccaaccccaacgccaaccccaacgccaaccccaacgccaaccccaacgccaaccccaacgccaaccccaacgccaaccccaacgccaaccccaacgccaaccccaacgccaaccccaacgccaaccccaacgccaaccccaacgccaaccccaacaagaacaaccagggcaacggccagggccacaacaugcccaacgaccccaaccgcaacgucgacgagaacgccaacgccaacuccgccgucaagaacaacaacaacgaggagcccuccgacaagcacaucaaggaguaccucaacaagauccagaacucccucuccaccgaguggucccccugcuccgucaccugcggcaacggcauccagguccgcaucaagcccggcuccgccaacaagcccaaggacgagcucgacuacgccaacgacaucgagaagaagaucugcaagauggagaagugcugaggacuagucccuguucccagagcccacuuuuuuuucuuuuuuugaaauaaaauagccugucuuucagaucucaaaggcucuuuucagagccaccaaaaaaaaaaaaaaaaaaaaaaaaaaaaaaaaaaaaaaaaaaaaaaaaaaaaaaaaaaaaaaaaagaauu

SEQ ID NO: 6620 - RNA, 1219 nt, Artificial Sequence
  mRNA Design a-1 (hSL-A64-N5) comprising derived and/or modified sequence from Pf(3D7)__XP_001351122.1__Pf-CSP(1-325) (opt2)
aggagagucccgcagucggcguccagcggcucugcuuguucgugugugugucguugcaggccuuauucaagcuuaccaugaugcgcaagcucgccauccucuccgucuccuccuuccucuucgucgaggcccucuuccaggaguaccagugcuacggcuccuccuccaacacccgcguccucaacgagcucaacuacgacaacgccggcaccaaccucuacaacgagcucgagaugaacuacuacggcaagcaggagaacugguacucccucaagaagaacucccgcucccucggcgagaacgacgacggcaacaacgaggacaacgagaagcuccgcaagcccaagcacaagaagcucaagcagcccgccgacggcaaccccgaccccaacgccaaccccaacgucgaccccaacgccaaccccaacgucgaccccaacgccaaccccaacgucgaccccaacgccaaccccaacgccaaccccaacgccaaccccaacgccaaccccaacgccaaccccaacgccaaccccaacgccaaccccaacgccaaccccaacgccaaccccaacgccaaccccaacgccaaccccaacgccaaccccaacgccaaccccaacgccaaccccaacgccaaccccaacgccaaccccaacgccaaccccaacgucgaccccaacgccaaccccaacgccaaccccaacgccaaccccaacgccaaccccaacgccaaccccaacgccaaccccaacgccaaccccaacgccaaccccaacgccaaccccaacgccaaccccaacgccaaccccaacgccaaccccaacgccaaccccaacgccaaccccaacgccaaccccaacgccaaccccaacgccaaccccaacgccaaccccaacaagaacaaccagggcaacggccagggccacaacaugcccaacgaccccaaccgcaacgucgacgagaacgccaacgccaacuccgccgucaagaacaacaacaacgaggagcccuccgacaagcacaucaaggaguaccucaacaagauccagaacugaggacuagucccuguucccagagcccacuuuuuuuucuuuuuuugaaauaaaauagccugucuuucagaucucaaaggcucuuuucagagccaccaaaaaaaaaaaaaaaaaaaaaaaaaaaaaaaaaaaaaaaaaaaaaaaaaaaaaaaaaaaaaaaaagaauu

SEQ ID NO: 6621 - RNA, 1435 nt, Artificial Sequence
  mRNA Design a-1 (hSL-A64-N5) comprising derived and/or modified sequence from Pf(3D7)__XP_001351122.1__HsALB_Pf-CSP(19-397) (opt2)
aggagagucccgcagucggcguccagcggcucugcuuguucgugugugugucguugcaggccuuauucaagcuuaccaugaagugggucaccuucaucucccuccucuuccucuucuccuccgccuacucccucuuccaggaguaccagugcuacggcuccuccuccaacacccgcguccucaacgagcucaacuacgacaacgccggcaccaaccucuacaacgagcucgagaugaacuacuacggcaagcaggagaacugguacucccucaagaagaacucccgcucccucggcgagaacgacgacggcaacaacgaggacaacgagaagcuccgcaagcccaagcacaagaagcucaagcagcccgccgacggcaaccccgaccccaacgccaaccccaacgucgaccccaacgccaaccccaacgucgaccccaacgccaaccccaacgucgaccccaacgccaaccccaacgccaaccccaacgccaaccccaacgccaaccccaacgccaaccccaacgccaaccccaacgccaaccccaacgccaaccccaacgccaaccccaacgccaaccccaacgccaaccccaacgccaaccccaacgccaaccccaacgccaaccccaacgccaaccccaacgccaaccccaacgccaaccccaacgucgaccccaacgccaaccccaacgccaaccccaacgccaaccccaacgccaaccccaacgccaaccccaacgccaaccccaacgccaaccccaacgccaaccccaacgccaaccccaacgccaaccccaacgccaaccccaacgccaaccccaacgccaaccccaacgccaaccccaacgccaaccccaacgccaaccccaacgccaaccccaacgccaaccccaacaagaacaaccagggcaacggccagggccacaacaugcccaacgaccccaaccgcaacgucgacgagaacgccaacgccaacuccgccgucaagaacaacaacaacgaggagcccuccgacaagcacaucaaggaguaccucaacaagauccagaacucccucuccaccgaguggucccccugcuccgucaccugcggcaacggcauccagguccgcaucaagcccggcuccgccaacaagcccaaggacgagcucgacuacgccaacgacaucgagaagaagaucugcaagauggagaagugcuccuccgucuucaacgucgucaacuccuccaucggccucaucaugguccucuccuuccucuuccucaacugaggacuagucccuguucccagagcccacuuuuuuuucuuuuuuugaaauaaaauagccugucuuucagaucucaaaggcucuuuucagagccaccaaaaaaaaaaaaaaaaaaaaaaaaaaaaaaaaaaaaaaaaaaaaaaaaaaaaaaaaaaaaaaaaagaauu

SEQ ID NO: 6622 - RNA, 1453 nt, Artificial Sequence
  mRNA Design a-1 (hSL-A64-N5) comprising derived and/or modified sequence from Pf(3D7)__XP_001351122.1__HsIns-iso1_Pf-CSP(19-397) (opt2)
aggagagucccgcagucggcguccagcggcucugcuuguucgugugugugucguugcaggccuuauucaagcuuaccauggcccucuggaugcgccuccucccccuccucgcccuccucgcccucuggggccccgaccccgccgccgcccucuuccaggaguaccagugcuacggcuccuccuccaacacccgcguccucaacgagcucaacuacgacaacgccggcaccaaccucuacaacgagcucgagaugaacuacuacggcaagcaggagaacugguacucccucaagaagaacucccgcucccucggcgagaacgacgacggcaacaacgaggacaacgagaagcuccgcaagcccaagcacaagaagcucaagcagcccgccgacggcaaccccgaccccaacgccaaccccaacgucgaccccaacgccaaccccaacgucgaccccaacgccaaccccaacgucgaccccaacgccaaccccaacgccaaccccaacgccaaccccaacgccaaccccaacgccaaccccaacgccaaccccaacgccaaccccaacgccaaccccaacgccaaccccaacgccaaccccaacgccaaccccaacgccaaccccaacgccaaccccaacgccaaccccaacgccaaccccaacgccaaccccaacgccaaccccaacgucgaccccaacgccaaccccaacgccaaccccaacgccaaccccaacgccaaccccaacgccaaccccaacgccaaccccaacgccaaccccaacgccaaccccaacgccaaccccaacgccaaccccaacgccaaccccaacgccaaccccaacgccaaccccaacgccaaccccaacgccaaccccaacgccaaccccaacgccaaccccaacgccaaccccaacaagaacaaccagggcaacggccagggccacaacaugcccaacgaccccaaccgcaacgucgacgagaacgccaacgccaacuccgccgucaagaacaacaacaacgaggagcccuccgacaagcacaucaaggaguaccucaacaagauccagaacucccucuccaccgaguggucccccugcuccgucaccugcggcaacggcauccagguccgcaucaagcccggcuccgccaacaagcccaaggacgagcucgacuacgccaacgacaucgagaagaagaucugcaagauggagaagugcuccuccgucuucaacgucgucaacuccuccaucggccucaucaugguccucuccuuccucuuccucaacugaggacuagucccuguucccagagcccacuuuuuuuucuuuuuuugaaauaaaauagccugucuuucagaucucaaaggcucuuuucagagccaccaaaaaaaaaaaaaaaaaaaaaaaaaaaaaaaaaaaaaaaaaaaaaaaaaaaaaaaaaaaaaaaaagaauu

SEQ ID NO: 6623 - RNA, 1432 nt, Artificial Sequence
  mRNA Design a-1 (hSL-A64-N5) comprising derived and/or modified sequence from Pf(3D7)__XP_001351122.1__HsSPARC_Pf-CSP(19-397) (opt2)
aggagagucccgcagucggcguccagcggcucugcuuguucgugugugugucguugcaggccuuauucaagcuuaccaugcgcgccuggaucuucuuccuccucugccucgccggccgcgcccucgcccucuuccaggaguaccagugcuacggcuccuccuccaacacccgcguccucaacgagcucaacuacgacaacgccggcaccaaccucuacaacgagcucgagaugaacuacuacggcaagcaggagaacugguacucccucaagaagaacucccgcucccucggcgagaacgacgacggcaacaacgaggacaacgagaagcuccgcaagcccaagcacaagaagcucaagcagcccgccgacggcaaccccgaccccaacgccaaccccaacgucgaccccaacgccaaccccaacgucgaccccaacgccaaccccaacgucgaccccaacgccaaccccaacgccaaccccaacgccaaccccaacgccaaccccaacgccaaccccaacgccaaccccaacgccaaccccaacgccaaccccaacgccaaccccaacgccaaccccaacgccaaccccaacgccaaccccaacgccaaccccaacgccaaccccaacgccaaccccaacgccaaccccaacgccaaccccaacgucgaccccaacgccaaccccaacgccaaccccaacgccaaccccaacgccaaccccaacgccaaccccaacgccaaccccaacgccaaccccaacgccaaccccaacgccaaccccaacgccaaccccaacgccaaccccaacgccaaccccaacgccaaccccaacgccaaccccaacgccaaccccaacgccaaccccaacgccaaccccaacgccaaccccaacaagaacaaccagggcaacggccagggccacaacaugcccaacgaccccaaccgcaacgucgacgagaacgccaacgccaacuccgccgucaagaacaacaacaacgaggagcccuccgacaagcacaucaaggaguaccucaacaagauccagaacucccucuccaccgaguggucccccugcuccgucaccugcggcaacggcauccagguccgcaucaagcccggcuccgccaacaagcccaaggacgagcucgacuacgccaacgacaucgagaagaagaucugcaagauggagaagugcuccuccgucuucaacgucgucaacuccuccaucggccucaucaugguccucuccuuccucuuccucaacugaggacuagucccuguucccagagcccacuuuuuuuucuuuuuuugaaauaaaauagccugucuuucagaucucaaaggcucuuuucagagccaccaaaaaaaaaaaaaaaaaaaaaaaaaaaaaaaaaaaaaaaaaaaaaaaaaaaaaaaaaaaaaaaaagaauu

SEQ ID NO: 6624 - RNA, 1435 nt, Artificial Sequence
  mRNA Design a-1 (hSL-A64-N5) comprising derived and/or modified sequence from Pf(3D7)__XP_001351122.1__IgE_Pf-CSP(19-397) (opt2)
aggagagucccgcagucggcguccagcggcucugcuuguucgugugugugucguugcaggccuuauucaagcuuaccauggacuggaccuggauccucuuccucgucgccgccgccacccgcguccacucccucuuccaggaguaccagugcuacggcuccuccuccaacacccgcguccucaacgagcucaacuacgacaacgccggcaccaaccucuacaacgagcucgagaugaacuacuacggcaagcaggagaacugguacucccucaagaagaacucccgcucccucggcgagaacgacgacggcaacaacgaggacaacgagaagcuccgcaagcccaagcacaagaagcucaagcagcccgccgacggcaaccccgaccccaacgccaaccccaacgucgaccccaacgccaaccccaacgucgaccccaacgccaaccccaacgucgaccccaacgccaaccccaacgccaaccccaacgccaaccccaacgccaaccccaacgccaaccccaacgccaaccccaacgccaaccccaacgccaaccccaacgccaaccccaacgccaaccccaacgccaaccccaacgccaaccccaacgccaaccccaacgccaaccccaacgccaaccccaacgccaaccccaacgccaaccccaacgucgaccccaacgccaaccccaacgccaaccccaacgccaaccccaacgccaaccccaacgccaaccccaacgccaaccccaacgccaaccccaacgccaaccccaacgccaaccccaacgccaaccccaacgccaaccccaacgccaaccccaacgccaaccccaacgccaaccccaacgccaaccccaacgccaaccccaacgccaaccccaacgccaaccccaacaagaacaaccagggcaacggccagggccacaacaugcccaacgaccccaaccgcaacgucgacgagaacgccaacgccaacuccgccgucaagaacaacaacaacgaggagcccuccgacaagcacaucaaggaguaccucaacaagauccagaacucccucuccaccgaguggucccccugcuccgucaccugcggcaacggcauccagguccgcaucaagcccggcuccgccaacaagcccaaggacgagcucgacuacgccaacgacaucgagaagaagaucugcaagauggagaagugcuccuccgucuucaacgucgucaacuccuccaucggccucaucaugguccucuccuuccucuuccucaacugaggacuagucccuguucccagagcccacuuuuuuuucuuuuuuugaaauaaaauagccugucuuucagaucucaaaggcucuuuucagagccaccaaaaaaaaaaaaaaaaaaaaaaaaaaaaaaaaaaaaaaaaaaaaaaaaaaaaaaaaaaaaaaaaagaauu

SEQ ID NO: 6625 - RNA, 1600 nt, Artificial Sequence
  mRNA Design a-1 (hSL-A64-N5) comprising derived and/or modified sequence from Pf(3D7)__XP_001351122.1__Pf-CSP_L(G4SG4)_TM domain HA (opt2)
aggagagucccgcagucggcguccagcggcucugcuuguucgugugugugucguugcaggccuuauucaagcuuaccaugaugcgcaagcucgccauccucuccgucuccuccuuccucuucgucgaggcccucuuccaggaguaccagugcuacggcuccuccuccaacacccgcguccucaacgagcucaacuacgacaacgccggcaccaaccucuacaacgagcucgagaugaacuacuacggcaagcaggagaacugguacucccucaagaagaacucccgcucccucggcgagaacgacgacggcaacaacgaggacaacgagaagcuccgcaagcccaagcacaagaagcucaagcagcccgccgacggcaaccccgaccccaacgccaaccccaacgucgaccccaacgccaaccccaacgucgaccccaacgccaaccccaacgucgaccccaacgccaaccccaacgccaaccccaacgccaaccccaacgccaaccccaacgccaaccccaacgccaaccccaacgccaaccccaacgccaaccccaacgccaaccccaacgccaaccccaacgccaaccccaacgccaaccccaacgccaaccccaacgccaaccccaacgccaaccccaacgccaaccccaacgccaaccccaacgucgaccccaacgccaaccccaacgccaaccccaacgccaaccccaacgccaaccccaacgccaaccccaacgccaaccccaacgccaaccccaacgccaaccccaacgccaaccccaacgccaaccccaacgccaaccccaacgccaaccccaacgccaaccccaacgccaaccccaacgccaaccccaacgccaaccccaacgccaaccccaacgccaaccccaacaagaacaaccagggcaacggccagggccacaacaugcccaacgaccccaaccgcaacgucgacgagaacgccaacgccaacuccgccgucaagaacaacaacaacgaggagcccuccgacaagcacaucaaggaguaccucaacaagauccagaacucccucuccaccgaguggucccccugcuccgucaccugcggcaacggcauccagguccgcaucaagcccggcuccgccaacaagcccaaggacgagcucgacuacgccaacgacaucgagaagaagaucugcaagauggagaagugcuccuccgucuucaacgucgucaacuccuccaucggccucaucaugguccucuccuuccucuuccucaacggcggcggcggcuccggcggcggcggcaagcucgaguccacccgcaucuaccagauccucgccaucuacuccaccgucgccuccucccucguccucgucgucucccucggcgccaucuccuucuggaugugcuccaacggcucccuccagugccgcaucugcaucugaggacuagucccuguucccagagcccacuuuuuuuucuuuuuuugaaauaaaauagccugucuuucagaucucaaaggcucuuuucagagccaccaaaaaaaaaaaaaaaaaaaaaaaaaaaaaaaaaaaaaaaaaaaaaaaaaaaaaaaaaaaaaaaaagaauu

SEQ ID NO: 6626 - RNA, 1474 nt, Artificial Sequence
  mRNA Design a-1 (hSL-A64-N5) comprising derived and/or modified sequence from Pf(3D7)__XP_001351122.1__Pf-CSP(199-377)_L(PVTN)_HBsAg (opt2)
aggagagucccgcagucggcguccagcggcucugcuuguucgugugugugucguugcaggccuuauucaagcuuaccauggaccccaacgccaaccccaacgccaaccccaacgccaaccccaacgccaaccccaacgccaaccccaacgccaaccccaacgccaaccccaacgccaaccccaacgccaaccccaacgccaaccccaacgccaaccccaacgccaaccccaacgccaaccccaacgccaaccccaacgccaaccccaacgccaaccccaacgccaaccccaacgccaaccccaacaagaacaaccagggcaacggccagggccacaacaugcccaacgaccccaaccgcaacgucgacgagaacgccaacgccaacuccgccgucaagaacaacaacaacgaggagcccuccgacaagcacaucaaggaguaccucaacaagauccagaacucccucuccaccgaguggucccccugcuccgucaccugcggcaacggcauccagguccgcaucaagcccggcuccgccaacaagcccaaggacgagcucgacuacgccaacgacaucgagaagaagaucugcaagauggagaagugcuccuccguccccgucaccaacauggagaacaucaccuccggcuuccucggcccccuccucguccuccaggccggcuucuuccuccucacccgcauccucaccaucccccagucccucgacuccugguggaccucccucaacuuccucggcggcucccccgucugccucggccagaacucccagucccccaccuccaaccacucccccaccuccugcccccccaucugccccggcuaccgcuggaugugccuccgccgcuucaucaucuuccucuucauccuccuccucugccucaucuuccuccucguccuccucgacuaccagggcaugcuccccgucugcccccucauccccggcuccaccaccaccaacaccggccccugcaagaccugcaccacccccgcccagggcaacuccauguuccccuccugcugcugcaccaagcccaccgacggcaacugcaccugcauccccauccccuccuccugggccuucgccaaguaccucugggagugggccuccguccgcuucuccuggcucucccuccucguccccuucguccagugguucgucggccucucccccaccgucuggcucuccgccaucuggaugaugugguacuggggccccucccucuacuccaucgucucccccuucaucccccuccuccccaucuucuucugccucugggucuacaucugaggacuagucccuguucccagagcccacuuuuuuuucuuuuuuugaaauaaaauagccugucuuucagaucucaaaggcucuuuucagagccaccaaaaaaaaaaaaaaaaaaaaaaaaaaaaaaaaaaaaaaaaaaaaaaaaaaaaaaaaaaaaaaaaagaauu

SEQ ID NO: 6627 - RNA, 1516 nt, Artificial Sequence
  mRNA Design a-1 (hSL-A64-N5) comprising derived and/or modified sequence from Pf(3D7)__XP_001351122.1__Pf-CSP(199-387)_L(PVTN)_HBsAg (opt2)
aggagagucccgcagucggcguccagcggcucugcuuguucgugugugugucguugcaggccuuauucaagcuuaccaugauggcccccgaccccaacgccaaccccaacgccaaccccaacgccaaccccaacgccaaccccaacgccaaccccaacgccaaccccaacgccaaccccaacgccaaccccaacgccaaccccaacgccaaccccaacgccaaccccaacgccaaccccaacgccaaccccaacgccaaccccaacgccaaccccaacgccaaccccaacgccaaccccaacgccaaccccaacaagaacaaccagggcaacggccagggccacaacaugcccaacgaccccaaccgcaacgucgacgagaacgccaacgccaacuccgccgucaagaacaacaacaacgaggagcccuccgacaagcacaucaaggaguaccucaacaagauccagaacucccucuccaccgaguggucccccugcuccgucaccugcggcaacggcauccagguccgcaucaagcccggcuccgccaacaagcccaaggacgagcucgacuacgccaacgacaucgagaagaagaucugcaagauggagaagugcuccuccgucuucaacgucgucaacuccuccaucggccucggccccgucaccaacauggagaacaucaccuccggcuuccucggcccccuccucguccuccaggccggcuucuuccuccucacccgcauccucaccaucccccagucccucgacuccugguggaccucccucaacuuccucggcggcucccccgucugccucggccagaacucccagucccccaccuccaaccacucccccaccuccugcccccccaucugccccggcuaccgcuggaugugccuccgccgcuucaucaucuuccucuucauccuccuccucugccucaucuuccuccucguccuccucgacuaccagggcaugcuccccgucugcccccucauccccggcuccaccaccaccaacaccggccccugcaagaccugcaccacccccgcccagggcaacuccauguuccccuccugcugcugcaccaagcccaccgacggcaacugcaccugcauccccauccccuccuccugggccuucgccaaguaccucugggagugggccuccguccgcuucuccuggcucucccuccucguccccuucguccagugguucgucggccucucccccaccgucuggcucuccgccaucuggaugaugugguacuggggccccucccucuacuccaucgucucccccuucaucccccuccuccccaucuucuucugccucugggucuacaucugaggacuagucccuguucccagagcccacuuuuuuuucuuuuuuugaaauaaaauagccugucuuucagaucucaaaggcucuuuucagagccaccaaaaaaaaaaaaaaaaaaaaaaaaaaaaaaaaaaaaaaaaaaaaaaaaaaaaaaaaaaaaaaaaagaauu

SEQ ID NO: 6628 - RNA, 700 nt, Artificial Sequence
  mRNA Design a-1 (hSL-A64-N5) comprising derived and/or modified sequence from Pf(3D7)__XP_001351122.1__HsALB_Pf-CSP(19-152) (opt2)
aggagagucccgcagucggcguccagcggcucugcuuguucgugugugugucguugcaggccuuauucaagcuuaccaugaagugggucaccuucaucucccuccucuuccucuucuccuccgccuacucccucuuccaggaguaccagugcuacggcuccuccuccaacacccgcguccucaacgagcucaacuacgacaacgccggcaccaaccucuacaacgagcucgagaugaacuacuacggcaagcaggagaacugguacucccucaagaagaacucccgcucccucggcgagaacgacgacggcaacaacgaggacaacgagaagcuccgcaagcccaagcacaagaagcucaagcagcccgccgacggcaaccccgaccccaacgccaaccccaacgucgaccccaacgccaaccccaacgucgaccccaacgccaaccccaacgucgaccccaacgccaaccccaacgccaaccccaacgccaaccccaacgccaaccccaacgccaaccccaacgccaaccccugaggacuagucccuguucccagagcccacuuuuuuuucuuuuuuugaaauaaaauagccugucuuucagaucucaaaggcucuuuucagagccaccaaaaaaaaaaaaaaaaaaaaaaaaaaaaaaaaaaaaaaaaaaaaaaaaaaaaaaaaaaaaaaaaagaauu

SEQ ID NO: 6629 - RNA, 820 nt, Artificial Sequence
  mRNA Design a-1 (hSL-A64-N5) comprising derived and/or modified sequence from Pf(3D7)__XP_001351122.1__HsALB_Pf-CSP(19-192) (opt2)
aggagagucccgcagucggcguccagcggcucugcuuguucgugugugugucguugcaggccuuauucaagcuuaccaugaagugggucaccuucaucucccuccucuuccucuucuccuccgccuacucccucuuccaggaguaccagugcuacggcuccuccuccaacacccgcguccucaacgagcucaacuacgacaacgccggcaccaaccucuacaacgagcucgagaugaacuacuacggcaagcaggagaacugguacucccucaagaagaacucccgcucccucggcgagaacgacgacggcaacaacgaggacaacgagaagcuccgcaagcccaagcacaagaagcucaagcagcccgccgacggcaaccccgaccccaacgccaaccccaacgucgaccccaacgccaaccccaacgucgaccccaacgccaaccccaacgucgaccccaacgccaaccccaacgccaaccccaacgccaaccccaacgccaaccccaacgccaaccccaacgccaaccccaacgccaaccccaacgccaaccccaacgccaaccccaacgccaaccccaacgccaaccccaacgccaaccccaacgccaaccccaacgccaaccccaacgccaaccccaacgccaaccccugaggacuagucccuguucccagagcccacuuuuuuuucuuuuuuugaaauaaaauagccugucuuucagaucucaaaggcucuuuucagagccaccaaaaaaaaaaaaaaaaaaaaaaaaaaaaaaaaaaaaaaaaaaaaaaaaaaaaaaaaaaaaaaaaagaauu

SEQ ID NO: 6630 - RNA, 1060 nt, Artificial Sequence
  mRNA Design a-1 (hSL-A64-N5) comprising derived and/or modified sequence from Pf(3D7)__XP_001351122.1__HsALB_Pf-CSP(19-272) (opt2)
aggagagucccgcagucggcguccagcggcucugcuuguucgugugugugucguugcaggccuuauucaagcuuaccaugaagugggucaccuucaucucccuccucuuccucuucuccuccgccuacucccucuuccaggaguaccagugcuacggcuccuccuccaacacccgcguccucaacgagcucaacuacgacaacgccggcaccaaccucuacaacgagcucgagaugaacuacuacggcaagcaggagaacugguacucccucaagaagaacucccgcucccucggcgagaacgacgacggcaacaacgaggacaacgagaagcuccgcaagcccaagcacaagaagcucaagcagcccgccgacggcaaccccgaccccaacgccaaccccaacgucgaccccaacgccaaccccaacgucgaccccaacgccaaccccaacgucgaccccaacgccaaccccaacgccaaccccaacgccaaccccaacgccaaccccaacgccaaccccaacgccaaccccaacgccaaccccaacgccaaccccaacgccaaccccaacgccaaccccaacgccaaccccaacgccaaccccaacgccaaccccaacgccaaccccaacgccaaccccaacgccaaccccaacgccaaccccaacgucgaccccaacgccaaccccaacgccaaccccaacgccaaccccaacgccaaccccaacgccaaccccaacgccaaccccaacgccaaccccaacgccaaccccaacgccaaccccaacgccaaccccaacgccaaccccaacgccaaccccaacgccaaccccaacgccaaccccaacgccaaccccaacgccaaccccaacgccaaccccaacgccaaccccugaggacuagucccuguucccagagcccacuuuuuuuucuuuuuuugaaauaaaauagccugucuuucagaucucaaaggcucuuuucagagccaccaaaaaaaaaaaaaaaaaaaaaaaaaaaaaaaaaaaaaaaaaaaaaaaaaaaaaaaaaaaaaaaaagaauu

SEQ ID NO: 6631 - RNA, 1222 nt, Artificial Sequence
  mRNA Design a-1 (hSL-A64-N5) comprising derived and/or modified sequence from Pf(3D7)__XP_001351122.1__HsALB_Pf-CSP(19-272)_L(AAY)_Pf-CSP(310-3 27)_L(AAY)_Pf-CSP(346-375) (opt2)
aggagagucccgcagucggcguccagcggcucugcuuguucgugugugugucguugcaggccuuauucaagcuuaccaugaagugggucaccuucaucucccuccucuuccucuucuccuccgccuacucccucuuccaggaguaccagugcuacggcuccuccuccaacacccgcguccucaacgagcucaacuacgacaacgccggcaccaaccucuacaacgagcucgagaugaacuacuacggcaagcaggagaacugguacucccucaagaagaacucccgcucccucggcgagaacgacgacggcaacaacgaggacaacgagaagcuccgcaagcccaagcacaagaagcucaagcagcccgccgacggcaaccccgaccccaacgccaaccccaacgucgaccccaacgccaaccccaacgucgaccccaacgccaaccccaacgucgaccccaacgccaaccccaacgccaaccccaacgccaaccccaacgccaaccccaacgccaaccccaacgccaaccccaacgccaaccccaacgccaaccccaacgccaaccccaacgccaaccccaacgccaaccccaacgccaaccccaacgccaaccccaacgccaaccccaacgccaaccccaacgccaaccccaacgccaaccccaacgucgaccccaacgccaaccccaacgccaaccccaacgccaaccccaacgccaaccccaacgccaaccccaacgccaaccccaacgccaaccccaacgccaaccccaacgccaaccccaacgccaaccccaacgccaaccccaacgccaaccccaacgccaaccccaacgccaaccccaacgccaaccccaacgccaaccccaacgccaaccccaacgccaaccccgccgccuacgagcccuccgacaagcacaucaaggaguaccucaacaagauccagaacucccucgccgccuacaucaagcccggcuccgccaacaagcccaaggacgagcucgacuacgccaacgacaucgagaagaagaucugcaagauggagaagugcuccugaggacuagucccuguucccagagcccacuuuuuuuucuuuuuuugaaauaaaauagccugucuuucagaucucaaaggcucuuuucagagccaccaaaaaaaaaaaaaaaaaaaaaaaaaaaaaaaaaaaaaaaaaaaaaaaaaaaaaaaaaaaaaaaaagaauu

SEQ ID NO: 6632 - RNA, 1183 nt, Artificial Sequence
  mRNA Design a-1 (hSL-A64-N5) comprising derived and/or modified sequence from Pf(3D7)__XP_001351122.1__HsALB_Pf-CSP(19-272)_L(AAY)_Pf-CSP(346-3 65)_L(AAY)_P2 (opt2)
aggagagucccgcagucggcguccagcggcucugcuuguucgugugugugucguugcaggccuuauucaagcuuaccaugaagugggucaccuucaucucccuccucuuccucuucuccuccgccuacucccucuuccaggaguaccagugcuacggcuccuccuccaacacccgcguccucaacgagcucaacuacgacaacgccggcaccaaccucuacaacgagcucgagaugaacuacuacggcaagcaggagaacugguacucccucaagaagaacucccgcucccucggcgagaacgacgacggcaacaacgaggacaacgagaagcuccgcaagcccaagcacaagaagcucaagcagcccgccgacggcaaccccgaccccaacgccaaccccaacgucgaccccaacgccaaccccaacgucgaccccaacgccaaccccaacgucgaccccaacgccaaccccaacgccaaccccaacgccaaccccaacgccaaccccaacgccaaccccaacgccaaccccaacgccaaccccaacgccaaccccaacgccaaccccaacgccaaccccaacgccaaccccaacgccaaccccaacgccaaccccaacgccaaccccaacgccaaccccaacgccaaccccaacgccaaccccaacgucgaccccaacgccaaccccaacgccaaccccaacgccaaccccaacgccaaccccaacgccaaccccaacgccaaccccaacgccaaccccaacgccaaccccaacgccaaccccaacgccaaccccaacgccaaccccaacgccaaccccaacgccaaccccaacgccaaccccaacgccaaccccaacgccaaccccaacgccaaccccaacgccaaccccgccgccuacaucaagcccggcuccgccaacaagcccaaggacgagcucgacuacgccaacgacaucgaggccgccuaccaguacaucaaggccaacuccaaguucaucggcaucaccgagcucugaggacuagucccuguucccagagcccacuuuuuuuucuuuuuuugaaauaaaauagccugucuuucagaucucaaaggcucuuuucagagccaccaaaaaaaaaaaaaaaaaaaaaaaaaaaaaaaaaaaaaaaaaaaaaaaaaaaaaaaaaaaaaaaaagaauu

SEQ ID NO: 6633 - RNA, 1177 nt, Artificial Sequence
  mRNA Design a-1 (hSL-A64-N5) comprising derived and/or modified sequence from Pf(3D7)__XP_001351122.1__HsALB_Pf-CSP(19-272)_L(AAY)_Pf-CSP(346-3 65)_L(AAY)_PADRE (opt2)
aggagagucccgcagucggcguccagcggcucugcuuguucgugugugugucguugcaggccuuauucaagcuuaccaugaagugggucaccuucaucucccuccucuuccucuucuccuccgccuacucccucuuccaggaguaccagugcuacggcuccuccuccaacacccgcguccucaacgagcucaacuacgacaacgccggcaccaaccucuacaacgagcucgagaugaacuacuacggcaagcaggagaacugguacucccucaagaagaacucccgcucccucggcgagaacgacgacggcaacaacgaggacaacgagaagcuccgcaagcccaagcacaagaagcucaagcagcccgccgacggcaaccccgaccccaacgccaaccccaacgucgaccccaacgccaaccccaacgucgaccccaacgccaaccccaacgucgaccccaacgccaaccccaacgccaaccccaacgccaaccccaacgccaaccccaacgccaaccccaacgccaaccccaacgccaaccccaacgccaaccccaacgccaaccccaacgccaaccccaacgccaaccccaacgccaaccccaacgccaaccccaacgccaaccccaacgccaaccccaacgccaaccccaacgccaaccccaacgucgaccccaacgccaaccccaacgccaaccccaacgccaaccccaacgccaaccccaacgccaaccccaacgccaaccccaacgccaaccccaacgccaaccccaacgccaaccccaacgccaaccccaacgccaaccccaacgccaaccccaacgccaaccccaacgccaaccccaacgccaaccccaacgccaaccccaacgccaaccccaacgccaaccccgccgccuacaucaagcccggcuccgccaacaagcccaaggacgagcucgacuacgccaacgacaucgaggccgccuacgccaaguucgucgccgccuggacccucaaggccgccgccugaggacuagucccuguucccagagcccacuuuuuuuucuuuuuuugaaauaaaauagccugucuuucagaucucaaaggcucuuuucagagccaccaaaaaaaaaaaaaaaaaaaaaaaaaaaaaaaaaaaaaaaaaaaaaaaaaaaaaaaaaaaaaaaaagaauu

SEQ ID NO: 6634 - RNA, 1234 nt, Artificial Sequence
  mRNA Design a-1 (hSL-A64-N5) comprising derived and/or modified sequence from Pf(3D7)__XP_001351122.1__HsALB_Pf-CSP(19-272)_L(G4S)_Pf-CSP(310-3 27)_L(G4S)_Pf-CSP(346-375) (opt2)
aggagagucccgcagucggcguccagcggcucugcuuguucgugugugugucguugcaggccuuauucaagcuuaccaugaagugggucaccuucaucucccuccucuuccucuucuccuccgccuacucccucuuccaggaguaccagugcuacggcuccuccuccaacacccgcguccucaacgagcucaacuacgacaacgccggcaccaaccucuacaacgagcucgagaugaacuacuacggcaagcaggagaacugguacucccucaagaagaacucccgcucccucggcgagaacgacgacggcaacaacgaggacaacgagaagcuccgcaagcccaagcacaagaagcucaagcagcccgccgacggcaaccccgaccccaacgccaaccccaacgucgaccccaacgccaaccccaacgucgaccccaacgccaaccccaacgucgaccccaacgccaaccccaacgccaaccccaacgccaaccccaacgccaaccccaacgccaaccccaacgccaaccccaacgccaaccccaacgccaaccccaacgccaaccccaacgccaaccccaacgccaaccccaacgccaaccccaacgccaaccccaacgccaaccccaacgccaaccccaacgccaaccccaacgccaaccccaacgucgaccccaacgccaaccccaacgccaaccccaacgccaaccccaacgccaaccccaacgccaaccccaacgccaaccccaacgccaaccccaacgccaaccccaacgccaaccccaacgccaaccccaacgccaaccccaacgccaaccccaacgccaaccccaacgccaaccccaacgccaaccccaacgccaaccccaacgccaaccccaacgccaaccccggcggcggcggcuccgagcccuccgacaagcacaucaaggaguaccucaacaagauccagaacucccucggcggcggcggcuccaucaagcccggcuccgccaacaagcccaaggacgagcucgacuacgccaacgacaucgagaagaagaucugcaagauggagaagugcuccugaggacuagucccuguucccagagcccacuuuuuuuucuuuuuuugaaauaaaauagccugucuuucagaucucaaaggcucuuuucagagccaccaaaaaaaaaaaaaaaaaaaaaaaaaaaaaaaaaaaaaaaaaaaaaaaaaaaaaaaaaaaaaaaaagaauu

SEQ ID NO: 6635 - RNA, 1219 nt, Artificial Sequence
  mRNA Design a-1 (hSL-A64-N5) comprising derived and/or modified sequence from Pf(3D7)__XP_001351122.1__HsALB_Pf-CSP(19-272)_L(G4S)_Pf-CSP(310-3 27)_Pf-CSP(346-375) (opt2)
aggagagucccgcagucggcguccagcggcucugcuuguucgugugugugucguugcaggccuuauucaagcuuaccaugaagugggucaccuucaucucccuccucuuccucuucuccuccgccuacucccucuuccaggaguaccagugcuacggcuccuccuccaacacccgcguccucaacgagcucaacuacgacaacgccggcaccaaccucuacaacgagcucgagaugaacuacuacggcaagcaggagaacugguacucccucaagaagaacucccgcucccucggcgagaacgacgacggcaacaacgaggacaacgagaagcuccgcaagcccaagcacaagaagcucaagcagcccgccgacggcaaccccgaccccaacgccaaccccaacgucgaccccaacgccaaccccaacgucgaccccaacgccaaccccaacgucgaccccaacgccaaccccaacgccaaccccaacgccaaccccaacgccaaccccaacgccaaccccaacgccaaccccaacgccaaccccaacgccaaccccaacgccaaccccaacgccaaccccaacgccaaccccaacgccaaccccaacgccaaccccaacgccaaccccaacgccaaccccaacgccaaccccaacgccaaccccaacgucgaccccaacgccaaccccaacgccaaccccaacgccaaccccaacgccaaccccaacgccaaccccaacgccaaccccaacgccaaccccaacgccaaccccaacgccaaccccaacgccaaccccaacgccaaccccaacgccaaccccaacgccaaccccaacgccaaccccaacgccaaccccaacgccaaccccaacgccaaccccaacgccaaccccggcggcggcggcuccgagcccuccgacaagcacaucaaggaguaccucaacaagauccagaacucccucaucaagcccggcuccgccaacaagcccaaggacgagcucgacuacgccaacgacaucgagaagaagaucugcaagauggagaagugcuccugaggacuagucccuguucccagagcccacuuuuuuuucuuuuuuugaaauaaaauagccugucuuucagaucucaaaggcucuuuucagagccaccaaaaaaaaaaaaaaaaaaaaaaaaaaaaaaaaaaaaaaaaaaaaaaaaaaaaaaaaaaaaaaaaagaauu

SEQ ID NO: 6636 - RNA, 1219 nt, Artificial Sequence
  mRNA Design a-1 (hSL-A64-N5) comprising derived and/or modified sequence from Pf(3D7)__XP_001351122.1__HsALB_Pf-CSP(19-325) (opt2)
aggagagucccgcagucggcguccagcggcucugcuuguucgugugugugucguugcaggccuuauucaagcuuaccaugaagugggucaccuucaucucccuccucuuccucuucuccuccgccuacucccucuuccaggaguaccagugcuacggcuccuccuccaacacccgcguccucaacgagcucaacuacgacaacgccggcaccaaccucuacaacgagcucgagaugaacuacuacggcaagcaggagaacugguacucccucaagaagaacucccgcucccucggcgagaacgacgacggcaacaacgaggacaacgagaagcuccgcaagcccaagcacaagaagcucaagcagcccgccgacggcaaccccgaccccaacgccaaccccaacgucgaccccaacgccaaccccaacgucgaccccaacgccaaccccaacgucgaccccaacgccaaccccaacgccaaccccaacgccaaccccaacgccaaccccaacgccaaccccaacgccaaccccaacgccaaccccaacgccaaccccaacgccaaccccaacgccaaccccaacgccaaccccaacgccaaccccaacgccaaccccaacgccaaccccaacgccaaccccaacgccaaccccaacgccaaccccaacgucgaccccaacgccaaccccaacgccaaccccaacgccaaccccaacgccaaccccaacgccaaccccaacgccaaccccaacgccaaccccaacgccaaccccaacgccaaccccaacgccaaccccaacgccaaccccaacgccaaccccaacgccaaccccaacgccaaccccaacgccaaccccaacgccaaccccaacgccaaccccaacgccaaccccaacaagaacaaccagggcaacggccagggccacaacaugcccaacgaccccaaccgcaacgucgacgagaacgccaacgccaacuccgccgucaagaacaacaacaacgaggagcccuccgacaagcacaucaaggaguaccucaacaagauccagaacugaggacuagucccuguucccagagcccacuuuuuuuucuuuuuuugaaauaaaauagccugucuuucagaucucaaaggcucuuuucagagccaccaaaaaaaaaaaaaaaaaaaaaaaaaaaaaaaaaaaaaaaaaaaaaaaaaaaaaaaaaaaaaaaaagaauu

SEQ ID NO: 6637 - RNA, 1396 nt, Artificial Sequence
  mRNA Design a-1 (hSL-A64-N5) comprising derived and/or modified sequence from Pf(3D7)__XP_001351122.1__HsALB_Pf-CSP(19-384) (opt2)
aggagagucccgcagucggcguccagcggcucugcuuguucgugugugugucguugcaggccuuauucaagcuuaccaugaagugggucaccuucaucucccuccucuuccucuucuccuccgccuacucccucuuccaggaguaccagugcuacggcuccuccuccaacacccgcguccucaacgagcucaacuacgacaacgccggcaccaaccucuacaacgagcucgagaugaacuacuacggcaagcaggagaacugguacucccucaagaagaacucccgcucccucggcgagaacgacgacggcaacaacgaggacaacgagaagcuccgcaagcccaagcacaagaagcucaagcagcccgccgacggcaaccccgaccccaacgccaaccccaacgucgaccccaacgccaaccccaacgucgaccccaacgccaaccccaacgucgaccccaacgccaaccccaacgccaaccccaacgccaaccccaacgccaaccccaacgccaaccccaacgccaaccccaacgccaaccccaacgccaaccccaacgccaaccccaacgccaaccccaacgccaaccccaacgccaaccccaacgccaaccccaacgccaaccccaacgccaaccccaacgccaaccccaacgccaaccccaacgucgaccccaacgccaaccccaacgccaaccccaacgccaaccccaacgccaaccccaacgccaaccccaacgccaaccccaacgccaaccccaacgccaaccccaacgccaaccccaacgccaaccccaacgccaaccccaacgccaaccccaacgccaaccccaacgccaaccccaacgccaaccccaacgccaaccccaacgccaaccccaacgccaaccccaacaagaacaaccagggcaacggccagggccacaacaugcccaacgaccccaaccgcaacgucgacgagaacgccaacgccaacuccgccgucaagaacaacaacaacgaggagcccuccgacaagcacaucaaggaguaccucaacaagauccagaacucccucuccaccgaguggucccccugcuccgucaccugcggcaacggcauccagguccgcaucaagcccggcuccgccaacaagcccaaggacgagcucgacuacgccaacgacaucgagaagaagaucugcaagauggagaagugcuccuccgucuucaacgucgucaacuccuccugaggacuagucccuguucccagagcccacuuuuuuuucuuuuuuugaaauaaaauagccugucuuucagaucucaaaggcucuuuucagagccaccaaaaaaaaaaaaaaaaaaaaaaaaaaaaaaaaaaaaaaaaaaaaaaaaaaaaaaaaaaaaaaaaagaauu

SEQ ID NO: 6638 - RNA, 1534 nt, Artificial Sequence
  mRNA Design a-1 (hSL-A64-N5) comprising derived and/or modified sequence from Pf(3D7)__XP_001351122.1__HsALB_Pf-CSP(19-384)_TM domain HA (opt2)
aggagagucccgcagucggcguccagcggcucugcuuguucgugugugugucguugcaggccuuauucaagcuuaccaugaagugggucaccuucaucucccuccucuuccucuucuccuccgccuacucccucuuccaggaguaccagugcuacggcuccuccuccaacacccgcguccucaacgagcucaacuacgacaacgccggcaccaaccucuacaacgagcucgagaugaacuacuacggcaagcaggagaacugguacucccucaagaagaacucccgcucccucggcgagaacgacgacggcaacaacgaggacaacgagaagcuccgcaagcccaagcacaagaagcucaagcagcccgccgacggcaaccccgaccccaacgccaaccccaacgucgaccccaacgccaaccccaacgucgaccccaacgccaaccccaacgucgaccccaacgccaaccccaacgccaaccccaacgccaaccccaacgccaaccccaacgccaaccccaacgccaaccccaacgccaaccccaacgccaaccccaacgccaaccccaacgccaaccccaacgccaaccccaacgccaaccccaacgccaaccccaacgccaaccccaacgccaaccccaacgccaaccccaacgccaaccccaacgucgaccccaacgccaaccccaacgccaaccccaacgccaaccccaacgccaaccccaacgccaaccccaacgccaaccccaacgccaaccccaacgccaaccccaacgccaaccccaacgccaaccccaacgccaaccccaacgccaaccccaacgccaaccccaacgccaaccccaacgccaaccccaacgccaaccccaacgccaaccccaacgccaaccccaacaagaacaaccagggcaacggccagggccacaacaugcccaacgaccccaaccgcaacgucgacgagaacgccaacgccaacuccgccgucaagaacaacaacaacgaggagcccuccgacaagcacaucaaggaguaccucaacaagauccagaacucccucuccaccgaguggucccccugcuccgucaccugcggcaacggcauccagguccgcaucaagcccggcuccgccaacaagcccaaggacgagcucgacuacgccaacgacaucgagaagaagaucugcaagauggagaagugcuccuccgucuucaacgucgucaacuccuccaagcucgaguccacccgcaucuaccagauccucgccaucuacuccaccgucgccuccucccucguccucgucgucucccucggcgccaucuccuucuggaugugcuccaacggcucccuccagugccgcaucugcaucugaggacuagucccuguucccagagcccacuuuuuuuucuuuuuuugaaauaaaauagccugucuuucagaucucaaaggcucuuuucagagccaccaaaaaaaaaaaaaaaaaaaaaaaaaaaaaaaaaaaaaaaaaaaaaaaaaaaaaaaaaaaaaaaaagaauu

SEQ ID NO: 6639 - RNA, 1246 nt, Artificial Sequence
  mRNA Design a-1 (hSL-A64-N5) comprising derived and/or modified sequence from Pf(3D7)__XP_001351122.1__HsALB_Pf-CSP(82-397) (opt2)
aggagagucccgcagucggcguccagcggcucugcuuguucgugugugugucguugcaggccuuauucaagcuuaccaugaagugggucaccuucaucucccuccucuuccucuucuccuccgccuacuccgacaacgagaagcuccgcaagcccaagcacaagaagcucaagcagcccgccgacggcaaccccgaccccaacgccaaccccaacgucgaccccaacgccaaccccaacgucgaccccaacgccaaccccaacgucgaccccaacgccaaccccaacgccaaccccaacgccaaccccaacgccaaccccaacgccaaccccaacgccaaccccaacgccaaccccaacgccaaccccaacgccaaccccaacgccaaccccaacgccaaccccaacgccaaccccaacgccaaccccaacgccaaccccaacgccaaccccaacgccaaccccaacgccaaccccaacgucgaccccaacgccaaccccaacgccaaccccaacgccaaccccaacgccaaccccaacgccaaccccaacgccaaccccaacgccaaccccaacgccaaccccaacgccaaccccaacgccaaccccaacgccaaccccaacgccaaccccaacgccaaccccaacgccaaccccaacgccaaccccaacgccaaccccaacgccaaccccaacgccaaccccaacaagaacaaccagggcaacggccagggccacaacaugcccaacgaccccaaccgcaacgucgacgagaacgccaacgccaacuccgccgucaagaacaacaacaacgaggagcccuccgacaagcacaucaaggaguaccucaacaagauccagaacucccucuccaccgaguggucccccugcuccgucaccugcggcaacggcauccagguccgcaucaagcccggcuccgccaacaagcccaaggacgagcucgacuacgccaacgacaucgagaagaagaucugcaagauggagaagugcuccuccgucuucaacgucgucaacuccuccaucggccucaucaugguccucuccuuccucuuccucaacugaggacuagucccuguucccagagcccacuuuuuuuucuuuuuuugaaauaaaauagccugucuuucagaucucaaaggcucuuuucagagccaccaaaaaaaaaaaaaaaaaaaaaaaaaaaaaaaaaaaaaaaaaaaaaaaaaaaaaaaaaaaaaaaaagaauu

SEQ ID NO: 6640 - RNA, 598 nt, Artificial Sequence
  mRNA Design a-1 (hSL-A64-N5) comprising derived and/or modified sequence from Pf(3D7)__XP_001351122.1__HsALB_Pf-CSP(93-192) (opt2)
aggagagucccgcagucggcguccagcggcucugcuuguucgugugugugucguugcaggccuuauucaagcuuaccaugaagugggucaccuucaucucccuccucuuccucuucuccuccgccuacuccaagcucaagcagcccgccgacggcaaccccgaccccaacgccaaccccaacgucgaccccaacgccaaccccaacgucgaccccaacgccaaccccaacgucgaccccaacgccaaccccaacgccaaccccaacgccaaccccaacgccaaccccaacgccaaccccaacgccaaccccaacgccaaccccaacgccaaccccaacgccaaccccaacgccaaccccaacgccaaccccaacgccaaccccaacgccaaccccaacgccaaccccaacgccaaccccaacgccaaccccugaggacuagucccuguucccagagcccacuuuuuuuucuuuuuuugaaauaaaauagccugucuuucagaucucaaaggcucuuuucagagccaccaaaaaaaaaaaaaaaaaaaaaaaaaaaaaaaaaaaaaaaaaaaaaaaaaaaaaaaaaaaaaaaaagaauu

SEQ ID NO: 6641 - RNA, 838 nt, Artificial Sequence
  mRNA Design a-1 (hSL-A64-N5) comprising derived and/or modified sequence from Pf(3D7)__XP_001351122.1__HsALB_Pf-CSP(93-272) (opt2)
aggagagucccgcagucggcguccagcggcucugcuuguucgugugugugucguugcaggccuuauucaagcuuaccaugaagugggucaccuucaucucccuccucuuccucuucuccuccgccuacuccaagcucaagcagcccgccgacggcaaccccgaccccaacgccaaccccaacgucgaccccaacgccaaccccaacgucgaccccaacgccaaccccaacgucgaccccaacgccaaccccaacgccaaccccaacgccaaccccaacgccaaccccaacgccaaccccaacgccaaccccaacgccaaccccaacgccaaccccaacgccaaccccaacgccaaccccaacgccaaccccaacgccaaccccaacgccaaccccaacgccaaccccaacgccaaccccaacgccaaccccaacgccaaccccaacgucgaccccaacgccaaccccaacgccaaccccaacgccaaccccaacgccaaccccaacgccaaccccaacgccaaccccaacgccaaccccaacgccaaccccaacgccaaccccaacgccaaccccaacgccaaccccaacgccaaccccaacgccaaccccaacgccaaccccaacgccaaccccaacgccaaccccaacgccaaccccaacgccaaccccugaggacuagucccuguucccagagcccacuuuuuuuucuuuuuuugaaauaaaauagccugucuuucagaucucaaaggcucuuuucagagccaccaaaaaaaaaaaaaaaaaaaaaaaaaaaaaaaaaaaaaaaaaaaaaaaaaaaaaaaaaaaaaaaaagaauu

SEQ ID NO: 6642 - RNA, 1213 nt, Artificial Sequence
  mRNA Design a-1 (hSL-A64-N5) comprising derived and/or modified sequence from Pf(3D7)__XP_001351122.1__HsALB_Pf-CSP(93-397) (opt2)
aggagagucccgcagucggcguccagcggcucugcuuguucgugugugugucguugcaggccuuauucaagcuuaccaugaagugggucaccuucaucucccuccucuuccucuucuccuccgccuacuccaagcucaagcagcccgccgacggcaaccccgaccccaacgccaaccccaacgucgaccccaacgccaaccccaacgucgaccccaacgccaaccccaacgucgaccccaacgccaaccccaacgccaaccccaacgccaaccccaacgccaaccccaacgccaaccccaacgccaaccccaacgccaaccccaacgccaaccccaacgccaaccccaacgccaaccccaacgccaaccccaacgccaaccccaacgccaaccccaacgccaaccccaacgccaaccccaacgccaaccccaacgccaaccccaacgucgaccccaacgccaaccccaacgccaaccccaacgccaaccccaacgccaaccccaacgccaaccccaacgccaaccccaacgccaaccccaacgccaaccccaacgccaaccccaacgccaaccccaacgccaaccccaacgccaaccccaacgccaaccccaacgccaaccccaacgccaaccccaacgccaaccccaacgccaaccccaacgccaaccccaacaagaacaaccagggcaacggccagggccacaacaugcccaacgaccccaaccgcaacgucgacgagaacgccaacgccaacuccgccgucaagaacaacaacaacgaggagcccuccgacaagcacaucaaggaguaccucaacaagauccagaacucccucuccaccgaguggucccccugcuccgucaccugcggcaacggcauccagguccgcaucaagcccggcuccgccaacaagcccaaggacgagcucgacuacgccaacgacaucgagaagaagaucugcaagauggagaagugcuccuccgucuucaacgucgucaacuccuccaucggccucaucaugguccucuccuuccucuuccucaacugaggacuagucccuguucccagagcccacuuuuuuuucuuuuuuugaaauaaaauagccugucuuucagaucucaaaggcucuuuucagagccaccaaaaaaaaaaaaaaaaaaaaaaaaaaaaaaaaaaaaaaaaaaaaaaaaaaaaaaaaaaaaaaaaagaauu

SEQ ID NO: 6643 - RNA, 583 nt, Artificial Sequence
  mRNA Design a-1 (hSL-A64-N5) comprising derived and/or modified sequence from Pf(3D7)__XP_001351122.1__HsALB_Pf-CSP(98-192) (opt2)
aggagagucccgcagucggcguccagcggcucugcuuguucgugugugugucguugcaggccuuauucaagcuuaccaugaagugggucaccuucaucucccuccucuuccucuucuccuccgccuacuccgccgacggcaaccccgaccccaacgccaaccccaacgucgaccccaacgccaaccccaacgucgaccccaacgccaaccccaacgucgaccccaacgccaaccccaacgccaaccccaacgccaaccccaacgccaaccccaacgccaaccccaacgccaaccccaacgccaaccccaacgccaaccccaacgccaaccccaacgccaaccccaacgccaaccccaacgccaaccccaacgccaaccccaacgccaaccccaacgccaaccccaacgccaaccccugaggacuagucccuguucccagagcccacuuuuuuuucuuuuuuugaaauaaaauagccugucuuucagaucucaaaggcucuuuucagagccaccaaaaaaaaaaaaaaaaaaaaaaaaaaaaaaaaaaaaaaaaaaaaaaaaaaaaaaaaaaaaaaaaagaauu

SEQ ID NO: 6644 - RNA, 823 nt, Artificial Sequence
  mRNA Design a-1 (hSL-A64-N5) comprising derived and/or modified sequence from Pf(3D7)__XP_001351122.1__HsALB_Pf-CSP(98-272) (opt2)
aggagagucccgcagucggcguccagcggcucugcuuguucgugugugugucguugcaggccuuauucaagcuuaccaugaagugggucaccuucaucucccuccucuuccucuucuccuccgccuacuccgccgacggcaaccccgaccccaacgccaaccccaacgucgaccccaacgccaaccccaacgucgaccccaacgccaaccccaacgucgaccccaacgccaaccccaacgccaaccccaacgccaaccccaacgccaaccccaacgccaaccccaacgccaaccccaacgccaaccccaacgccaaccccaacgccaaccccaacgccaaccccaacgccaaccccaacgccaaccccaacgccaaccccaacgccaaccccaacgccaaccccaacgccaaccccaacgccaaccccaacgucgaccccaacgccaaccccaacgccaaccccaacgccaaccccaacgccaaccccaacgccaaccccaacgccaaccccaacgccaaccccaacgccaaccccaacgccaaccccaacgccaaccccaacgccaaccccaacgccaaccccaacgccaaccccaacgccaaccccaacgccaaccccaacgccaaccccaacgccaaccccaacgccaaccccugaggacuagucccuguucccagagcccacuuuuuuuucuuuuuuugaaauaaaauagccugucuuucagaucucaaaggcucuuuucagagccaccaaaaaaaaaaaaaaaaaaaaaaaaaaaaaaaaaaaaaaaaaaaaaaaaaaaaaaaaaaaaaaaaagaauu

SEQ ID NO: 6645 - RNA, 1129 nt, Artificial Sequence
  mRNA Design a-1 (hSL-A64-N5) comprising derived and/or modified sequence from Pf(3D7)__XP_001351122.1__HsALB_Pf-CSP(98-374) (opt2)
aggagagucccgcagucggcguccagcggcucugcuuguucgugugugugucguugcaggccuuauucaagcuuaccaugaagugggucaccuucaucucccuccucuuccucuucuccuccgccuacuccgccgacggcaaccccgaccccaacgccaaccccaacgucgaccccaacgccaaccccaacgucgaccccaacgccaaccccaacgucgaccccaacgccaaccccaacgccaaccccaacgccaaccccaacgccaaccccaacgccaaccccaacgccaaccccaacgccaaccccaacgccaaccccaacgccaaccccaacgccaaccccaacgccaaccccaacgccaaccccaacgccaaccccaacgccaaccccaacgccaaccccaacgccaaccccaacgccaaccccaacgucgaccccaacgccaaccccaacgccaaccccaacgccaaccccaacgccaaccccaacgccaaccccaacgccaaccccaacgccaaccccaacgccaaccccaacgccaaccccaacgccaaccccaacgccaaccccaacgccaaccccaacgccaaccccaacgccaaccccaacgccaaccccaacgccaaccccaacgccaaccccaacgccaaccccaacaagaacaaccagggcaacggccagggccacaacaugcccaacgaccccaaccgcaacgucgacgagaacgccaacgccaacuccgccgucaagaacaacaacaacgaggagcccuccgacaagcacaucaaggaguaccucaacaagauccagaacucccucuccaccgaguggucccccugcuccgucaccugcggcaacggcauccagguccgcaucaagcccggcuccgccaacaagcccaaggacgagcucgacuacgccaacgacaucgagaagaagaucugcaagauggagaagugcugaggacuagucccuguucccagagcccacuuuuuuuucuuuuuuugaaauaaaauagccugucuuucagaucucaaaggcucuuuucagagccaccaaaaaaaaaaaaaaaaaaaaaaaaaaaaaaaaaaaaaaaaaaaaaaaaaaaaaaaaaaaaaaaaagaauu

SEQ ID NO: 6646 - RNA, 1198 nt, Artificial Sequence
  mRNA Design a-1 (hSL-A64-N5) comprising derived and/or modified sequence from Pf(3D7)__XP_001351122.1__HsALB_Pf-CSP(98-397) (opt2)
aggagagucccgcagucggcguccagcggcucugcuuguucgugugugugucguugcaggccuuauucaagcuuaccaugaagugggucaccuucaucucccuccucuuccucuucuccuccgccuacuccgccgacggcaaccccgaccccaacgccaaccccaacgucgaccccaacgccaaccccaacgucgaccccaacgccaaccccaacgucgaccccaacgccaaccccaacgccaaccccaacgccaaccccaacgccaaccccaacgccaaccccaacgccaaccccaacgccaaccccaacgccaaccccaacgccaaccccaacgccaaccccaacgccaaccccaacgccaaccccaacgccaaccccaacgccaaccccaacgccaaccccaacgccaaccccaacgccaaccccaacgucgaccccaacgccaaccccaacgccaaccccaacgccaaccccaacgccaaccccaacgccaaccccaacgccaaccccaacgccaaccccaacgccaaccccaacgccaaccccaacgccaaccccaacgccaaccccaacgccaaccccaacgccaaccccaacgccaaccccaacgccaaccccaacgccaaccccaacgccaaccccaacgccaaccccaacaagaacaaccagggcaacggccagggccacaacaugcccaacgaccccaaccgcaacgucgacgagaacgccaacgccaacuccgccgucaagaacaacaacaacgaggagcccuccgacaagcacaucaaggaguaccucaacaagauccagaacucccucuccaccgaguggucccccugcuccgucaccugcggcaacggcauccagguccgcaucaagcccggcuccgccaacaagcccaaggacgagcucgacuacgccaacgacaucgagaagaagaucugcaagauggagaagugcuccuccgucuucaacgucgucaacuccuccaucggccucaucaugguccucuccuuccucuuccucaacugaggacuagucccuguucccagagcccacuuuuuuuucuuuuuuugaaauaaaauagccugucuuucagaucucaaaggcucuuuucagagccaccaaaaaaaaaaaaaaaaaaaaaaaaaaaaaaaaaaaaaaaaaaaaaaaaaaaaaaaaaaaaaaaaagaauu

SEQ ID NO: 6647 - RNA, 1525 nt, Artificial Sequence
  mRNA Design a-1 (hSL-A64-N5) comprising derived and/or modified sequence from Pf(3D7)__XP_001351122.1__HsALB_Pf-CSP(199-377)_L(PVTN)_HBsAg (opt2)
aggagagucccgcagucggcguccagcggcucugcuuguucgugugugugucguugcaggccuuauucaagcuuaccaugaagugggucaccuucaucucccuccucuuccucuucuccuccgccuacuccgaccccaacgccaaccccaacgccaaccccaacgccaaccccaacgccaaccccaacgccaaccccaacgccaaccccaacgccaaccccaacgccaaccccaacgccaaccccaacgccaaccccaacgccaaccccaacgccaaccccaacgccaaccccaacgccaaccccaacgccaaccccaacgccaaccccaacgccaaccccaacgccaaccccaacaagaacaaccagggcaacggccagggccacaacaugcccaacgaccccaaccgcaacgucgacgagaacgccaacgccaacuccgccgucaagaacaacaacaacgaggagcccuccgacaagcacaucaaggaguaccucaacaagauccagaacucccucuccaccgaguggucccccugcuccgucaccugcggcaacggcauccagguccgcaucaagcccggcuccgccaacaagcccaaggacgagcucgacuacgccaacgacaucgagaagaagaucugcaagauggagaagugcuccuccguccccgucaccaacauggagaacaucaccuccggcuuccucggcccccuccucguccuccaggccggcuucuuccuccucacccgcauccucaccaucccccagucccucgacuccugguggaccucccucaacuuccucggcggcucccccgucugccucggccagaacucccagucccccaccuccaaccacucccccaccuccugcccccccaucugccccggcuaccgcuggaugugccuccgccgcuucaucaucuuccucuucauccuccuccucugccucaucuuccuccucguccuccucgacuaccagggcaugcuccccgucugcccccucauccccggcuccaccaccaccaacaccggccccugcaagaccugcaccacccccgcccagggcaacuccauguuccccuccugcugcugcaccaagcccaccgacggcaacugcaccugcauccccauccccuccuccugggccuucgccaaguaccucugggagugggccuccguccgcuucuccuggcucucccuccucguccccuucguccagugguucgucggccucucccccaccgucuggcucuccgccaucuggaugaugugguacuggggccccucccucuacuccaucgucucccccuucaucccccuccuccccaucuucuucugccucugggucuacaucugaggacuagucccuguucccagagcccacuuuuuuuucuuuuuuugaaauaaaauagccugucuuucagaucucaaaggcucuuuucagagccaccaaaaaaaaaaaaaaaaaaaaaaaaaaaaaaaaaaaaaaaaaaaaaaaaaaaaaaaaaaaaaaaaagaauu

SEQ ID NO: 6648 - RNA, 1435 nt, Artificial Sequence
  mRNA Design a-1 (hSL-A64-N5) comprising derived and/or modified sequence from Pf(3D7)__XP_001351122.1__Pf-CSP (opt3)
aggagagucccgcagucggcguccagcggcucugcuuguucgugugugugucguugcaggccuuauucaagcuuaccaugaugagaaagcuggccauccucagcguguccucuuuccuuuuugucgaggcucuguuccaggaauaccaaugcuauggcucaaguagcaacaccaggguuuugaaugaguuaaacuacgacaaugcagggacaaaccuguauaaugaacuagagaugaacuacuauggaaaacaggaaaauugguacucccucaagaaaaacucucggucgcugggugagaaugaugacggcaacaaugaggauaacgaaaaacuucgcaagcccaagcacaagaaacugaagcagccugccgacgggaauccagauccgaacgcgaaucccaacguggacccuaacgcuaauccaaacguagaucccaaugccaacccuaauguggacccaaacgcaaaucccaacgccaauccuaacgcuaauccaaacgcaaauccgaacgccaaucccaacgcuaacccuaaugccaacccaaaugcgaaccccaaugcaaacccuaaugccaacccaaaugcuaaccccaaugccaacccgaaugcaaacccuaaugcuaaccccaacgccaauccaaacgcgaauccuaacgccaaucccaacgucgauccaaaugcaaaccccaaugcuaacccuaaugccaacccaaaugcuaacccgaaugccaaccccaacgcaaauccuaacgccaauccaaacgcuaaucccaacgcgaauccuaacgcaaauccaaacgccaaucccaacgcuaauccgaacgccaauccuaacgcaaauccaaacgccaaccccaaugcuaacccuaaugccaaccccaaugcaaacccaaauaaaaacaaucagggaaacggccaaggucauaauaugccuaacgaccccaaucgaaacguggaugagaaugcgaacgcuaacucagccguuaagaauaacaauaacgaggaaccaagcgacaaacacauuaaggaguauuugaauaagauacagaacagucucuccacugaauggucuccguguagcgugacgugcgggaauggaauccagguccguauuaaaccuggcuccgcaaacaagcccaaagaugagcuggacuacgccaaugacaucgaaaagaaaauuuguaagauggagaaaugcucaaguguguuuaacguaguuaauagcucuaucggccugauaauggugcucuccuucuuauuucugaacugaggacuagucccuguucccagagcccacuuuuuuuucuuuuuuugaaauaaaauagccugucuuucagaucucaaaggcucuuuucagagccaccaaaaaaaaaaaaaaaaaaaaaaaaaaaaaaaaaaaaaaaaaaaaaaaaaaaaaaaaaaaaaaaaagaauu

SEQ ID NO: 6649 - RNA, 1366 nt, Artificial Sequence
  mRNA Design a-1 (hSL-A64-N5) comprising derived and/or modified sequence from Pf(3D7)__XP_001351122.1__Pf-CSP(1-374) (opt3)
aggagagucccgcagucggcguccagcggcucugcuuguucgugugugugucguugcaggccuuauucaagcuuaccaugaugagaaagcuggccauccucagcguguccucuuuccuuuuugucgaggcucuguuccaggaauaccaaugcuauggcucaaguagcaacaccaggguuuugaaugaguuaaacuacgacaaugcagggacaaaccuguauaaugaacuagagaugaacuacuauggaaaacaggaaaauugguacucccucaagaaaaacucucggucgcugggugagaaugaugacggcaacaaugaggauaacgaaaaacuucgcaagcccaagcacaagaaacugaagcagccugccgacgggaauccagauccgaacgcgaaucccaacguggacccuaacgcuaauccaaacguagaucccaaugccaacccuaauguggacccaaacgcaaaucccaacgccaauccuaacgcuaauccaaacgcaaauccgaacgccaaucccaacgcuaacccuaaugccaacccaaaugcgaaccccaaugcaaacccuaaugccaacccaaaugcuaaccccaaugccaacccgaaugcaaacccuaaugcuaaccccaacgccaauccaaacgcgaauccuaacgccaaucccaacgucgauccaaaugcaaaccccaaugcuaacccuaaugccaacccaaaugcuaacccgaaugccaaccccaacgcaaauccuaacgccaauccaaacgcuaaucccaacgcgaauccuaacgcaaauccaaacgccaaucccaacgcuaauccgaacgccaauccuaacgcaaauccaaacgccaaccccaaugcuaacccuaaugccaaccccaaugcaaacccaaauaaaaacaaucagggaaacggccaaggucauaauaugccuaacgaccccaaucgaaacguggaugagaaugcgaacgcuaacucagccguuaagaauaacaauaacgaggaaccaagcgacaaacacauuaaggaguauuugaauaagauacagaacagucucuccacugaauggucuccguguagcgugacgugcgggaauggaauccagguccguauuaaaccuggcuccgcaaacaagcccaaagaugagcuggacuacgccaaugacaucgaaaagaaaauuuguaagauggagaaaugcugaggacuagucccuguucccagagcccacuuuuuuuucuuuuuuugaaauaaaauagccugucuuucagaucucaaaggcucuuuucagagccaccaaaaaaaaaaaaaaaaaaaaaaaaaaaaaaaaaaaaaaaaaaaaaaaaaaaaaaaaaaaaaaaaagaauu

SEQ ID NO: 6650 - RNA, 1219 nt, Artificial Sequence
  mRNA Design a-1 (hSL-A64-N5) comprising derived and/or modified sequence from Pf(3D7)__XP_001351122.1__Pf-CSP(1-325) (opt3)
aggagagucccgcagucggcguccagcggcucugcuuguucgugugugugucguugcaggccuuauucaagcuuaccaugaugagaaagcuggccauccucagcguguccucuuuccuuuuugucgaggcucuguuccaggaauaccaaugcuauggcucaaguagcaacaccaggguuuugaaugaguuaaacuacgacaaugcagggacaaaccuguauaaugaacuagagaugaacuacuauggaaaacaggaaaauugguacucccucaagaaaaacucucggucgcugggugagaaugaugacggcaacaaugaggauaacgaaaaacuucgcaagcccaagcacaagaaacugaagcagccugccgacgggaauccagauccgaacgcgaaucccaacguggacccuaacgcuaauccaaacguagaucccaaugccaacccuaauguggacccaaacgcaaaucccaacgccaauccuaacgcuaauccaaacgcaaauccgaacgccaaucccaacgcuaacccuaaugccaacccaaaugcgaaccccaaugcaaacccuaaugccaacccaaaugcuaaccccaaugccaacccgaaugcaaacccuaaugcuaaccccaacgccaauccaaacgcgaauccuaacgccaaucccaacgucgauccaaaugcaaaccccaaugcuaacccuaaugccaacccaaaugcuaacccgaaugccaaccccaacgcaaauccuaacgccaauccaaacgcuaaucccaacgcgaauccuaacgcaaauccaaacgccaaucccaacgcuaauccgaacgccaauccuaacgcaaauccaaacgccaaccccaaugcuaacccuaaugccaaccccaaugcaaacccaaauaaaaacaaucagggaaacggccaaggucauaauaugccuaacgaccccaaucgaaacguggaugagaaugcgaacgcuaacucagccguuaagaauaacaauaacgaggaaccaagcgacaaacacauuaaggaguauuugaauaagauacagaacugaggacuagucccuguucccagagcccacuuuuuuuucuuuuuuugaaauaaaauagccugucuuucagaucucaaaggcucuuuucagagccaccaaaaaaaaaaaaaaaaaaaaaaaaaaaaaaaaaaaaaaaaaaaaaaaaaaaaaaaaaaaaaaaaagaauu

SEQ ID NO: 6651 - RNA, 1435 nt, Artificial Sequence
  mRNA Design a-1 (hSL-A64-N5) comprising derived and/or modified sequence from Pf(3D7)__XP_001351122.1__HsALB_Pf-CSP(19-397) (opt3)
aggagagucccgcagucggcguccagcggcucugcuuguucgugugugugucguugcaggccuuauucaagcuuaccaugaagugggugaccuucaucagccugcucuuucuuuucuccucugccuacucacuguuucaggaguaucaaugcuacggcaguagcuccaacacaagagucuugaaugaauuaaacuaugacaaugcugggacuaaccuguacaaugagcuagaaaugaacuauuacggaaaacaggagaauugguauucucucaagaaaaacucgaggucacugggugaaaaugaugacggcaacaaugaggauaacgagaaacuucggaagcccaagcacaagaaacugaagcagccugcagacgggaauccagauccgaacgccaaucccaacguugacccuaacgcgaauccaaacguggaucccaaugcuaacccuaauguagacccaaacgccaaucccaacgcaaauccuaacgccaauccaaacgcuaauccgaacgcaaaucccaacgccaacccuaaugcuaacccaaaugccaaccccaaugcgaacccuaaugcaaacccaaaugccaaccccaaugcuaacccgaaugccaacccuaaugcaaaccccaacgcuaauccaaacgccaauccuaacgcgaaucccaacguggauccaaaugccaaccccaaugcaaacccuaaugcuaacccaaaugccaacccgaaugcuaaccccaacgccaauccuaacgcaaauccaaacgccaaucccaacgcuaauccuaacgcgaauccaaacgcaaaucccaacgccaauccgaacgcuaauccuaacgccaauccaaacgcaaaccccaaugccaacccuaaugcuaaccccaaugccaacccaaauaaaaacaaucagggaaacggccaaggucauaauaugccuaacgaccccaaucgcaacgucgaugaaaaugcaaacgcgaacagcgcugugaagaauaacaauaacgaggaaccaagugacaaacacauuaaggaguacuugaauaagauacagaacucccucucuacggaguggagcccguguuccguuaccugcgggaauggaauccaggugcgaauuaaaccuggcucagccaacaagcccaaagaugaacuggacuacgcaaaugacaucgagaagaaaauuuguaagauggaaaaaugcaguagcgucuucaacgugguaaauucuuccaucggccugauaaugguucucucauuuuuauuccugaacugaggacuagucccuguucccagagcccacuuuuuuuucuuuuuuugaaauaaaauagccugucuuucagaucucaaaggcucuuuucagagccaccaaaaaaaaaaaaaaaaaaaaaaaaaaaaaaaaaaaaaaaaaaaaaaaaaaaaaaaaaaaaaaaaagaauu

SEQ ID NO: 6652 - RNA, 1453 nt, Artificial Sequence
  mRNA Design a-1 (hSL-A64-N5) comprising derived and/or modified sequence from Pf(3D7)__XP_001351122.1__HsIns-iso1_Pf-CSP(19-397) (opt3)
aggagagucccgcagucggcguccagcggcucugcuuguucgugugugugucguugcaggccuuauucaagcuuaccauggcccuguggaugagacuccuuccccuguuggcuuuacuggcacuauggggcccugacccagccgcggcucucuuccaggaguaccaaugcuaugggagcuccucuaacaccagggugcugaaugaacuuaacuacgauaaugccggaacaaaccuguauaaugaguuggaaaugaacuacuaugguaagcaggagaauugguacucacucaaaaagaacagucggagccugggcgaaaaugacgaugggaacaaugaggacaacgagaaacugcgcaagccgaaacacaagaagcucaaacagcccgcagauggaaauccugacccaaacgccaaucccaacgucgauccuaacgcuaauccaaacguugaccccaaugcaaacccuaauguggauccaaacgccaauccgaacgcuaaucccaacgccaauccuaacgcgaauccaaacgcaaaucccaacgccaacccuaaugcuaacccaaaugccaaccccaaugcaaacccgaaugcuaacccuaaugccaaccccaaugcgaacccaaaugccaacccuaaugcaaaccccaacgcuaauccaaacgccaaucccaacgcuaauccuaacguagacccaaaugccaacccgaaugcaaaccccaaugccaacccuaaugcuaacccaaaugcgaaccccaacgcaaauccuaacgccaauccaaacgcuaaucccaacgccaauccgaacgcaaauccuaacgccaauccaaacgcuaaucccaacgccaauccuaacgcaaaucccaacgcgaacccaaaugcuaacccuaaugccaaccccaaugcaaacccaaauaagaacaaucagggcaacggucaagggcauaauaugccgaacgauccuaaucgaaacguggacgaaaaugccaacgcuaacuccgccgucaaaaauaacaauaacgaggaacccucugauaagcacaucaaagaguauuuaaauaagauucagaacucgcugucaacugaguggagcccauguagugugacgugcggaaauggcauacagguucguaucaagcccggcuccgcaaacaaaccuaaggacgaacuugacuacgcuaaugauauugagaaaaagaucuguaaaauggaaaagugcucuagcguguuuaacgucguaaauuccucaauuggguugaucauggugcugaguuuccuauuucucaacugaggacuagucccuguucccagagcccacuuuuuuuucuuuuuuugaaauaaaauagccugucuuucagaucucaaaggcucuuuucagagccaccaaaaaaaaaaaaaaaaaaaaaaaaaaaaaaaaaaaaaaaaaaaaaaaaaaaaaaaaaaaaaaaaagaauu

SEQ ID NO: 6653 - RNA, 1432 nt, Artificial Sequence
  mRNA Design a-1 (hSL-A64-N5) comprising derived and/or modified sequence from Pf(3D7)__XP_001351122.1__HsSPARC_Pf-CSP(19-397) (opt3)
aggagagucccgcagucggcguccagcggcucugcuuguucgugugugugucguugcaggccuuauucaagcuuaccaugagagccuggaucuucuuucugcucugccuugcuggcagggcacuggccuuguuccaggaguaccaauguuaugggagcuccucuaacacccggguguuaaaugaacugaacuacgacaaugcgggaacaaaccuauauaaugagcucgaaaugaacuacuaugguaagcaggagaauugguacucacugaaaaagaacagucgcagccuuggcgaaaaugaugacgggaacaaugaggauaacgagaaacugcgaaagcccaaacacaagaaguugaaacagccugcugacggaaauccagauccgaacgccaaucccaacgucgacccuaacgcaaauccaaacguugaucccaaugccaacccuaauguggacccaaacgcuaaucccaacgcaaauccuaacgccaauccaaacgcuaauccgaacgccaaucccaacgcgaacccuaaugcaaacccaaaugccaaccccaaugcuaacccuaaugccaacccaaaugcaaaccccaaugcuaacccgaaugccaacccuaaugcgaaccccaacgccaauccaaacgcaaauccuaacgcuaaucccaacguagauccaaaugccaaccccaaugcuaacccuaaugccaacccaaaugcaaacccgaaugccaaccccaacgcuaauccuaacgcgaauccaaacgcaaaucccaacgccaauccuaacgcuaauccaaacgccaaucccaacgcaaauccgaacgccaauccuaacgcuaauccaaacgccaaccccaaugcaaacccuaaugcgaaccccaaugcuaacccaaauaagaacaaucagggcaacggucaagggcauaauaugccuaacgaccccaaucguaacguggaugaaaaugccaacgcaaacuccgccgucaaaaauaacaauaacgaggaaccaucugacaagcacauuaaagaguaucucaauaagauacagaacucgcugucaacugaguggagcccgugcagugugacguguggaaauggcauccagguuagaauuaagccuggcuccgcuaacaaacccaaggaugaacuggacuacgccaaugacaucgagaaaaagauuugcaaaauggaaaaguguucuagcguguuuaacgucguaaauuccucaaucgggcucauaaugguguuaaguuuccuguuucuuaacugaggacuagucccuguucccagagcccacuuuuuuuucuuuuuuugaaauaaaauagccugucuuucagaucucaaaggcucuuuucagagccaccaaaaaaaaaaaaaaaaaaaaaaaaaaaaaaaaaaaaaaaaaaaaaaaaaaaaaaaaaaaaaaaaagaauu

SEQ ID NO: 6654 - RNA, 1435 nt, Artificial Sequence
  mRNA Design a-1 (hSL-A64-N5) comprising derived and/or modified sequence from Pf(3D7)__XP_001351122.1__IgE_Pf-CSP(19-397) (opt3)
aggagagucccgcagucggcguccagcggcucugcuuguucgugugugugucguugcaggccuuauucaagcuuaccauggacuggaccuggauccuguuccucguggccgcugcaacaagaguccacagccuuuuucaggaguaccaaugcuauggcuccucuucaaacacuaggguucugaaugaauugaacuacgauaaugccgggacgaacuuauauaaugagcuggaaaugaacuacuauggaaagcaggagaauugguacagucuaaagaagaacagccggucccucggugaaaaugacgauggcaacaaugaggacaacgagaaacugcgcaagcccaaacauaagaaacuuaaacagccugcggaugggaauccagacccgaacgcuaaucccaacguggauccuaacgccaauccaaacguagaccccaaugcaaacccuaauguggauccaaacgccaaucccaacgcuaauccuaacgcaaauccaaacgccaauccgaacgcuaaucccaacgccaacccuaaugcgaacccaaaugcaaaccccaaugccaacccuaaugcuaacccaaaugccaaccccaaugcaaacccgaaugcuaacccuaaugccaaccccaacgcgaauccaaacgccaauccuaacgcaaaucccaacgucgacccaaaugcuaaccccaaugccaacccuaaugcuaacccaaaugccaacccgaaugcaaaccccaacgccaauccuaacgcuaauccaaacgcgaaucccaacgcaaauccuaacgccaauccaaacgcuaaucccaacgccaauccgaacgcaaauccuaacgccaauccaaacgcuaaccccaaugccaacccuaaugcaaaccccaaugcgaacccaaauaagaacaaucagggaaacggccaaggucacaauaugccuaacgaucccaaucgaaacguggacgaaaaugcuaacgccaacucugcaguuaaaaauaacaauaacgaggaaccaucggauaagcauauuaaagaguaucugaauaagauacagaacucauugagcaccgaguggaguccguguuccgugacaugcgggaauggaauccagguccguauuaagccuggcucugccaacaaacccaaggacgaacucgacuacgcuaaugauaucgagaaaaagauuuguaaaauggaaaagugcagcuccguguucaacguaguuaauucaaguaucggccugauaauggugcugagcuuucucuucuuaaacugaggacuagucccuguucccagagcccacuuuuuuuucuuuuuuugaaauaaaauagccugucuuucagaucucaaaggcucuuuucagagccaccaaaaaaaaaaaaaaaaaaaaaaaaaaaaaaaaaaaaaaaaaaaaaaaaaaaaaaaaaaaaaaaaagaauu

SEQ ID NO: 6655 - RNA, 1600 nt, Artificial Sequence
  mRNA Design a-1 (hSL-A64-N5) comprising derived and/or modified sequence from Pf(3D7)__XP_001351122.1__Pf-CSP_L(G4SG4)_TM domain HA (opt3)
aggagagucccgcagucggcguccagcggcucugcuuguucgugugugugucguugcaggccuuauucaagcuuaccaugaugagaaagcuggccauccucagcguguccucuuuccuuuuugucgaggcucuguuccaggaauaccaaugcuauggcucaaguagcaacaccaggguuuugaaugaguuaaacuacgacaaugcagggacaaaccuguauaaugaacuagagaugaacuacuauggaaagcaggaaaauugguacucccucaagaaaaacucucggucgcugggugagaaugaugacggcaacaaugaggauaacgaaaaacuucgcaagcccaagcacaagaaacugaagcagccugccgacgggaauccagauccgaacgcgaaucccaacguggacccuaacgcuaauccaaacguagaucccaaugccaacccuaauguggacccaaacgcaaaucccaacgccaauccuaacgcuaauccaaacgcaaauccgaacgccaaucccaacgcuaacccuaaugccaacccaaaugcgaaccccaaugcaaacccuaaugccaacccaaaugcuaaccccaaugccaacccgaaugcaaacccuaaugcuaaccccaacgccaauccaaacgcgaauccuaacgccaaucccaacgucgauccaaaugcaaaccccaaugcuaacccuaaugccaacccaaaugcuaacccgaaugccaaccccaacgcaaauccuaacgccaauccaaacgcuaaucccaacgcgaauccuaacgcaaauccaaacgccaaucccaacgcuaauccgaacgccaauccuaacgcaaauccaaacgccaaccccaaugcuaacccuaaugccaaccccaaugcaaacccaaauaaaaacaaucagggaaacggccaaggucauaauaugccuaacgaccccaaucgaaacguggaugagaaugcgaacgcuaacucagccguuaagaauaacaauaacgaggaaccaagcgacaaacacauuaaggaguauuugaauaagauacagaacagucucuccacugaauggucuccguguagcgugacgugcgggaauggaauccagguccguauuaaaccuggcuccgcaaacaagcccaaagaugagcuggacuacgccaaugacaucgaaaagaaaauuuguaagauggagaaaugcucaaguguguuuaacguaguuaauagcucuaucggccugauaauggugcucuccuucuuauuucugaacgggggagguggcucagggggaggcgguaaacuugaaagcaccagaaucuaccagauuuuggcuaucuauaguacagucgccucuucccuggugcuaguggucagccucggggcaauuucguucuggauguguucuaauggaucccugcaaugcaggaucuguauaugaggacuagucccuguucccagagcccacuuuuuuuucuuuuuuugaaauaaaauagccugucuuucagaucucaaaggcucuuuucagagccaccaaaaaaaaaaaaaaaaaaaaaaaaaaaaaaaaaaaaaaaaaaaaaaaaaaaaaaaaaaaaaaaaagaauu

SEQ ID NO: 6656 - RNA, 1474 nt, Artificial Sequence
  mRNA Design a-1 (hSL-A64-N5) comprising derived and/or modified sequence from Pf(3D7)__XP_001351122.1__Pf-CSP(199-377)_L(PVTN)_HBsAg (opt3)
aggagagucccgcagucggcguccagcggcucugcuuguucgugugugugucguugcaggccuuauucaagcuuaccauggaccccaacgccaauccuaacgcuaauccaaacgcaaauccgaacgccaaucccaacgcgaauccuaacgcuaauccaaacgccaaucccaacgcaaauccuaacgccaacccaaaugcuaaccccaaugcaaacccuaaugccaacccaaaugcuaacccgaaugccaaccccaaugcgaacccuaaugcaaacccaaaugccaaccccaacgcuaauccuaacaagaauaaccagggcaaugggcaaggacacaacaugccaaaugaucccaacagaaauguggacgagaacgccaaugcaaacagcgcugucaaaaauaacaauaacgaggaaccguccgauaagcauaucaaagaauaccugaacaagauucaaaauucucucucaaccgaguggaguccuugcagcguuacaugugguaacggcauacaggugaggaucaaacccggguccgccaauaagccaaaggacgaacuugauuaugcgaacgacauugagaaaaagaucugcaaaauggagaaguguucuucgguaccugugacuaauauggaaaacauuacgucaggauuccugggccccuuguuaguccugcaggccggguuuuuccuacucacccggauccugacaauaccacagagccuugauaguugguggacuucccugaauuuucucgguggaucucccgugugcuugggccagaacagccaguccccuaccucaaaucacaguccaacaagcuguccgcccaucugcccuggcuaccgcuggaugugucugcgacguuucauuaucuuucuguucauucucuuacugugccuuaucuuuuugcugguucuacucgacuaucaggggaugcugccaguguguccccuuauaccuggaucuaccacuacaaacaccgguccaugcaaaacguguacuacccccgcacaaggcaauuccauguucccgucaugcugcuguacaaagccuacugaugggaacugcaccuguauuccaauccccagcaguugggcuuuugccaaguaccugugggagugggcuucugucagauucuccugguugagccuccuggugccuuuuguacagugguucguuggauuaucgcccacaguguggcugucugccauuuggaugaugugguauuggggcccaucccucuacucaaucgucaguccuuuuaucccccuucugccaauuuucuucugcuuguggguguauauaugaggacuagucccuguucccagagcccacuuuuuuuucuuuuuuugaaauaaaauagccugucuuucagaucucaaaggcucuuuucagagccaccaaaaaaaaaaaaaaaaaaaaaaaaaaaaaaaaaaaaaaaaaaaaaaaaaaaaaaaaaaaaaaaaagaauu

SEQ ID NO: 6657 - RNA, 1516 nt, Artificial Sequence
  mRNA Design a-1 (hSL-A64-N5) comprising derived and/or modified sequence from Pf(3D7)__XP_001351122.1__Pf-CSP(199-387)_L(PVTN)_HBsAg (opt3)
aggagagucccgcagucggcguccagcggcucugcuuguucgugugugugucguugcaggccuuauucaagcuuaccaugauggcccccgacccuaacgcuaauccaaacgcaaauccgaacgccaaucccaacgcgaauccuaacgcuaauccaaacgccaaucccaacgcaaauccuaacgccaauccaaacgcuaaccccaaugcaaacccuaaugccaacccaaaugcuaacccgaaugccaaccccaaugcgaacccuaaugcaaacccaaaugccaaccccaaugcuaacccuaacgccaauccaaacaagaauaaccagggcaaugggcaaggacacaacaugcccaaugauccgaacagaaauguggacgagaacgcaaaugcuaacagcgccgucaaaaauaacaauaacgaggaaccuuccgauaagcauaucaaagaauaccugaacaagauucaaaauucucucucaaccgaguggagucccugcagcguuacaugugguaacggcauacaggugaggaucaaaccaggguccgcgaauaagccuaaggacgaacuugauuaugccaacgacauugagaaaaagaucugcaaaauggagaaguguucuucgguauucaauguggucaacucaagcauuggacugggccccgugacuaauauggaaaacaucacgaguggguuuuuggguccauuacugguucuacaggcaggauucuuucuccugacccggauacuuacaaucccccagucccuggauucuugguggacuagcuugaauuuccucggcggcuccccugugugccuggggcagaacucacagaguccaaccagcaaucacucuccgacauccugucccccuauuugcccaggauaccgcuggaugugucugcgacguuuuaucauuuuccucuuuaucuuacugcuuugcuugauauuccugcuaguccuccuggacuaucaggguaugcuucccguguguccucugauuccaggcucaaccacuacaaacaccgggcccugcaaaacguguacuaccccggcucaaggaaauagcauguuuccuaguugcugcuguacaaagccaacugauggcaacugcaccuguauccccauuccuucuuccugggccuucgcuaaguacuugugggagugggccagcguaagauuuucguggcucucucuguuaguucccuucgugcagugguuugucggucuguccccaacaguguggcucucagcaaucuggaugaugugguauugggggccuagucuuuacagcaucgugucccccuucauuccacuguugccgauauucuuuugccuaugggucuauaucugaggacuagucccuguucccagagcccacuuuuuuuucuuuuuuugaaauaaaauagccugucuuucagaucucaaaggcucuuuucagagccaccaaaaaaaaaaaaaaaaaaaaaaaaaaaaaaaaaaaaaaaaaaaaaaaaaaaaaaaaaaaaaaaaagaauu

SEQ ID NO: 6658 - RNA, 700 nt, Artificial Sequence
  mRNA Design a-1 (hSL-A64-N5) comprising derived and/or modified sequence from Pf(3D7)__XP_001351122.1__HsALB_Pf-CSP(19-152) (opt3)
aggagagucccgcagucggcguccagcggcucugcuuguucgugugugugucguugcaggccuuauucaagcuuaccaugaagugggugaccuucaucagccugcucuuucuuuucuccucugccuacucacuguuucaggaguaucaaugcuacggcaguagcuccaacacaagagucuugaaugaauuaaacuaugacaaugcugggacuaaccuguacaaugagcuagaaaugaacuauuacggaaaacaggagaauugguauucucucaagaaaaacucgaggucacugggugaaaaugaugacggcaacaaugaggauaacgagaaacuucggaagcccaagcacaagaaacugaagcagccugcagacgggaauccagauccgaacgccaaucccaacguugacccuaacgcgaauccaaacguggaucccaaugcuaacccuaauguagacccaaacgccaaucccaacgcaaauccuaacgccaauccaaacgcuaauccgaacgcaaaucccaacgccaacccuugaggacuagucccuguucccagagcccacuuuuuuuucuuuuuuugaaauaaaauagccugucuuucagaucucaaaggcucuuuucagagccaccaaaaaaaaaaaaaaaaaaaaaaaaaaaaaaaaaaaaaaaaaaaaaaaaaaaaaaaaaaaaaaaaagaauu

SEQ ID NO: 6659 - RNA, 820 nt, Artificial Sequence
  mRNA Design a-1 (hSL-A64-N5) comprising derived and/or modified sequence from Pf(3D7)__XP_001351122.1__HsALB_Pf-CSP(19-192) (opt3)
aggagagucccgcagucggcguccagcggcucugcuuguucgugugugugucguugcaggccuuauucaagcuuaccaugaagugggugaccuucaucagccugcucuuucuuuucuccucugccuacucacuguuucaggaguaucaaugcuacggcaguagcuccaacacaagagucuugaaugaauuaaacuaugacaaugcugggacuaaccuguacaaugagcuagaaaugaacuauuacggaaaacaggagaauugguauucucucaagaaaaacucgaggucacugggugaaaaugaugacggcaacaaugaggauaacgagaaacuucggaagcccaagcacaagaaacugaagcagccugcagacgggaauccagauccgaacgccaaucccaacguugacccuaacgcgaauccaaacguggaucccaaugcuaacccuaauguagacccaaacgccaaucccaacgcaaauccuaacgccaauccaaacgcuaauccgaacgcaaaucccaacgccaacccuaaugcuaacccaaaugccaaccccaaugcgaacccuaaugcaaacccaaaugccaaccccaaugcuaacccgaaugccaacccuaaugcaaaccccaacgcuaauccaaacgccaauccuugaggacuagucccuguucccagagcccacuuuuuuuucuuuuuuugaaauaaaauagccugucuuucagaucucaaaggcucuuuucagagccaccaaaaaaaaaaaaaaaaaaaaaaaaaaaaaaaaaaaaaaaaaaaaaaaaaaaaaaaaaaaaaaaaagaauu

SEQ ID NO: 6660 - RNA, 1060 nt, Artificial Sequence
  mRNA Design a-1 (hSL-A64-N5) comprising derived and/or modified sequence from Pf(3D7)__XP_001351122.1__HsALB_Pf-CSP(19-272) (opt3)
aggagagucccgcagucggcguccagcggcucugcuuguucgugugugugucguugcaggccuuauucaagcuuaccaugaagugggugaccuucaucagccugcucuuucuuuucuccucugccuacucacuguuucaggaguaucaaugcuacggcaguagcuccaacacaagagucuugaaugaauuaaacuaugacaaugcugggacuaaccuguacaaugagcuagaaaugaacuauuacggaaaacaggagaauugguauucucucaagaaaaacucgaggucacugggugaaaaugaugacggcaacaaugaggauaacgagaaacuucggaagcccaagcacaagaaacugaagcagccugcagacgggaauccagauccgaacgccaaucccaacguugacccuaacgcgaauccaaacguggaucccaaugcuaacccuaauguagacccaaacgccaaucccaacgcaaauccuaacgccaauccaaacgcuaauccgaacgcaaaucccaacgccaacccuaaugcuaacccaaaugccaaccccaaugcgaacccuaaugcaaacccaaaugccaaccccaaugcuaacccgaaugccaacccuaaugcaaaccccaacgcuaauccaaacgccaauccuaacgcgaaucccaacguggauccaaaugccaaccccaaugcaaacccuaaugcuaacccaaaugccaacccgaaugcuaaccccaacgccaauccuaacgcaaauccaaacgccaaucccaacgcuaauccuaacgcgaauccaaacgcaaaucccaacgccaauccgaacgcuaauccuaacgccaauccaaacgcaaaccccaaugccaacccuaaugcuaaccccaaugccaacccaugaggacuagucccuguucccagagcccacuuuuuuuucuuuuuuugaaauaaaauagccugucuuucagaucucaaaggcucuuuucagagccaccaaaaaaaaaaaaaaaaaaaaaaaaaaaaaaaaaaaaaaaaaaaaaaaaaaaaaaaaaaaaaaaaagaauu

SEQ ID NO: 6661 - RNA, 1222 nt, Artificial Sequence
  mRNA Design a-1 (hSL-A64-N5) comprising derived and/or modified sequence from Pf(3D7)__XP_001351122.1__HsALB_Pf-CSP(19-272)_L(AAY)_Pf-CSP(310-3 27)_L(AAY)_Pf-CSP(346-375) (opt3)
aggagagucccgcagucggcguccagcggcucugcuuguucgugugugugucguugcaggccuuauucaagcuuaccaugaagugggugaccuucaucagccugcucuuucuuuucuccucugccuacucacuguuucaggaguaucaaugcuacggcaguagcuccaacacaagagucuugaaugaauuaaacuaugacaaugcugggacuaaccuguacaaugagcuagaaaugaacuauuacggaaaacaggagaauugguauucucucaagaaaaacucgaggucacugggugaaaaugaugacggcaacaaugaggauaacgagaaacuucggaagcccaagcacaagaaacugaagcagccugcagacgggaauccagauccgaacgccaaucccaacguugacccuaacgcgaauccaaacguggaucccaaugcuaacccuaauguagacccaaacgccaaucccaacgcaaauccuaacgccaauccaaacgcuaauccgaacgcaaaucccaacgccaacccuaaugcuaacccaaaugccaaccccaaugcgaacccuaaugcaaacccaaaugccaaccccaaugcuaacccgaaugccaacccuaaugcaaaccccaacgcuaauccaaacgccaauccuaacgcgaaucccaacguggauccaaaugccaaccccaaugcaaacccuaaugcuaacccaaaugccaacccgaaugcuaaccccaacgccaauccuaacgcaaauccaaacgccaaucccaacgcuaauccuaacgcgaauccaaacgcaaaucccaacgccaauccgaacgcuaauccuaacgccaauccaaacgcaaaccccaaugccaacccuaaugcuaaccccaaugccaacccagcagcguacgaaccuagcgacaaacauauuaaggaguacuugaauaaaauacagaacagucucgcugccuauaucaagcccggauccgcaaauaagccaaaagaugaacuggacuacgccaacgauauugagaagaaaaucuguaagauggagaaaugcucuugaggacuagucccuguucccagagcccacuuuuuuuucuuuuuuugaaauaaaauagccugucuuucagaucucaaaggcucuuuucagagccaccaaaaaaaaaaaaaaaaaaaaaaaaaaaaaaaaaaaaaaaaaaaaaaaaaaaaaaaaaaaaaaaaagaauu

SEQ ID NO: 6662 - RNA, 1183 nt, Artificial Sequence
  mRNA Design a-1 (hSL-A64-N5) comprising derived and/or modified sequence from Pf(3D7)__XP_001351122.1__HsALB_Pf-CSP(19-272)_L(AAY)_Pf-CSP(346-3 65)_L(AAY)_P2 (opt3)
aggagagucccgcagucggcguccagcggcucugcuuguucgugugugugucguugcaggccuuauucaagcuuaccaugaagugggugaccuucaucagccugcucuuucuuuucuccucugccuacucacuguuucaggaguaucaaugcuacggcaguagcuccaacacaagagucuugaaugaauuaaacuaugacaaugcugggacuaaccuguacaaugagcuagaaaugaacuauuacggaaaacaggagaauugguauucucucaagaaaaacucgaggucacugggugaaaaugaugacggcaacaaugaggauaacgagaaacuucggaagcccaagcacaagaaacugaagcagccugcagacgggaauccagauccgaacgccaaucccaacguugacccuaacgcgaauccaaacguggaucccaaugcuaacccuaauguagacccaaacgccaaucccaacgcaaauccuaacgccaauccaaacgcuaauccgaacgcaaaucccaacgccaacccuaaugcuaacccaaaugccaaccccaaugcgaacccuaaugcaaacccaaaugccaaccccaaugcuaacccgaaugccaacccuaaugcaaaccccaacgcuaauccaaacgccaauccuaacgcgaaucccaacguggauccaaaugccaaccccaaugcaaacccuaaugcuaacccaaaugccaacccgaaugcuaaccccaacgccaauccuaacgcaaauccaaacgccaaucccaacgcuaauccuaacgcgaauccaaacgcaaaucccaacgccaauccgaacgcuaauccuaacgccaauccaaacgcaaaccccaaugccaacccuaaugcuaaccccaaugccaacccagcagcguacauuaaaccuggaagcgcuaauaagcccaaagacgaauuggauuacgccaacgacauagaggcagccuaucaguacaucaaggcuaauaguaaguucauuggcaucacggaacucugaggacuagucccuguucccagagcccacuuuuuuuucuuuuuuugaaauaaaauagccugucuuucagaucucaaaggcucuuuucagagccaccaaaaaaaaaaaaaaaaaaaaaaaaaaaaaaaaaaaaaaaaaaaaaaaaaaaaaaaaaaaaaaaaagaauu

SEQ ID NO: 6663 - RNA, 1177 nt, Artificial Sequence
  mRNA Design a-1 (hSL-A64-N5) comprising derived and/or modified sequence from Pf(3D7)__XP_001351122.1__HsALB_Pf-CSP(19-272)_L(AAY)_Pf-CSP(346-3 65)_L(AAY)_PADRE (opt3)
aggagagucccgcagucggcguccagcggcucugcuuguucgugugugugucguugcaggccuuauucaagcuuaccaugaagugggugaccuucaucagccugcucuuucuuuucuccucugccuacucacuguuucaggaguaucaaugcuacggcaguagcuccaacacaagagucuugaaugaauuaaacuaugacaaugcugggacuaaccuguacaaugagcuagaaaugaacuauuacggaaaacaggagaauugguauucucucaagaaaaacucgaggucacugggugaaaaugaugacggcaacaaugaggauaacgagaaacuucggaagcccaagcacaagaaacugaagcagccugcagacgggaauccagauccgaacgccaaucccaacguugacccuaacgcgaauccaaacguggaucccaaugcuaacccuaauguagacccaaacgccaaucccaacgcaaauccuaacgccaauccaaacgcuaauccgaacgcaaaucccaacgccaacccuaaugcuaacccaaaugccaaccccaaugcgaacccuaaugcaaacccaaaugccaaccccaaugcuaacccgaaugccaacccuaaugcaaaccccaacgcuaauccaaacgccaauccuaacgcgaaucccaacguggauccaaaugccaaccccaaugcaaacccuaaugcuaacccaaaugccaacccgaaugcuaaccccaacgccaauccuaacgcaaauccaaacgccaaucccaacgcuaauccuaacgcgaauccaaacgcaaaucccaacgccaauccgaacgcuaauccuaacgccaauccaaacgcaaaccccaaugccaacccuaaugcuaaccccaaugccaacccagcagcguacauuaaaccuggaagcgcuaauaagcccaaagacgaauuggauuacgccaacgacauagaggcagccuaugcuaaguucgucgccgcauggacgcucaaggcugccgcgugaggacuagucccuguucccagagcccacuuuuuuuucuuuuuuugaaauaaaauagccugucuuucagaucucaaaggcucuuuucagagccaccaaaaaaaaaaaaaaaaaaaaaaaaaaaaaaaaaaaaaaaaaaaaaaaaaaaaaaaaaaaaaaaaagaauu

SEQ ID NO: 6664 - RNA, 1234 nt, Artificial Sequence
  mRNA Design a-1 (hSL-A64-N5) comprising derived and/or modified sequence from Pf(3D7)__XP_001351122.1__HsALB_Pf-CSP(19-272)_L(G4S)_Pf-CSP(310-3 27)_L(G4S)_Pf-CSP(346-375) (opt3)
aggagagucccgcagucggcguccagcggcucugcuuguucgugugugugucguugcaggccuuauucaagcuuaccaugaagugggugaccuucaucagccugcucuuucuuuucuccucugccuacucacuguuucaggaguaucaaugcuacggcaguagcuccaacacaagagucuugaaugaauuaaacuaugacaaugcugggacuaaccuguacaaugagcuagaaaugaacuauuacggaaaacaggagaauugguauucucucaagaaaaacucgaggucacugggugaaaaugaugacggcaacaaugaggauaacgagaaacuucggaagcccaagcacaagaaacugaagcagccugcagacgggaauccagauccgaacgccaaucccaacguugacccuaacgcgaauccaaacguggaucccaaugcuaacccuaauguagacccaaacgccaaucccaacgcaaauccuaacgccaauccaaacgcuaauccgaacgcaaaucccaacgccaacccuaaugcuaacccaaaugccaaccccaaugcgaacccuaaugcaaacccaaaugccaaccccaaugcuaacccgaaugccaacccuaaugcaaaccccaacgcuaauccaaacgccaauccuaacgcgaaucccaacguggauccaaaugccaaccccaaugcaaacccuaaugcuaacccaaaugccaacccgaaugcuaaccccaacgccaauccuaacgcaaauccaaacgccaaucccaacgcuaauccuaacgcgaauccaaacgcaaaucccaacgccaauccgaacgcuaauccuaacgccaauccaaacgcaaaccccaaugccaacccuaaugcuaaccccaaugccaacccaggaggcggugggagcgaaccuagugacaaacauauuaaggaguacuugaauaaaauacagaacucccucggaggcggcgggucuaucaagcccggaagcgcaaauaagccaaaagaugaacuggacuacgcgaacgauauugagaagaaaaucuguaagauggagaaaugcuccugaggacuagucccuguucccagagcccacuuuuuuuucuuuuuuugaaauaaaauagccugucuuucagaucucaaaggcucuuuucagagccaccaaaaaaaaaaaaaaaaaaaaaaaaaaaaaaaaaaaaaaaaaaaaaaaaaaaaaaaaaaaaaaaaagaauu

SEQ ID NO: 6665 - RNA, 1219 nt, Artificial Sequence
  mRNA Design a-1 (hSL-A64-N5) comprising derived and/or modified sequence from Pf(3D7)__XP_001351122.1__HsALB_Pf-CSP(19-272)_L(G4S)_Pf-CSP(310-3 27)_Pf-CSP(346-375) (opt3)
aggagagucccgcagucggcguccagcggcucugcuuguucgugugugugucguugcaggccuuauucaagcuuaccaugaagugggugaccuucaucagccugcucuuucuuuucuccucugccuacucacuguuucaggaguaucaaugcuacggcaguagcuccaacacaagagucuugaaugaauuaaacuaugacaaugcugggacuaaccuguacaaugagcuagaaaugaacuauuacggaaaacaggagaauugguauucucucaagaaaaacucgaggucacugggugaaaaugaugacggcaacaaugaggauaacgagaaacuucggaagcccaagcacaagaaacugaagcagccugcagacgggaauccagauccgaacgccaaucccaacguugacccuaacgcgaauccaaacguggaucccaaugcuaacccuaauguagacccaaacgccaaucccaacgcaaauccuaacgccaauccaaacgcuaauccgaacgcaaaucccaacgccaacccuaaugcuaacccaaaugccaaccccaaugcgaacccuaaugcaaacccaaaugccaaccccaaugcuaacccgaaugccaacccuaaugcaaaccccaacgcuaauccaaacgccaauccuaacgcgaaucccaacguggauccaaaugccaaccccaaugcaaacccuaaugcuaacccaaaugccaacccgaaugcuaaccccaacgccaauccuaacgcaaauccaaacgccaaucccaacgcuaauccuaacgcgaauccaaacgcaaaucccaacgccaauccgaacgcuaauccuaacgccaauccaaacgcaaaccccaaugccaacccuaaugcuaaccccaaugccaacccaggaggcggugggagcgaaccuagugacaaacauauuaaggaguacuugaauaaaauacagaacucccucaucaagcccggaucugcaaauaagccaaaagaugaacuggacuacgcgaacgauauugagaagaaaaucuguaagauggagaaaugcagcugaggacuagucccuguucccagagcccacuuuuuuuucuuuuuuugaaauaaaauagccugucuuucagaucucaaaggcucuuuucagagccaccaaaaaaaaaaaaaaaaaaaaaaaaaaaaaaaaaaaaaaaaaaaaaaaaaaaaaaaaaaaaaaaaagaauu

SEQ ID NO: 6666 - RNA, 1219 nt, Artificial Sequence
  mRNA Design a-1 (hSL-A64-N5) comprising derived and/or modified sequence from Pf(3D7)__XP_001351122.1__HsALB_Pf-CSP(19-325) (opt3)
aggagagucccgcagucggcguccagcggcucugcuuguucgugugugugucguugcaggccuuauucaagcuuaccaugaagugggugaccuucaucagccugcucuuucuuuucuccucugccuacucacuguuucaggaguaucaaugcuacggcaguagcuccaacacaagagucuugaaugaauuaaacuaugacaaugcugggacuaaccuguacaaugagcuagaaaugaacuauuacggaaaacaggagaauugguauucucucaagaaaaacucgaggucacugggugaaaaugaugacggcaacaaugaggauaacgagaaacuucggaagcccaagcacaagaaacugaagcagccugcagacgggaauccagauccgaacgccaaucccaacguugacccuaacgcgaauccaaacguggaucccaaugcuaacccuaauguagacccaaacgccaaucccaacgcaaauccuaacgccaauccaaacgcuaauccgaacgcaaaucccaacgccaacccuaaugcuaacccaaaugccaaccccaaugcgaacccuaaugcaaacccaaaugccaaccccaaugcuaacccgaaugccaacccuaaugcaaaccccaacgcuaauccaaacgccaauccuaacgcgaaucccaacguggauccaaaugccaaccccaaugcaaacccuaaugcuaacccaaaugccaacccgaaugcuaaccccaacgccaauccuaacgcaaauccaaacgccaaucccaacgcuaauccuaacgcgaauccaaacgcaaaucccaacgccaauccgaacgcuaauccuaacgccaauccaaacgcaaaccccaaugccaacccuaaugcuaaccccaaugccaacccaaauaaaaacaaucagggaaacggccaaggucauaauaugccuaacgaccccaaucgcaacgucgaugaaaaugcaaacgcgaacagcgcugugaagaauaacaauaacgaggaaccaagugacaaacacauuaaggaguacuugaauaagauacagaacugaggacuagucccuguucccagagcccacuuuuuuuucuuuuuuugaaauaaaauagccugucuuucagaucucaaaggcucuuuucagagccaccaaaaaaaaaaaaaaaaaaaaaaaaaaaaaaaaaaaaaaaaaaaaaaaaaaaaaaaaaaaaaaaaagaauu

SEQ ID NO: 6667 - RNA, 1396 nt, Artificial Sequence
  mRNA Design a-1 (hSL-A64-N5) comprising derived and/or modified sequence from Pf(3D7)__XP_001351122.1__HsALB_Pf-CSP(19-384) (opt3)
aggagagucccgcagucggcguccagcggcucugcuuguucgugugugugucguugcaggccuuauucaagcuuaccaugaagugggugaccuucaucagccugcucuuucuuuucuccucugccuacucacuguuucaggaguaucaaugcuacggcaguagcuccaacacaagagucuugaaugaauuaaacuaugacaaugcugggacuaaccuguacaaugagcuagaaaugaacuauuacggaaaacaggagaauugguauucucucaagaaaaacucgaggucacugggugaaaaugaugacggcaacaaugaggauaacgagaaacuucggaagcccaagcacaagaaacugaagcagccugcagacgggaauccagauccgaacgccaaucccaacguugacccuaacgcgaauccaaacguggaucccaaugcuaacccuaauguagacccaaacgccaaucccaacgcaaauccuaacgccaauccaaacgcuaauccgaacgcaaaucccaacgccaacccuaaugcuaacccaaaugccaaccccaaugcgaacccuaaugcaaacccaaaugccaaccccaaugcuaacccgaaugccaacccuaaugcaaaccccaacgcuaauccaaacgccaauccuaacgcgaaucccaacguggauccaaaugccaaccccaaugcaaacccuaaugcuaacccaaaugccaacccgaaugcuaaccccaacgccaauccuaacgcaaauccaaacgccaaucccaacgcuaauccuaacgcgaauccaaacgcaaaucccaacgccaauccgaacgcuaauccuaacgccaauccaaacgcaaaccccaaugccaacccuaaugcuaaccccaaugccaacccaaauaaaaacaaucagggaaacggccaaggucauaauaugccuaacgaccccaaucgcaacgucgaugaaaaugcaaacgcgaacagcgcugugaagaauaacaauaacgaggaaccaagugacaaacacauuaaggaguacuugaauaagauacagaacucccucucuacggaguggagcccguguuccguuaccugcgggaauggaauccaggugcgaauuaaaccuggcucagccaacaagcccaaagaugaacuggacuacgcaaaugacaucgagaagaaaauuuguaagauggaaaaaugcaguagcgucuucaacgugguaaauucuuccugaggacuagucccuguucccagagcccacuuuuuuuucuuuuuuugaaauaaaauagccugucuuucagaucucaaaggcucuuuucagagccaccaaaaaaaaaaaaaaaaaaaaaaaaaaaaaaaaaaaaaaaaaaaaaaaaaaaaaaaaaaaaaaaaagaauu

SEQ ID NO: 6668 - RNA, 1534 nt, Artificial Sequence
  mRNA Design a-1 (hSL-A64-N5) comprising derived and/or modified sequence from Pf(3D7)__XP_001351122.1__HsALB_Pf-CSP(19-384)_TM domain HA (opt3)
aggagagucccgcagucggcguccagcggcucugcuuguucgugugugugucguugcaggccuuauucaagcuuaccaugaagugggugaccuucaucagccugcucuuucuuuucuccucugccuacucacuguuucaggaguaucaaugcuacggcaguagcuccaacacaagagucuugaaugaauuaaacuaugacaaugcugggacuaaccuguacaaugagcuagaaaugaacuauuacggaaaacaggagaauugguauucucucaagaaaaacucgaggucacugggugaaaaugaugacggcaacaaugaggauaacgagaaacuucggaagcccaagcacaagaaacugaagcagccugcagacgggaauccagauccgaacgccaaucccaacguugacccuaacgcgaauccaaacguggaucccaaugcuaacccuaauguagacccaaacgccaaucccaacgcaaauccuaacgccaauccaaacgcuaauccgaacgcaaaucccaacgccaacccuaaugcuaacccaaaugccaaccccaaugcgaacccuaaugcaaacccaaaugccaaccccaaugcuaacccgaaugccaacccuaaugcaaaccccaacgcuaauccaaacgccaauccuaacgcgaaucccaacguggauccaaaugccaaccccaaugcaaacccuaaugcuaacccaaaugccaacccgaaugcuaaccccaacgccaauccuaacgcaaauccaaacgccaaucccaacgcuaauccuaacgcgaauccaaacgcaaaucccaacgccaauccgaacgcuaauccuaacgccaauccaaacgcaaaccccaaugccaacccuaaugcuaaccccaaugccaacccaaauaaaaacaaucagggaaacggccaaggucauaauaugccuaacgaccccaaucgcaacgucgaugaaaaugcaaacgcgaacagcgcugugaagaauaacaauaacgaggaaccaagugacaaacacauuaaggaguacuugaauaagauacagaacucccucucuacggaguggagcccguguuccguuaccugcgggaauggaauccaggugcgaauuaaaccuggcucagccaacaagcccaaagaugaacuggacuacgcaaaugacaucgagaagaaaauuuguaagauggaaaaaugcaguagcgucuucaacgugguaaauucuuccaagcuggagucaacacguaucuaucagauacucgccaucuacagcacuguugcuaguucuuuagugcuggucgugucccuuggcgccauuagcuuuuggauguguucgaacgggucuuugcaaugcagaaucuguauuugaggacuagucccuguucccagagcccacuuuuuuuucuuuuuuugaaauaaaauagccugucuuucagaucucaaaggcucuuuucagagccaccaaaaaaaaaaaaaaaaaaaaaaaaaaaaaaaaaaaaaaaaaaaaaaaaaaaaaaaaaaaaaaaaagaauu

SEQ ID NO: 6669 - RNA, 1246 nt, Artificial Sequence
  mRNA Design a-1 (hSL-A64-N5) comprising derived and/or modified sequence from Pf(3D7)__XP_001351122.1__HsALB_Pf-CSP(82-397) (opt3)
aggagagucccgcagucggcguccagcggcucugcuuguucgugugugugucguugcaggccuuauucaagcuuaccaugaagugggugaccuucaucagccugcucuuucuuuucuccucugccuacucagacaacgagaaacugagaaagcccaaacacaagaaauugaagcagccugcugauggcaauccagacccgaacgcaaaucccaacgucgauccuaaugccaacccaaauguugaccccaacgcgaauccuaacguggauccaaaugcuaaccccaaugccaacccuaaugcaaacccaaacgccaauccgaacgcuaaucccaacgcaaauccuaacgccaauccaaacgcuaaucccaacgccaauccuaacgcgaauccaaacgcaaaucccaacgccaacccgaaugcuaacccuaaugccaaccccaaugcaaacccaaaugcuaacccuaaugccaaccccaauguagacccaaacgcgaaucccaacgccaauccuaacgcaaacccaaaugcuaacccgaaugccaaccccaaugcuaacccuaaugccaacccaaaugcaaaccccaaugccaacccuaaugcuaacccaaaugcgaaccccaacgcaaauccgaacgccaauccuaacgcuaauccaaacgccaaucccaacgcaaauccuaacgccaaucccaacgcuaauccaaacaagaauaaccaggggaauggacagggucauaacaugccuaacgaucccaauaggaacguggacgaaaaugccaacgcaaauagugcggucaaaaacaauaacaaugaggaaccaagcgauaagcacauuaaagaguauuuaaacaagauacaaaauucccugucuacagaauggucgccgugcucagugacuuguggcaacgggauccagguucggauuaaaccuggaagcgcuaauaagcccaaggacgagcuagauuacgccaacgacaucgagaaaaagauuugcaaaauggaaaaguguaguuccguguuuaaugucgugaacucuagcaucggccucauaaugguacuguccuuccuuuuucugaacugaggacuagucccuguucccagagcccacuuuuuuuucuuuuuuugaaauaaaauagccugucuuucagaucucaaaggcucuuuucagagccaccaaaaaaaaaaaaaaaaaaaaaaaaaaaaaaaaaaaaaaaaaaaaaaaaaaaaaaaaaaaaaaaaagaauu

SEQ ID NO: 6670 - RNA, 598 nt, Artificial Sequence
  mRNA Design a-1 (hSL-A64-N5) comprising derived and/or modified sequence from Pf(3D7)__XP_001351122.1__HsALB_Pf-CSP(93-192) (opt3)
aggagagucccgcagucggcguccagcggcucugcuuguucgugugugugucguugcaggccuuauucaagcuuaccaugaagugggugaccuucaucagccugcucuuucuuuucuccucugccuacucaaaacugaagcagcccgcugacggcaacccugauccaaaugcaaacccgaaugucgaccccaacgccaauccuaacguugauccaaaugcgaaccccaauguggacccuaacgcuaauccaaacgccaaucccaacgcaaauccuaacgccaacccaaaugcuaacccgaaugcaaaccccaaugccaacccuaaugcuaacccaaaugccaaccccaaugcgaacccuaaugcaaacccaaaugccaaccccaacgcuaauccgaacgccaauccuaacgcaaaucccaacgcuaauccaugaggacuagucccuguucccagagcccacuuuuuuuucuuuuuuugaaauaaaauagccugucuuucagaucucaaaggcucuuuucagagccaccaaaaaaaaaaaaaaaaaaaaaaaaaaaaaaaaaaaaaaaaaaaaaaaaaaaaaaaaaaaaaaaaagaauu

SEQ ID NO: 6671 - RNA, 838 nt, Artificial Sequence
  mRNA Design a-1 (hSL-A64-N5) comprising derived and/or modified sequence from Pf(3D7)__XP_001351122.1__HsALB_Pf-CSP(93-272) (opt3)
aggagagucccgcagucggcguccagcggcucugcuuguucgugugugugucguugcaggccuuauucaagcuuaccaugaagugggugaccuucaucagccugcucuuucuuuucuccucugccuacucaaaacugaagcagcccgcugacggcaacccugauccaaaugcaaacccgaaugucgaccccaacgccaauccuaacguugauccaaaugcgaaccccaauguggacccuaacgcuaauccaaacgccaaucccaacgcaaauccuaacgccaacccaaaugcuaacccgaaugcaaaccccaaugccaacccuaaugcuaacccaaaugccaaccccaaugcgaacccuaaugcaaacccaaaugccaaccccaacgcuaauccgaacgccaauccuaacgcaaaucccaacgcuaauccaaacgccaauccuaacguagaucccaaugcgaacccaaaugccaaccccaaugcaaacccuaacgcuaauccaaacgccaauccgaacgcuaaucccaacgccaauccuaacgcaaauccaaacgccaaucccaacgcuaauccuaacgcgaauccaaacgcaaaccccaaugccaacccgaaugcuaacccuaaugccaacccaaaugcaaaccccaaugccaacccuaaugcuaaccccugaggacuagucccuguucccagagcccacuuuuuuuucuuuuuuugaaauaaaauagccugucuuucagaucucaaaggcucuuuucagagccaccaaaaaaaaaaaaaaaaaaaaaaaaaaaaaaaaaaaaaaaaaaaaaaaaaaaaaaaaaaaaaaaaagaauu

SEQ ID NO: 6672 - RNA, 1213 nt, Artificial Sequence
  mRNA Design a-1 (hSL-A64-N5) comprising derived and/or modified sequence from Pf(3D7)__XP_001351122.1__HsALB_Pf-CSP(93-397) (opt3)
aggagagucccgcagucggcguccagcggcucugcuuguucgugugugugucguugcaggccuuauucaagcuuaccaugaagugggugaccuucaucagccugcucuuucuuuucuccucugccuacucaaaacugaagcagcccgcugacggcaacccugauccaaaugcaaacccgaaugucgaccccaacgccaauccuaacguugauccaaaugcgaaccccaauguggacccuaacgcuaauccaaacgccaaucccaacgcaaauccuaacgccaacccaaaugcuaacccgaaugcaaaccccaaugccaacccuaaugcuaacccaaaugccaaccccaaugcgaacccuaaugcaaacccaaaugccaaccccaacgcuaauccgaacgccaauccuaacgcaaaucccaacgcuaauccaaacgccaauccuaacguagaucccaaugcgaacccaaaugccaaccccaaugcaaacccuaacgcuaauccaaacgccaauccgaacgcuaaucccaacgccaauccuaacgcaaauccaaacgccaaucccaacgcuaauccuaacgcgaauccaaacgcaaaccccaaugccaacccgaaugcuaacccuaaugccaacccaaaugcaaaccccaaugccaacccuaaugcuaaccccaauaaaaacaaucaagggaacggacagggucacaauaugccaaacgacccuaacagaaauguggaugagaacgccaaugcaaacagugcggucaagaauaacaauaacgaggaacccagcgacaaacauauuaaggaauauuugaauaagauacagaacuccuuaucuacagaguggucgccaugcucagugacuuguggcaaugggauccagguuaggauuaaaccgggaagcgcuaacaagccuaaagaugaacuggacuacgccaaugauaucgagaagaaaauuugcaagauggagaaguguaguuccguguuuaacgucguaaauucuagcaucggccuaauaauggugcucuccuuccuguuucuuaacugaggacuagucccuguucccagagcccacuuuuuuuucuuuuuuugaaauaaaauagccugucuuucagaucucaaaggcucuuuucagagccaccaaaaaaaaaaaaaaaaaaaaaaaaaaaaaaaaaaaaaaaaaaaaaaaaaaaaaaaaaaaaaaaaagaauu

SEQ ID NO: 6673 - RNA, 583 nt, Artificial Sequence
  mRNA Design a-1 (hSL-A64-N5) comprising derived and/or modified sequence from Pf(3D7)__XP_001351122.1__HsALB_Pf-CSP(98-192) (opt3)
aggagagucccgcagucggcguccagcggcucugcuuguucgugugugugucguugcaggccuuauucaagcuuaccaugaagugggugaccuucaucagccugcucuuucuuuucuccucugccuacucagcugacggcaaccccgauccuaaugcaaacccaaaugucgacccgaacgccaaucccaacguugauccuaaugcgaacccaaauguggaccccaacgcuaauccuaacgccaauccaaacgcaaaucccaacgccaacccuaaugcuaacccaaaugcaaacccgaaugccaaccccaaugcuaacccuaaugccaacccaaaugcgaaccccaaugcaaacccuaaugccaacccaaacgcuaaucccaacgccaauccgaacgcaaauccuaacgcuaaucccugaggacuagucccuguucccagagcccacuuuuuuuucuuuuuuugaaauaaaauagccugucuuucagaucucaaaggcucuuuucagagccaccaaaaaaaaaaaaaaaaaaaaaaaaaaaaaaaaaaaaaaaaaaaaaaaaaaaaaaaaaaaaaaaaagaauu

SEQ ID NO: 6674 - RNA, 823 nt, Artificial Sequence
  mRNA Design a-1 (hSL-A64-N5) comprising derived and/or modified sequence from Pf(3D7)__XP_001351122.1__HsALB_Pf-CSP(98-272) (opt3)
aggagagucccgcagucggcguccagcggcucugcuuguucgugugugugucguugcaggccuuauucaagcuuaccaugaagugggugaccuucaucagccugcucuuucuuuucuccucugccuacucagcugacggcaaccccgauccuaaugcaaacccaaaugucgacccgaacgccaaucccaacguugauccuaaugcgaacccaaauguggaccccaacgcuaauccuaacgccaauccaaacgcaaaucccaacgccaacccuaaugcuaacccaaaugcaaacccgaaugccaaccccaaugcuaacccuaaugccaacccaaaugcgaaccccaaugcaaacccuaaugccaacccaaacgcuaaucccaacgccaauccgaacgcaaauccuaacgcuaaucccaacgccaauccaaacguagauccuaaugcgaaccccaaugccaacccaaaugcaaaccccaacgcuaauccuaacgccaauccaaacgcuaauccgaacgccaaucccaacgcaaauccuaacgccaauccaaacgcuaaucccaacgcgaauccuaacgcaaacccaaaugccaaccccaaugcuaacccgaaugccaacccuaaugcaaacccaaaugccaaccccaaugcuaacccuugaggacuagucccuguucccagagcccacuuuuuuuucuuuuuuugaaauaaaauagccugucuuucagaucucaaaggcucuuuucagagccaccaaaaaaaaaaaaaaaaaaaaaaaaaaaaaaaaaaaaaaaaaaaaaaaaaaaaaaaaaaaaaaaaagaauu

SEQ ID NO: 6675 - RNA, 1129 nt, Artificial Sequence
  mRNA Design a-1 (hSL-A64-N5) comprising derived and/or modified sequence from Pf(3D7)__XP_001351122.1__HsALB_Pf-CSP(98-374) (opt3)
aggagagucccgcagucggcguccagcggcucugcuuguucgugugugugucguugcaggccuuauucaagcuuaccaugaagugggugaccuucaucagccugcucuuucuuuucuccucugccuacucagcugacggcaaccccgauccuaaugcaaacccaaaugucgacccgaacgccaaucccaacguugauccuaaugcgaacccaaauguggaccccaacgcuaauccuaacgccaauccaaacgcaaaucccaacgccaacccuaaugcuaacccaaaugcaaacccgaaugccaaccccaaugcuaacccuaaugccaacccaaaugcgaaccccaaugcaaacccuaaugccaacccaaacgcuaaucccaacgccaauccgaacgcaaauccuaacgcuaaucccaacgccaauccaaacguagauccuaaugcgaaccccaaugccaacccaaaugcaaaccccaacgcuaauccuaacgccaauccaaacgcuaauccgaacgccaaucccaacgcaaauccuaacgccaauccaaacgcuaaucccaacgcgaauccuaacgcaaacccaaaugccaaccccaaugcuaacccgaaugccaacccuaaugcaaacccaaaugccaaccccaaugcuaacccuaauaaaaacaaucaggggaacggacaaggucacaauaugcccaacgacccaaacagaaauguggaugagaacgccaaugcaaacagugcggucaagaauaacaauaacgaggaaccuagcgacaaacauauuaaggaauaucugaauaaaauacagaacuccuugucuacagaguggucgcccugcucagugacuuguggcaaugggauccagguuaggauuaagccaggaagcgcuaacaagccgaaagaugaauuagacuacgccaaugauaucgagaagaaaauuugcaagauggagaaauguugaggacuagucccuguucccagagcccacuuuuuuuucuuuuuuugaaauaaaauagccugucuuucagaucucaaaggcucuuuucagagccaccaaaaaaaaaaaaaaaaaaaaaaaaaaaaaaaaaaaaaaaaaaaaaaaaaaaaaaaaaaaaaaaaagaauu

SEQ ID NO: 6676 - RNA, 1198 nt, Artificial Sequence
  mRNA Design a-1 (hSL-A64-N5) comprising derived and/or modified sequence from Pf(3D7)__XP_001351122.1__HsALB_Pf-CSP(98-397) (opt3)
aggagagucccgcagucggcguccagcggcucugcuuguucgugugugugucguugcaggccuuauucaagcuuaccaugaagugggugaccuucaucagccugcucuuucuuuucuccucugccuacucagcugacggcaaccccgauccuaaugcaaacccaaaugucgacccgaacgccaaucccaacguugauccuaaugcgaacccaaauguggaccccaacgcuaauccuaacgccaauccaaacgcaaaucccaacgccaacccuaaugcuaacccaaaugcaaacccgaaugccaaccccaaugcuaacccuaaugccaacccaaaugcgaaccccaaugcaaacccuaaugccaacccaaacgcuaaucccaacgccaauccgaacgcaaauccuaacgcuaaucccaacgccaauccaaacguagauccuaaugcgaaccccaaugccaacccaaaugcaaaccccaacgcuaauccuaacgccaauccaaacgcuaauccgaacgccaaucccaacgcaaauccuaacgccaauccaaacgcuaaucccaacgcgaauccuaacgcaaacccaaaugccaaccccaaugcuaacccgaaugccaacccuaaugcaaacccaaaugccaaccccaaugcuaacccuaauaaaaacaaucaggggaacggacaaggucacaauaugcccaacgacccaaacagaaauguggaugagaacgccaaugcaaacagugcggucaagaauaacaauaacgaggaaccuagcgacaaacauauuaaggaauaucugaauaaaauacagaacuccuugucuacagaguggucgcccugcucagugacuuguggcaaugggauccagguuaggauuaagccaggaagcgcuaacaagccgaaagaugaauuagacuacgccaaugauaucgagaagaaaauuugcaagauggagaaauguaguuccguguuuaacgucguaaauucuagcaucggccugauaauggugcuauccuuccucuuucugaacugaggacuagucccuguucccagagcccacuuuuuuuucuuuuuuugaaauaaaauagccugucuuucagaucucaaaggcucuuuucagagccaccaaaaaaaaaaaaaaaaaaaaaaaaaaaaaaaaaaaaaaaaaaaaaaaaaaaaaaaaaaaaaaaaagaauu

SEQ ID NO: 6677 - RNA, 1525 nt, Artificial Sequence
  mRNA Design a-1 (hSL-A64-N5) comprising derived and/or modified sequence from Pf(3D7)__XP_001351122.1__HsALB_Pf-CSP(199-377)_L(PVTN)_HBsAg (opt3)
aggagagucccgcagucggcguccagcggcucugcuuguucgugugugugucguugcaggccuuauucaagcuuaccaugaagugggugaccuucaucagccugcucuuucuuuucuccucugccuacucagaccccaacgcuaauccuaacgcaaauccaaacgccaauccgaacgcgaaucccaacgcuaauccuaacgccaauccaaacgcaaaucccaacgccaauccuaacgcuaacccaaaugcaaaccccaaugccaacccuaaugcuaacccaaaugccaacccgaaugcgaaccccaaugcaaacccuaaugccaacccaaaugcuaaccccaacgccaauccuaacaaaaauaaccagggcaaugggcaaggacacaacaugccaaaugaucccaacagaaaugucgacgagaacgcaaaugcuaacagugccguuaagaauaacaauaacgaggaaccgagcgauaaacauauuaaggaauaucugaacaaaauacaaaauuccuugucuacagaguggucgccuugcucagugacuugugguaacggcauccagguaaggauuaagcccgggagcgcgaauaagccaaaagacgaauuagauuacgccaacgacaucgagaagaaaauuugcaagauggagaaauguaguuccgugccugucacgaauauggaaaacaucaccucuggauuucugggcccccuacucgugcugcaggcagguuucuuucuucugacacggauauugacuaucccacagagccucgauuccugguggaccucacugaauuuccucgggggaagucccguuugccugggccagaacagccagucuccuacauccaaucacucaccaaccagcuguccgcccauuugcccuggcuaucgcuggauguguuuacgacguuuuaucauuuuccuguuuauccuuuugcugugccuaauauuccuccuggugcuucuggacuaccaggggauguugccagucuguccccucauuccuggaaguacuacaaccaacacggguccaugcaagacuuguaccacacccgcucaaggcaauucuauguuuccguccugcugcuguacuaagccuaccgaugggaacugcacauguaucccaauucccagcucgugggccuucgcuaaauaucugugggagugggccucugugagauuuuccugguuaucacugcucguaccuuucguucagugguucgugggacuuagucccaccgucuggcugagcgcaaucuggaugaugugguacuggggcccauccuuguauucuaucgugagcccuuuuauuccccuacugccaauauucuuuugccucuggguguacaucugaggacuagucccuguucccagagcccacuuuuuuuucuuuuuuugaaauaaaauagccugucuuucagaucucaaaggcucuuuucagagccaccaaaaaaaaaaaaaaaaaaaaaaaaaaaaaaaaaaaaaaaaaaaaaaaaaaaaaaaaaaaaaaaaagaauu

SEQ ID NO: 6678 - RNA, 1435 nt, Artificial Sequence
  mRNA Design a-1 (hSL-A64-N5) comprising derived and/or modified sequence from Pf(3D7)__XP_001351122.1__Pf-CSP (opt4)
aggagagucccgcagucggcguccagcggcucugcuuguucgugugugugucguugcaggccuuauucaagcuuaccaugaugagaaagcuggccauccugagcgugagcagcuuccuguucguggaggcccuguuccaggaguaccagugcuacggcagcagcagcaacaccagagugcugaacgagcugaacuacgacaacgccggcaccaaccuguacaacgagcuggagaugaacuacuacggcaagcaggagaacugguacagccugaagaagaacagcagaagccugggcgagaacgacgacggcaacaacgaggacaacgagaagcugagaaagcccaagcacaagaagcugaagcagcccgccgacggcaaccccgaccccaacgccaaccccaacguggaccccaacgccaaccccaacguggaccccaacgccaaccccaacguggaccccaacgccaaccccaacgccaaccccaacgccaaccccaacgccaaccccaacgccaaccccaacgccaaccccaacgccaaccccaacgccaaccccaacgccaaccccaacgccaaccccaacgccaaccccaacgccaaccccaacgccaaccccaacgccaaccccaacgccaaccccaacgccaaccccaacgccaaccccaacguggaccccaacgccaaccccaacgccaaccccaacgccaaccccaacgccaaccccaacgccaaccccaacgccaaccccaacgccaaccccaacgccaaccccaacgccaaccccaacgccaaccccaacgccaaccccaacgccaaccccaacgccaaccccaacgccaaccccaacgccaaccccaacgccaaccccaacgccaaccccaacgccaaccccaacaagaacaaccagggcaacggccagggccacaacaugcccaacgaccccaacagaaacguggacgagaacgccaacgccaacagcgccgugaagaacaacaacaacgaggagcccagcgacaagcacaucaaggaguaccugaacaagauccagaacagccugagcaccgaguggagccccugcagcgugaccugcggcaacggcauccaggugagaaucaagcccggcagcgccaacaagcccaaggacgagcuggacuacgccaacgacaucgagaagaagaucugcaagauggagaagugcagcagcguguucaacguggugaacagcagcaucggccugaucauggugcugagcuuccuguuccugaacugaggacuagucccuguucccagagcccacuuuuuuuucuuuuuuugaaauaaaauagccugucuuucagaucucaaaggcucuuuucagagccaccaaaaaaaaaaaaaaaaaaaaaaaaaaaaaaaaaaaaaaaaaaaaaaaaaaaaaaaaaaaaaaaaagaauu

SEQ ID NO: 6679 - RNA, 1366 nt, Artificial Sequence
  mRNA Design a-1 (hSL-A64-N5) comprising derived and/or modified sequence from Pf(3D7)__XP_001351122.1__Pf-CSP(1-374) (opt4)
aggagagucccgcagucggcguccagcggcucugcuuguucgugugugugucguugcaggccuuauucaagcuuaccaugaugagaaagcuggccauccugagcgugagcagcuuccuguucguggaggcccuguuccaggaguaccagugcuacggcagcagcagcaacaccagagugcugaacgagcugaacuacgacaacgccggcaccaaccuguacaacgagcuggagaugaacuacuacggcaagcaggagaacugguacagccugaagaagaacagcagaagccugggcgagaacgacgacggcaacaacgaggacaacgagaagcugagaaagcccaagcacaagaagcugaagcagcccgccgacggcaaccccgaccccaacgccaaccccaacguggaccccaacgccaaccccaacguggaccccaacgccaaccccaacguggaccccaacgccaaccccaacgccaaccccaacgccaaccccaacgccaaccccaacgccaaccccaacgccaaccccaacgccaaccccaacgccaaccccaacgccaaccccaacgccaaccccaacgccaaccccaacgccaaccccaacgccaaccccaacgccaaccccaacgccaaccccaacgccaaccccaacgccaaccccaacguggaccccaacgccaaccccaacgccaaccccaacgccaaccccaacgccaaccccaacgccaaccccaacgccaaccccaacgccaaccccaacgccaaccccaacgccaaccccaacgccaaccccaacgccaaccccaacgccaaccccaacgccaaccccaacgccaaccccaacgccaaccccaacgccaaccccaacgccaaccccaacgccaaccccaacaagaacaaccagggcaacggccagggccacaacaugcccaacgaccccaacagaaacguggacgagaacgccaacgccaacagcgccgugaagaacaacaacaacgaggagcccagcgacaagcacaucaaggaguaccugaacaagauccagaacagccugagcaccgaguggagccccugcagcgugaccugcggcaacggcauccaggugagaaucaagcccggcagcgccaacaagcccaaggacgagcuggacuacgccaacgacaucgagaagaagaucugcaagauggagaagugcugaggacuagucccuguucccagagcccacuuuuuuuucuuuuuuugaaauaaaauagccugucuuucagaucucaaaggcucuuuucagagccaccaaaaaaaaaaaaaaaaaaaaaaaaaaaaaaaaaaaaaaaaaaaaaaaaaaaaaaaaaaaaaaaaagaauu

SEQ ID NO: 6680 - RNA, 1219 nt, Artificial Sequence
  mRNA Design a-1 (hSL-A64-N5) comprising derived and/or modified sequence from Pf(3D7)__XP_001351122.1__Pf-CSP(1-325) (opt4)
aggagagucccgcagucggcguccagcggcucugcuuguucgugugugugucguugcaggccuuauucaagcuuaccaugaugagaaagcuggccauccugagcgugagcagcuuccuguucguggaggcccuguuccaggaguaccagugcuacggcagcagcagcaacaccagagugcugaacgagcugaacuacgacaacgccggcaccaaccuguacaacgagcuggagaugaacuacuacggcaagcaggagaacugguacagccugaagaagaacagcagaagccugggcgagaacgacgacggcaacaacgaggacaacgagaagcugagaaagcccaagcacaagaagcugaagcagcccgccgacggcaaccccgaccccaacgccaaccccaacguggaccccaacgccaaccccaacguggaccccaacgccaaccccaacguggaccccaacgccaaccccaacgccaaccccaacgccaaccccaacgccaaccccaacgccaaccccaacgccaaccccaacgccaaccccaacgccaaccccaacgccaaccccaacgccaaccccaacgccaaccccaacgccaaccccaacgccaaccccaacgccaaccccaacgccaaccccaacgccaaccccaacgccaaccccaacguggaccccaacgccaaccccaacgccaaccccaacgccaaccccaacgccaaccccaacgccaaccccaacgccaaccccaacgccaaccccaacgccaaccccaacgccaaccccaacgccaaccccaacgccaaccccaacgccaaccccaacgccaaccccaacgccaaccccaacgccaaccccaacgccaaccccaacgccaaccccaacgccaaccccaacaagaacaaccagggcaacggccagggccacaacaugcccaacgaccccaacagaaacguggacgagaacgccaacgccaacagcgccgugaagaacaacaacaacgaggagcccagcgacaagcacaucaaggaguaccugaacaagauccagaacugaggacuagucccuguucccagagcccacuuuuuuuucuuuuuuugaaauaaaauagccugucuuucagaucucaaaggcucuuuucagagccaccaaaaaaaaaaaaaaaaaaaaaaaaaaaaaaaaaaaaaaaaaaaaaaaaaaaaaaaaaaaaaaaaagaauu

SEQ ID NO: 6681 - RNA, 1435 nt, Artificial Sequence
  mRNA Design a-1 (hSL-A64-N5) comprising derived and/or modified sequence from Pf(3D7)__XP_001351122.1__HsALB_Pf-CSP(19-397) (opt4)
aggagagucccgcagucggcguccagcggcucugcuuguucgugugugugucguugcaggccuuauucaagcuuaccaugaagugggugaccuucaucagccugcuguuccuguucagcagcgccuacagccuguuccaggaguaccagugcuacggcagcagcagcaacaccagagugcugaacgagcugaacuacgacaacgccggcaccaaccuguacaacgagcuggagaugaacuacuacggcaagcaggagaacugguacagccugaagaagaacagcagaagccugggcgagaacgacgacggcaacaacgaggacaacgagaagcugagaaagcccaagcacaagaagcugaagcagcccgccgacggcaaccccgaccccaacgccaaccccaacguggaccccaacgccaaccccaacguggaccccaacgccaaccccaacguggaccccaacgccaaccccaacgccaaccccaacgccaaccccaacgccaaccccaacgccaaccccaacgccaaccccaacgccaaccccaacgccaaccccaacgccaaccccaacgccaaccccaacgccaaccccaacgccaaccccaacgccaaccccaacgccaaccccaacgccaaccccaacgccaaccccaacgccaaccccaacguggaccccaacgccaaccccaacgccaaccccaacgccaaccccaacgccaaccccaacgccaaccccaacgccaaccccaacgccaaccccaacgccaaccccaacgccaaccccaacgccaaccccaacgccaaccccaacgccaaccccaacgccaaccccaacgccaaccccaacgccaaccccaacgccaaccccaacgccaaccccaacgccaaccccaacaagaacaaccagggcaacggccagggccacaacaugcccaacgaccccaacagaaacguggacgagaacgccaacgccaacagcgccgugaagaacaacaacaacgaggagcccagcgacaagcacaucaaggaguaccugaacaagauccagaacagccugagcaccgaguggagccccugcagcgugaccugcggcaacggcauccaggugagaaucaagcccggcagcgccaacaagcccaaggacgagcuggacuacgccaacgacaucgagaagaagaucugcaagauggagaagugcagcagcguguucaacguggugaacagcagcaucggccugaucauggugcugagcuuccuguuccugaacugaggacuagucccuguucccagagcccacuuuuuuuucuuuuuuugaaauaaaauagccugucuuucagaucucaaaggcucuuuucagagccaccaaaaaaaaaaaaaaaaaaaaaaaaaaaaaaaaaaaaaaaaaaaaaaaaaaaaaaaaaaaaaaaaagaauu

SEQ ID NO: 6682 - RNA, 1453 nt, Artificial Sequence
  mRNA Design a-1 (hSL-A64-N5) comprising derived and/or modified sequence from Pf(3D7)__XP_001351122.1__HsIns-iso1_Pf-CSP(19-397) (opt4)
aggagagucccgcagucggcguccagcggcucugcuuguucgugugugugucguugcaggccuuauucaagcuuaccauggcccuguggaugagacugcugccccugcuggcccugcuggcccuguggggccccgaccccgccgccgcccuguuccaggaguaccagugcuacggcagcagcagcaacaccagagugcugaacgagcugaacuacgacaacgccggcaccaaccuguacaacgagcuggagaugaacuacuacggcaagcaggagaacugguacagccugaagaagaacagcagaagccugggcgagaacgacgacggcaacaacgaggacaacgagaagcugagaaagcccaagcacaagaagcugaagcagcccgccgacggcaaccccgaccccaacgccaaccccaacguggaccccaacgccaaccccaacguggaccccaacgccaaccccaacguggaccccaacgccaaccccaacgccaaccccaacgccaaccccaacgccaaccccaacgccaaccccaacgccaaccccaacgccaaccccaacgccaaccccaacgccaaccccaacgccaaccccaacgccaaccccaacgccaaccccaacgccaaccccaacgccaaccccaacgccaaccccaacgccaaccccaacgccaaccccaacguggaccccaacgccaaccccaacgccaaccccaacgccaaccccaacgccaaccccaacgccaaccccaacgccaaccccaacgccaaccccaacgccaaccccaacgccaaccccaacgccaaccccaacgccaaccccaacgccaaccccaacgccaaccccaacgccaaccccaacgccaaccccaacgccaaccccaacgccaaccccaacgccaaccccaacaagaacaaccagggcaacggccagggccacaacaugcccaacgaccccaacagaaacguggacgagaacgccaacgccaacagcgccgugaagaacaacaacaacgaggagcccagcgacaagcacaucaaggaguaccugaacaagauccagaacagccugagcaccgaguggagccccugcagcgugaccugcggcaacggcauccaggugagaaucaagcccggcagcgccaacaagcccaaggacgagcuggacuacgccaacgacaucgagaagaagaucugcaagauggagaagugcagcagcguguucaacguggugaacagcagcaucggccugaucauggugcugagcuuccuguuccugaacugaggacuagucccuguucccagagcccacuuuuuuuucuuuuuuugaaauaaaauagccugucuuucagaucucaaaggcucuuuucagagccaccaaaaaaaaaaaaaaaaaaaaaaaaaaaaaaaaaaaaaaaaaaaaaaaaaaaaaaaaaaaaaaaaagaauu

SEQ ID NO: 6683 - RNA, 1432 nt, Artificial Sequence
  mRNA Design a-1 (hSL-A64-N5) comprising derived and/or modified sequence from Pf(3D7)__XP_001351122.1__HsSPARC_Pf-CSP(19-397) (opt4)
aggagagucccgcagucggcguccagcggcucugcuuguucgugugugugucguugcaggccuuauucaagcuuaccaugagagccuggaucuucuuccugcugugccuggccggcagagcccuggcccuguuccaggaguaccagugcuacggcagcagcagcaacaccagagugcugaacgagcugaacuacgacaacgccggcaccaaccuguacaacgagcuggagaugaacuacuacggcaagcaggagaacugguacagccugaagaagaacagcagaagccugggcgagaacgacgacggcaacaacgaggacaacgagaagcugagaaagcccaagcacaagaagcugaagcagcccgccgacggcaaccccgaccccaacgccaaccccaacguggaccccaacgccaaccccaacguggaccccaacgccaaccccaacguggaccccaacgccaaccccaacgccaaccccaacgccaaccccaacgccaaccccaacgccaaccccaacgccaaccccaacgccaaccccaacgccaaccccaacgccaaccccaacgccaaccccaacgccaaccccaacgccaaccccaacgccaaccccaacgccaaccccaacgccaaccccaacgccaaccccaacgccaaccccaacguggaccccaacgccaaccccaacgccaaccccaacgccaaccccaacgccaaccccaacgccaaccccaacgccaaccccaacgccaaccccaacgccaaccccaacgccaaccccaacgccaaccccaacgccaaccccaacgccaaccccaacgccaaccccaacgccaaccccaacgccaaccccaacgccaaccccaacgccaaccccaacgccaaccccaacaagaacaaccagggcaacggccagggccacaacaugcccaacgaccccaacagaaacguggacgagaacgccaacgccaacagcgccgugaagaacaacaacaacgaggagcccagcgacaagcacaucaaggaguaccugaacaagauccagaacagccugagcaccgaguggagccccugcagcgugaccugcggcaacggcauccaggugagaaucaagcccggcagcgccaacaagcccaaggacgagcuggacuacgccaacgacaucgagaagaagaucugcaagauggagaagugcagcagcguguucaacguggugaacagcagcaucggccugaucauggugcugagcuuccuguuccugaacugaggacuagucccuguucccagagcccacuuuuuuuucuuuuuuugaaauaaaauagccugucuuucagaucucaaaggcucuuuucagagccaccaaaaaaaaaaaaaaaaaaaaaaaaaaaaaaaaaaaaaaaaaaaaaaaaaaaaaaaaaaaaaaaaagaauu

SEQ ID NO: 6684 - RNA, 1435 nt, Artificial Sequence
  mRNA Design a-1 (hSL-A64-N5) comprising derived and/or modified sequence from Pf(3D7)__XP_001351122.1__IgE_Pf-CSP(19-397) (opt4)
aggagagucccgcagucggcguccagcggcucugcuuguucgugugugugucguugcaggccuuauucaagcuuaccauggacuggaccuggauccuguuccugguggccgccgccaccagagugcacagccuguuccaggaguaccagugcuacggcagcagcagcaacaccagagugcugaacgagcugaacuacgacaacgccggcaccaaccuguacaacgagcuggagaugaacuacuacggcaagcaggagaacugguacagccugaagaagaacagcagaagccugggcgagaacgacgacggcaacaacgaggacaacgagaagcugagaaagcccaagcacaagaagcugaagcagcccgccgacggcaaccccgaccccaacgccaaccccaacguggaccccaacgccaaccccaacguggaccccaacgccaaccccaacguggaccccaacgccaaccccaacgccaaccccaacgccaaccccaacgccaaccccaacgccaaccccaacgccaaccccaacgccaaccccaacgccaaccccaacgccaaccccaacgccaaccccaacgccaaccccaacgccaaccccaacgccaaccccaacgccaaccccaacgccaaccccaacgccaaccccaacgccaaccccaacguggaccccaacgccaaccccaacgccaaccccaacgccaaccccaacgccaaccccaacgccaaccccaacgccaaccccaacgccaaccccaacgccaaccccaacgccaaccccaacgccaaccccaacgccaaccccaacgccaaccccaacgccaaccccaacgccaaccccaacgccaaccccaacgccaaccccaacgccaaccccaacgccaaccccaacaagaacaaccagggcaacggccagggccacaacaugcccaacgaccccaacagaaacguggacgagaacgccaacgccaacagcgccgugaagaacaacaacaacgaggagcccagcgacaagcacaucaaggaguaccugaacaagauccagaacagccugagcaccgaguggagccccugcagcgugaccugcggcaacggcauccaggugagaaucaagcccggcagcgccaacaagcccaaggacgagcuggacuacgccaacgacaucgagaagaagaucugcaagauggagaagugcagcagcguguucaacguggugaacagcagcaucggccugaucauggugcugagcuuccuguuccugaacugaggacuagucccuguucccagagcccacuuuuuuuucuuuuuuugaaauaaaauagccugucuuucagaucucaaaggcucuuuucagagccaccaaaaaaaaaaaaaaaaaaaaaaaaaaaaaaaaaaaaaaaaaaaaaaaaaaaaaaaaaaaaaaaaagaauu

SEQ ID NO: 6685 - RNA, 1600 nt, Artificial Sequence
  mRNA Design a-1 (hSL-A64-N5) comprising derived and/or modified sequence from Pf(3D7)__XP_001351122.1__Pf-CSP_L(G4SG4)_TM domain HA (opt4)
aggagagucccgcagucggcguccagcggcucugcuuguucgugugugugucguugcaggccuuauucaagcuuaccaugaugagaaagcuggccauccugagcgugagcagcuuccuguucguggaggcccuguuccaggaguaccagugcuacggcagcagcagcaacaccagagugcugaacgagcugaacuacgacaacgccggcaccaaccuguacaacgagcuggagaugaacuacuacggcaagcaggagaacugguacagccugaagaagaacagcagaagccugggcgagaacgacgacggcaacaacgaggacaacgagaagcugagaaagcccaagcacaagaagcugaagcagcccgccgacggcaaccccgaccccaacgccaaccccaacguggaccccaacgccaaccccaacguggaccccaacgccaaccccaacguggaccccaacgccaaccccaacgccaaccccaacgccaaccccaacgccaaccccaacgccaaccccaacgccaaccccaacgccaaccccaacgccaaccccaacgccaaccccaacgccaaccccaacgccaaccccaacgccaaccccaacgccaaccccaacgccaaccccaacgccaaccccaacgccaaccccaacgccaaccccaacguggaccccaacgccaaccccaacgccaaccccaacgccaaccccaacgccaaccccaacgccaaccccaacgccaaccccaacgccaaccccaacgccaaccccaacgccaaccccaacgccaaccccaacgccaaccccaacgccaaccccaacgccaaccccaacgccaaccccaacgccaaccccaacgccaaccccaacgccaaccccaacgccaaccccaacaagaacaaccagggcaacggccagggccacaacaugcccaacgaccccaacagaaacguggacgagaacgccaacgccaacagcgccgugaagaacaacaacaacgaggagcccagcgacaagcacaucaaggaguaccugaacaagauccagaacagccugagcaccgaguggagccccugcagcgugaccugcggcaacggcauccaggugagaaucaagcccggcagcgccaacaagcccaaggacgagcuggacuacgccaacgacaucgagaagaagaucugcaagauggagaagugcagcagcguguucaacguggugaacagcagcaucggccugaucauggugcugagcuuccuguuccugaacggcggcggcggcagcggcggcggcggcaagcuggagagcaccagaaucuaccagauccuggccaucuacagcaccguggccagcagccuggugcugguggugagccugggcgccaucagcuucuggaugugcagcaacggcagccugcagugcagaaucugcaucugaggacuagucccuguucccagagcccacuuuuuuuucuuuuuuugaaauaaaauagccugucuuucagaucucaaaggcucuuuucagagccaccaaaaaaaaaaaaaaaaaaaaaaaaaaaaaaaaaaaaaaaaaaaaaaaaaaaaaaaaaaaaaaaaagaauu

SEQ ID NO: 6686 - RNA, 1474 nt, Artificial Sequence
  mRNA Design a-1 (hSL-A64-N5) comprising derived and/or modified sequence from Pf(3D7)__XP_001351122.1__Pf-CSP(199-377)_L(PVTN)_HBsAg (opt4)
aggagagucccgcagucggcguccagcggcucugcuuguucgugugugugucguugcaggccuuauucaagcuuaccauggaccccaacgccaaccccaacgccaaccccaacgccaaccccaacgccaaccccaacgccaaccccaacgccaaccccaacgccaaccccaacgccaaccccaacgccaaccccaacgccaaccccaacgccaaccccaacgccaaccccaacgccaaccccaacgccaaccccaacgccaaccccaacgccaaccccaacgccaaccccaacgccaaccccaacaagaacaaccagggcaacggccagggccacaacaugcccaacgaccccaacagaaacguggacgagaacgccaacgccaacagcgccgugaagaacaacaacaacgaggagcccagcgacaagcacaucaaggaguaccugaacaagauccagaacagccugagcaccgaguggagccccugcagcgugaccugcggcaacggcauccaggugagaaucaagcccggcagcgccaacaagcccaaggacgagcuggacuacgccaacgacaucgagaagaagaucugcaagauggagaagugcagcagcgugcccgugaccaacauggagaacaucaccagcggcuuccugggcccccugcuggugcugcaggccggcuucuuccugcugaccagaauccugaccaucccccagagccuggacagcugguggaccagccugaacuuccugggcggcagccccgugugccugggccagaacagccagagccccaccagcaaccacagccccaccagcugcccccccaucugccccggcuacagauggaugugccugagaagauucaucaucuuccuguucauccugcugcugugccugaucuuccugcuggugcugcuggacuaccagggcaugcugcccgugugcccccugauccccggcagcaccaccaccaacaccggccccugcaagaccugcaccacccccgcccagggcaacagcauguuccccagcugcugcugcaccaagcccaccgacggcaacugcaccugcauccccauccccagcagcugggccuucgccaaguaccugugggagugggccagcgugagauucagcuggcugagccugcuggugcccuucgugcagugguucgugggccugagccccaccguguggcugagcgccaucuggaugaugugguacuggggccccagccuguacagcaucgugagccccuucaucccccugcugcccaucuucuucugccuguggguguacaucugaggacuagucccuguucccagagcccacuuuuuuuucuuuuuuugaaauaaaauagccugucuuucagaucucaaaggcucuuuucagagccaccaaaaaaaaaaaaaaaaaaaaaaaaaaaaaaaaaaaaaaaaaaaaaaaaaaaaaaaaaaaaaaaaagaauu

SEQ ID NO: 6687 - RNA, 1516 nt, Artificial Sequence
  mRNA Design a-1 (hSL-A64-N5) comprising derived and/or modified sequence from Pf(3D7)__XP_001351122.1__Pf-CSP(199-387)_L(PVTN)_HBsAg (opt4)
aggagagucccgcagucggcguccagcggcucugcuuguucgugugugugucguugcaggccuuauucaagcuuaccaugauggcccccgaccccaacgccaaccccaacgccaaccccaacgccaaccccaacgccaaccccaacgccaaccccaacgccaaccccaacgccaaccccaacgccaaccccaacgccaaccccaacgccaaccccaacgccaaccccaacgccaaccccaacgccaaccccaacgccaaccccaacgccaaccccaacgccaaccccaacgccaaccccaacgccaaccccaacaagaacaaccagggcaacggccagggccacaacaugcccaacgaccccaacagaaacguggacgagaacgccaacgccaacagcgccgugaagaacaacaacaacgaggagcccagcgacaagcacaucaaggaguaccugaacaagauccagaacagccugagcaccgaguggagccccugcagcgugaccugcggcaacggcauccaggugagaaucaagcccggcagcgccaacaagcccaaggacgagcuggacuacgccaacgacaucgagaagaagaucugcaagauggagaagugcagcagcguguucaacguggugaacagcagcaucggccugggccccgugaccaacauggagaacaucaccagcggcuuccugggcccccugcuggugcugcaggccggcuucuuccugcugaccagaauccugaccaucccccagagccuggacagcugguggaccagccugaacuuccugggcggcagccccgugugccugggccagaacagccagagccccaccagcaaccacagccccaccagcugcccccccaucugccccggcuacagauggaugugccugagaagauucaucaucuuccuguucauccugcugcugugccugaucuuccugcuggugcugcuggacuaccagggcaugcugcccgugugcccccugauccccggcagcaccaccaccaacaccggccccugcaagaccugcaccacccccgcccagggcaacagcauguuccccagcugcugcugcaccaagcccaccgacggcaacugcaccugcauccccauccccagcagcugggccuucgccaaguaccugugggagugggccagcgugagauucagcuggcugagccugcuggugcccuucgugcagugguucgugggccugagccccaccguguggcugagcgccaucuggaugaugugguacuggggccccagccuguacagcaucgugagccccuucaucccccugcugcccaucuucuucugccuguggguguacaucugaggacuagucccuguucccagagcccacuuuuuuuucuuuuuuugaaauaaaauagccugucuuucagaucucaaaggcucuuuucagagccaccaaaaaaaaaaaaaaaaaaaaaaaaaaaaaaaaaaaaaaaaaaaaaaaaaaaaaaaaaaaaaaaaagaauu

SEQ ID NO: 6688 - RNA, 700 nt, Artificial Sequence
  mRNA Design a-1 (hSL-A64-N5) comprising derived and/or modified sequence from Pf(3D7)__XP_001351122.1__HsALB_Pf-CSP(19-152) (opt4)
aggagagucccgcagucggcguccagcggcucugcuuguucgugugugugucguugcaggccuuauucaagcuuaccaugaagugggugaccuucaucagccugcuguuccuguucagcagcgccuacagccuguuccaggaguaccagugcuacggcagcagcagcaacaccagagugcugaacgagcugaacuacgacaacgccggcaccaaccuguacaacgagcuggagaugaacuacuacggcaagcaggagaacugguacagccugaagaagaacagcagaagccugggcgagaacgacgacggcaacaacgaggacaacgagaagcugagaaagcccaagcacaagaagcugaagcagcccgccgacggcaaccccgaccccaacgccaaccccaacguggaccccaacgccaaccccaacguggaccccaacgccaaccccaacguggaccccaacgccaaccccaacgccaaccccaacgccaaccccaacgccaaccccaacgccaaccccaacgccaaccccugaggacuagucccuguucccagagcccacuuuuuuuucuuuuuuugaaauaaaauagccugucuuucagaucucaaaggcucuuuucagagccaccaaaaaaaaaaaaaaaaaaaaaaaaaaaaaaaaaaaaaaaaaaaaaaaaaaaaaaaaaaaaaaaaagaauu

SEQ ID NO: 6689 - RNA, 820 nt, Artificial Sequence
  mRNA Design a-1 (hSL-A64-N5) comprising derived and/or modified sequence from Pf(3D7)__XP_001351122.1__HsALB_Pf-CSP(19-192) (opt4)
aggagagucccgcagucggcguccagcggcucugcuuguucgugugugugucguugcaggccuuauucaagcuuaccaugaagugggugaccuucaucagccugcuguuccuguucagcagcgccuacagccuguuccaggaguaccagugcuacggcagcagcagcaacaccagagugcugaacgagcugaacuacgacaacgccggcaccaaccuguacaacgagcuggagaugaacuacuacggcaagcaggagaacugguacagccugaagaagaacagcagaagccugggcgagaacgacgacggcaacaacgaggacaacgagaagcugagaaagcccaagcacaagaagcugaagcagcccgccgacggcaaccccgaccccaacgccaaccccaacguggaccccaacgccaaccccaacguggaccccaacgccaaccccaacguggaccccaacgccaaccccaacgccaaccccaacgccaaccccaacgccaaccccaacgccaaccccaacgccaaccccaacgccaaccccaacgccaaccccaacgccaaccccaacgccaaccccaacgccaaccccaacgccaaccccaacgccaaccccaacgccaaccccaacgccaaccccaacgccaaccccugaggacuagucccuguucccagagcccacuuuuuuuucuuuuuuugaaauaaaauagccugucuuucagaucucaaaggcucuuuucagagccaccaaaaaaaaaaaaaaaaaaaaaaaaaaaaaaaaaaaaaaaaaaaaaaaaaaaaaaaaaaaaaaaaagaauu

SEQ ID NO: 6690 - RNA, 1060 nt, Artificial Sequence
  mRNA Design a-1 (hSL-A64-N5) comprising derived and/or modified sequence from Pf(3D7)__XP_001351122.1__HsALB_Pf-CSP(19-272) (opt4)
aggagagucccgcagucggcguccagcggcucugcuuguucgugugugugucguugcaggccuuauucaagcuuaccaugaagugggugaccuucaucagccugcuguuccuguucagcagcgccuacagccuguuccaggaguaccagugcuacggcagcagcagcaacaccagagugcugaacgagcugaacuacgacaacgccggcaccaaccuguacaacgagcuggagaugaacuacuacggcaagcaggagaacugguacagccugaagaagaacagcagaagccugggcgagaacgacgacggcaacaacgaggacaacgagaagcugagaaagcccaagcacaagaagcugaagcagcccgccgacggcaaccccgaccccaacgccaaccccaacguggaccccaacgccaaccccaacguggaccccaacgccaaccccaacguggaccccaacgccaaccccaacgccaaccccaacgccaaccccaacgccaaccccaacgccaaccccaacgccaaccccaacgccaaccccaacgccaaccccaacgccaaccccaacgccaaccccaacgccaaccccaacgccaaccccaacgccaaccccaacgccaaccccaacgccaaccccaacgccaaccccaacgccaaccccaacguggaccccaacgccaaccccaacgccaaccccaacgccaaccccaacgccaaccccaacgccaaccccaacgccaaccccaacgccaaccccaacgccaaccccaacgccaaccccaacgccaaccccaacgccaaccccaacgccaaccccaacgccaaccccaacgccaaccccaacgccaaccccaacgccaaccccaacgccaaccccaacgccaaccccugaggacuagucccuguucccagagcccacuuuuuuuucuuuuuuugaaauaaaauagccugucuuucagaucucaaaggcucuuuucagagccaccaaaaaaaaaaaaaaaaaaaaaaaaaaaaaaaaaaaaaaaaaaaaaaaaaaaaaaaaaaaaaaaaagaauu

SEQ ID NO: 6691 - RNA, 1222 nt, Artificial Sequence
  mRNA Design a-1 (hSL-A64-N5) comprising derived and/or modified sequence from Pf(3D7)__XP_001351122.1__HsALB_Pf-CSP(19-272)_L(AAY)_Pf-CSP(310-3 27)_L(AAY)_Pf-CSP(346-375) (opt4)
aggagagucccgcagucggcguccagcggcucugcuuguucgugugugugucguugcaggccuuauucaagcuuaccaugaagugggugaccuucaucagccugcuguuccuguucagcagcgccuacagccuguuccaggaguaccagugcuacggcagcagcagcaacaccagagugcugaacgagcugaacuacgacaacgccggcaccaaccuguacaacgagcuggagaugaacuacuacggcaagcaggagaacugguacagccugaagaagaacagcagaagccugggcgagaacgacgacggcaacaacgaggacaacgagaagcugagaaagcccaagcacaagaagcugaagcagcccgccgacggcaaccccgaccccaacgccaaccccaacguggaccccaacgccaaccccaacguggaccccaacgccaaccccaacguggaccccaacgccaaccccaacgccaaccccaacgccaaccccaacgccaaccccaacgccaaccccaacgccaaccccaacgccaaccccaacgccaaccccaacgccaaccccaacgccaaccccaacgccaaccccaacgccaaccccaacgccaaccccaacgccaaccccaacgccaaccccaacgccaaccccaacgccaaccccaacguggaccccaacgccaaccccaacgccaaccccaacgccaaccccaacgccaaccccaacgccaaccccaacgccaaccccaacgccaaccccaacgccaaccccaacgccaaccccaacgccaaccccaacgccaaccccaacgccaaccccaacgccaaccccaacgccaaccccaacgccaaccccaacgccaaccccaacgccaaccccaacgccaaccccgccgccuacgagcccagcgacaagcacaucaaggaguaccugaacaagauccagaacagccuggccgccuacaucaagcccggcagcgccaacaagcccaaggacgagcuggacuacgccaacgacaucgagaagaagaucugcaagauggagaagugcagcugaggacuagucccuguucccagagcccacuuuuuuuucuuuuuuugaaauaaaauagccugucuuucagaucucaaaggcucuuuucagagccaccaaaaaaaaaaaaaaaaaaaaaaaaaaaaaaaaaaaaaaaaaaaaaaaaaaaaaaaaaaaaaaaaagaauu

SEQ ID NO: 6692 - RNA, 1183 nt, Artificial Sequence
  mRNA Design a-1 (hSL-A64-N5) comprising derived and/or modified sequence from Pf(3D7)__XP_001351122.1__HsALB_Pf-CSP(19-272)_L(AAY)_Pf-CSP(346-3 65)_L(AAY)_P2 (opt4)
aggagagucccgcagucggcguccagcggcucugcuuguucgugugugugucguugcaggccuuauucaagcuuaccaugaagugggugaccuucaucagccugcuguuccuguucagcagcgccuacagccuguuccaggaguaccagugcuacggcagcagcagcaacaccagagugcugaacgagcugaacuacgacaacgccggcaccaaccuguacaacgagcuggagaugaacuacuacggcaagcaggagaacugguacagccugaagaagaacagcagaagccugggcgagaacgacgacggcaacaacgaggacaacgagaagcugagaaagcccaagcacaagaagcugaagcagcccgccgacggcaaccccgaccccaacgccaaccccaacguggaccccaacgccaaccccaacguggaccccaacgccaaccccaacguggaccccaacgccaaccccaacgccaaccccaacgccaaccccaacgccaaccccaacgccaaccccaacgccaaccccaacgccaaccccaacgccaaccccaacgccaaccccaacgccaaccccaacgccaaccccaacgccaaccccaacgccaaccccaacgccaaccccaacgccaaccccaacgccaaccccaacgccaaccccaacguggaccccaacgccaaccccaacgccaaccccaacgccaaccccaacgccaaccccaacgccaaccccaacgccaaccccaacgccaaccccaacgccaaccccaacgccaaccccaacgccaaccccaacgccaaccccaacgccaaccccaacgccaaccccaacgccaaccccaacgccaaccccaacgccaaccccaacgccaaccccaacgccaaccccgccgccuacaucaagcccggcagcgccaacaagcccaaggacgagcuggacuacgccaacgacaucgaggccgccuaccaguacaucaaggccaacagcaaguucaucggcaucaccgagcugugaggacuagucccuguucccagagcccacuuuuuuuucuuuuuuugaaauaaaauagccugucuuucagaucucaaaggcucuuuucagagccaccaaaaaaaaaaaaaaaaaaaaaaaaaaaaaaaaaaaaaaaaaaaaaaaaaaaaaaaaaaaaaaaaagaauu

SEQ ID NO: 6693 - RNA, 1177 nt, Artificial Sequence
  mRNA Design a-1 (hSL-A64-N5) comprising derived and/or modified sequence from Pf(3D7)__XP_001351122.1__HsALB_Pf-CSP(19-272)_L(AAY)_Pf-CSP(346-3 65)_L(AAY)_PADRE (opt4)
aggagagucccgcagucggcguccagcggcucugcuuguucgugugugugucguugcaggccuuauucaagcuuaccaugaagugggugaccuucaucagccugcuguuccuguucagcagcgccuacagccuguuccaggaguaccagugcuacggcagcagcagcaacaccagagugcugaacgagcugaacuacgacaacgccggcaccaaccuguacaacgagcuggagaugaacuacuacggcaagcaggagaacugguacagccugaagaagaacagcagaagccugggcgagaacgacgacggcaacaacgaggacaacgagaagcugagaaagcccaagcacaagaagcugaagcagcccgccgacggcaaccccgaccccaacgccaaccccaacguggaccccaacgccaaccccaacguggaccccaacgccaaccccaacguggaccccaacgccaaccccaacgccaaccccaacgccaaccccaacgccaaccccaacgccaaccccaacgccaaccccaacgccaaccccaacgccaaccccaacgccaaccccaacgccaaccccaacgccaaccccaacgccaaccccaacgccaaccccaacgccaaccccaacgccaaccccaacgccaaccccaacgccaaccccaacguggaccccaacgccaaccccaacgccaaccccaacgccaaccccaacgccaaccccaacgccaaccccaacgccaaccccaacgccaaccccaacgccaaccccaacgccaaccccaacgccaaccccaacgccaaccccaacgccaaccccaacgccaaccccaacgccaaccccaacgccaaccccaacgccaaccccaacgccaaccccaacgccaaccccgccgccuacaucaagcccggcagcgccaacaagcccaaggacgagcuggacuacgccaacgacaucgaggccgccuacgccaaguucguggccgccuggacccugaaggccgccgccugaggacuagucccuguucccagagcccacuuuuuuuucuuuuuuugaaauaaaauagccugucuuucagaucucaaaggcucuuuucagagccaccaaaaaaaaaaaaaaaaaaaaaaaaaaaaaaaaaaaaaaaaaaaaaaaaaaaaaaaaaaaaaaaaagaauu

SEQ ID NO: 6694 - RNA, 1234 nt, Artificial Sequence
  mRNA Design a-1 (hSL-A64-N5) comprising derived and/or modified sequence from Pf(3D7)__XP_001351122.1__HsALB_Pf-CSP(19-272)_L(G4S)_Pf-CSP(310-3 27)_L(G4S)_Pf-CSP(346-375) (opt4)
aggagagucccgcagucggcguccagcggcucugcuuguucgugugugugucguugcaggccuuauucaagcuuaccaugaagugggugaccuucaucagccugcuguuccuguucagcagcgccuacagccuguuccaggaguaccagugcuacggcagcagcagcaacaccagagugcugaacgagcugaacuacgacaacgccggcaccaaccuguacaacgagcuggagaugaacuacuacggcaagcaggagaacugguacagccugaagaagaacagcagaagccugggcgagaacgacgacggcaacaacgaggacaacgagaagcugagaaagcccaagcacaagaagcugaagcagcccgccgacggcaaccccgaccccaacgccaaccccaacguggaccccaacgccaaccccaacguggaccccaacgccaaccccaacguggaccccaacgccaaccccaacgccaaccccaacgccaaccccaacgccaaccccaacgccaaccccaacgccaaccccaacgccaaccccaacgccaaccccaacgccaaccccaacgccaaccccaacgccaaccccaacgccaaccccaacgccaaccccaacgccaaccccaacgccaaccccaacgccaaccccaacgccaaccccaacguggaccccaacgccaaccccaacgccaaccccaacgccaaccccaacgccaaccccaacgccaaccccaacgccaaccccaacgccaaccccaacgccaaccccaacgccaaccccaacgccaaccccaacgccaaccccaacgccaaccccaacgccaaccccaacgccaaccccaacgccaaccccaacgccaaccccaacgccaaccccaacgccaaccccggcggcggcggcagcgagcccagcgacaagcacaucaaggaguaccugaacaagauccagaacagccugggcggcggcggcagcaucaagcccggcagcgccaacaagcccaaggacgagcuggacuacgccaacgacaucgagaagaagaucugcaagauggagaagugcagcugaggacuagucccuguucccagagcccacuuuuuuuucuuuuuuugaaauaaaauagccugucuuucagaucucaaaggcucuuuucagagccaccaaaaaaaaaaaaaaaaaaaaaaaaaaaaaaaaaaaaaaaaaaaaaaaaaaaaaaaaaaaaaaaaagaauu

SEQ ID NO: 6695 - RNA, 1219 nt, Artificial Sequence
  mRNA Design a-1 (hSL-A64-N5) comprising derived and/or modified sequence from Pf(3D7)__XP_001351122.1__HsALB_Pf-CSP(19-272)_L(G4S)_Pf-CSP(310-3 27)_Pf-CSP(346-375) (opt4)
aggagagucccgcagucggcguccagcggcucugcuuguucgugugugugucguugcaggccuuauucaagcuuaccaugaagugggugaccuucaucagccugcuguuccuguucagcagcgccuacagccuguuccaggaguaccagugcuacggcagcagcagcaacaccagagugcugaacgagcugaacuacgacaacgccggcaccaaccuguacaacgagcuggagaugaacuacuacggcaagcaggagaacugguacagccugaagaagaacagcagaagccugggcgagaacgacgacggcaacaacgaggacaacgagaagcugagaaagcccaagcacaagaagcugaagcagcccgccgacggcaaccccgaccccaacgccaaccccaacguggaccccaacgccaaccccaacguggaccccaacgccaaccccaacguggaccccaacgccaaccccaacgccaaccccaacgccaaccccaacgccaaccccaacgccaaccccaacgccaaccccaacgccaaccccaacgccaaccccaacgccaaccccaacgccaaccccaacgccaaccccaacgccaaccccaacgccaaccccaacgccaaccccaacgccaaccccaacgccaaccccaacgccaaccccaacguggaccccaacgccaaccccaacgccaaccccaacgccaaccccaacgccaaccccaacgccaaccccaacgccaaccccaacgccaaccccaacgccaaccccaacgccaaccccaacgccaaccccaacgccaaccccaacgccaaccccaacgccaaccccaacgccaaccccaacgccaaccccaacgccaaccccaacgccaaccccaacgccaaccccggcggcggcggcagcgagcccagcgacaagcacaucaaggaguaccugaacaagauccagaacagccugaucaagcccggcagcgccaacaagcccaaggacgagcuggacuacgccaacgacaucgagaagaagaucugcaagauggagaagugcagcugaggacuagucccuguucccagagcccacuuuuuuuucuuuuuuugaaauaaaauagccugucuuucagaucucaaaggcucuuuucagagccaccaaaaaaaaaaaaaaaaaaaaaaaaaaaaaaaaaaaaaaaaaaaaaaaaaaaaaaaaaaaaaaaaagaauu

SEQ ID NO: 6696 - RNA, 1219 nt, Artificial Sequence
  mRNA Design a-1 (hSL-A64-N5) comprising derived and/or modified sequence from Pf(3D7)__XP_001351122.1__HsALB_Pf-CSP(19-325) (opt4)
aggagagucccgcagucggcguccagcggcucugcuuguucgugugugugucguugcaggccuuauucaagcuuaccaugaagugggugaccuucaucagccugcuguuccuguucagcagcgccuacagccuguuccaggaguaccagugcuacggcagcagcagcaacaccagagugcugaacgagcugaacuacgacaacgccggcaccaaccuguacaacgagcuggagaugaacuacuacggcaagcaggagaacugguacagccugaagaagaacagcagaagccugggcgagaacgacgacggcaacaacgaggacaacgagaagcugagaaagcccaagcacaagaagcugaagcagcccgccgacggcaaccccgaccccaacgccaaccccaacguggaccccaacgccaaccccaacguggaccccaacgccaaccccaacguggaccccaacgccaaccccaacgccaaccccaacgccaaccccaacgccaaccccaacgccaaccccaacgccaaccccaacgccaaccccaacgccaaccccaacgccaaccccaacgccaaccccaacgccaaccccaacgccaaccccaacgccaaccccaacgccaaccccaacgccaaccccaacgccaaccccaacgccaaccccaacguggaccccaacgccaaccccaacgccaaccccaacgccaaccccaacgccaaccccaacgccaaccccaacgccaaccccaacgccaaccccaacgccaaccccaacgccaaccccaacgccaaccccaacgccaaccccaacgccaaccccaacgccaaccccaacgccaaccccaacgccaaccccaacgccaaccccaacgccaaccccaacgccaaccccaacaagaacaaccagggcaacggccagggccacaacaugcccaacgaccccaacagaaacguggacgagaacgccaacgccaacagcgccgugaagaacaacaacaacgaggagcccagcgacaagcacaucaaggaguaccugaacaagauccagaacugaggacuagucccuguucccagagcccacuuuuuuuucuuuuuuugaaauaaaauagccugucuuucagaucucaaaggcucuuuucagagccaccaaaaaaaaaaaaaaaaaaaaaaaaaaaaaaaaaaaaaaaaaaaaaaaaaaaaaaaaaaaaaaaaagaauu

SEQ ID NO: 6697 - RNA, 1396 nt, Artificial Sequence
  mRNA Design a-1 (hSL-A64-N5) comprising derived and/or modified sequence from Pf(3D7)__XP_001351122.1__HsALB_Pf-CSP(19-384) (opt4)
aggagagucccgcagucggcguccagcggcucugcuuguucgugugugugucguugcaggccuuauucaagcuuaccaugaagugggugaccuucaucagccugcuguuccuguucagcagcgccuacagccuguuccaggaguaccagugcuacggcagcagcagcaacaccagagugcugaacgagcugaacuacgacaacgccggcaccaaccuguacaacgagcuggagaugaacuacuacggcaagcaggagaacugguacagccugaagaagaacagcagaagccugggcgagaacgacgacggcaacaacgaggacaacgagaagcugagaaagcccaagcacaagaagcugaagcagcccgccgacggcaaccccgaccccaacgccaaccccaacguggaccccaacgccaaccccaacguggaccccaacgccaaccccaacguggaccccaacgccaaccccaacgccaaccccaacgccaaccccaacgccaaccccaacgccaaccccaacgccaaccccaacgccaaccccaacgccaaccccaacgccaaccccaacgccaaccccaacgccaaccccaacgccaaccccaacgccaaccccaacgccaaccccaacgccaaccccaacgccaaccccaacgccaaccccaacguggaccccaacgccaaccccaacgccaaccccaacgccaaccccaacgccaaccccaacgccaaccccaacgccaaccccaacgccaaccccaacgccaaccccaacgccaaccccaacgccaaccccaacgccaaccccaacgccaaccccaacgccaaccccaacgccaaccccaacgccaaccccaacgccaaccccaacgccaaccccaacgccaaccccaacaagaacaaccagggcaacggccagggccacaacaugcccaacgaccccaacagaaacguggacgagaacgccaacgccaacagcgccgugaagaacaacaacaacgaggagcccagcgacaagcacaucaaggaguaccugaacaagauccagaacagccugagcaccgaguggagccccugcagcgugaccugcggcaacggcauccaggugagaaucaagcccggcagcgccaacaagcccaaggacgagcuggacuacgccaacgacaucgagaagaagaucugcaagauggagaagugcagcagcguguucaacguggugaacagcagcugaggacuagucccuguucccagagcccacuuuuuuuucuuuuuuugaaauaaaauagccugucuuucagaucucaaaggcucuuuucagagccaccaaaaaaaaaaaaaaaaaaaaaaaaaaaaaaaaaaaaaaaaaaaaaaaaaaaaaaaaaaaaaaaaagaauu

SEQ ID NO: 6698 - RNA, 1534 nt, Artificial Sequence
  mRNA Design a-1 (hSL-A64-N5) comprising derived and/or modified sequence from Pf(3D7)__XP_001351122.1__HsALB_Pf-CSP(19-384)_TM domain HA (opt4)
aggagagucccgcagucggcguccagcggcucugcuuguucgugugugugucguugcaggccuuauucaagcuuaccaugaagugggugaccuucaucagccugcuguuccuguucagcagcgccuacagccuguuccaggaguaccagugcuacggcagcagcagcaacaccagagugcugaacgagcugaacuacgacaacgccggcaccaaccuguacaacgagcuggagaugaacuacuacggcaagcaggagaacugguacagccugaagaagaacagcagaagccugggcgagaacgacgacggcaacaacgaggacaacgagaagcugagaaagcccaagcacaagaagcugaagcagcccgccgacggcaaccccgaccccaacgccaaccccaacguggaccccaacgccaaccccaacguggaccccaacgccaaccccaacguggaccccaacgccaaccccaacgccaaccccaacgccaaccccaacgccaaccccaacgccaaccccaacgccaaccccaacgccaaccccaacgccaaccccaacgccaaccccaacgccaaccccaacgccaaccccaacgccaaccccaacgccaaccccaacgccaaccccaacgccaaccccaacgccaaccccaacgccaaccccaacguggaccccaacgccaaccccaacgccaaccccaacgccaaccccaacgccaaccccaacgccaaccccaacgccaaccccaacgccaaccccaacgccaaccccaacgccaaccccaacgccaaccccaacgccaaccccaacgccaaccccaacgccaaccccaacgccaaccccaacgccaaccccaacgccaaccccaacgccaaccccaacgccaaccccaacaagaacaaccagggcaacggccagggccacaacaugcccaacgaccccaacagaaacguggacgagaacgccaacgccaacagcgccgugaagaacaacaacaacgaggagcccagcgacaagcacaucaaggaguaccugaacaagauccagaacagccugagcaccgaguggagccccugcagcgugaccugcggcaacggcauccaggugagaaucaagcccggcagcgccaacaagcccaaggacgagcuggacuacgccaacgacaucgagaagaagaucugcaagauggagaagugcagcagcguguucaacguggugaacagcagcaagcuggagagcaccagaaucuaccagauccuggccaucuacagcaccguggccagcagccuggugcugguggugagccugggcgccaucagcuucuggaugugcagcaacggcagccugcagugcagaaucugcaucugaggacuagucccuguucccagagcccacuuuuuuuucuuuuuuugaaauaaaauagccugucuuucagaucucaaaggcucuuuucagagccaccaaaaaaaaaaaaaaaaaaaaaaaaaaaaaaaaaaaaaaaaaaaaaaaaaaaaaaaaaaaaaaaaagaauu

SEQ ID NO: 6699 - RNA, 1246 nt, Artificial Sequence
  mRNA Design a-1 (hSL-A64-N5) comprising derived and/or modified sequence from Pf(3D7)__XP_001351122.1__HsALB_Pf-CSP(82-397) (opt4)
aggagagucccgcagucggcguccagcggcucugcuuguucgugugugugucguugcaggccuuauucaagcuuaccaugaagugggugaccuucaucagccugcuguuccuguucagcagcgccuacagcgacaacgagaagcugagaaagcccaagcacaagaagcugaagcagcccgccgacggcaaccccgaccccaacgccaaccccaacguggaccccaacgccaaccccaacguggaccccaacgccaaccccaacguggaccccaacgccaaccccaacgccaaccccaacgccaaccccaacgccaaccccaacgccaaccccaacgccaaccccaacgccaaccccaacgccaaccccaacgccaaccccaacgccaaccccaacgccaaccccaacgccaaccccaacgccaaccccaacgccaaccccaacgccaaccccaacgccaaccccaacgccaaccccaacguggaccccaacgccaaccccaacgccaaccccaacgccaaccccaacgccaaccccaacgccaaccccaacgccaaccccaacgccaaccccaacgccaaccccaacgccaaccccaacgccaaccccaacgccaaccccaacgccaaccccaacgccaaccccaacgccaaccccaacgccaaccccaacgccaaccccaacgccaaccccaacgccaaccccaacaagaacaaccagggcaacggccagggccacaacaugcccaacgaccccaacagaaacguggacgagaacgccaacgccaacagcgccgugaagaacaacaacaacgaggagcccagcgacaagcacaucaaggaguaccugaacaagauccagaacagccugagcaccgaguggagccccugcagcgugaccugcggcaacggcauccaggugagaaucaagcccggcagcgccaacaagcccaaggacgagcuggacuacgccaacgacaucgagaagaagaucugcaagauggagaagugcagcagcguguucaacguggugaacagcagcaucggccugaucauggugcugagcuuccuguuccugaacugaggacuagucccuguucccagagcccacuuuuuuuucuuuuuuugaaauaaaauagccugucuuucagaucucaaaggcucuuuucagagccaccaaaaaaaaaaaaaaaaaaaaaaaaaaaaaaaaaaaaaaaaaaaaaaaaaaaaaaaaaaaaaaaaagaauu

SEQ ID NO: 6700 - RNA, 598 nt, Artificial Sequence
  mRNA Design a-1 (hSL-A64-N5) comprising derived and/or modified sequence from Pf(3D7)__XP_001351122.1__HsALB_Pf-CSP(93-192) (opt4)
aggagagucccgcagucggcguccagcggcucugcuuguucgugugugugucguugcaggccuuauucaagcuuaccaugaagugggugaccuucaucagccugcuguuccuguucagcagcgccuacagcaagcugaagcagcccgccgacggcaaccccgaccccaacgccaaccccaacguggaccccaacgccaaccccaacguggaccccaacgccaaccccaacguggaccccaacgccaaccccaacgccaaccccaacgccaaccccaacgccaaccccaacgccaaccccaacgccaaccccaacgccaaccccaacgccaaccccaacgccaaccccaacgccaaccccaacgccaaccccaacgccaaccccaacgccaaccccaacgccaaccccaacgccaaccccaacgccaaccccugaggacuagucccuguucccagagcccacuuuuuuuucuuuuuuugaaauaaaauagccugucuuucagaucucaaaggcucuuuucagagccaccaaaaaaaaaaaaaaaaaaaaaaaaaaaaaaaaaaaaaaaaaaaaaaaaaaaaaaaaaaaaaaaaagaauu

SEQ ID NO: 6701 - RNA, 838 nt, Artificial Sequence
  mRNA Design a-1 (hSL-A64-N5) comprising derived and/or modified sequence from Pf(3D7)__XP_001351122.1__HsALB_Pf-CSP(93-272) (opt4)
aggagagucccgcagucggcguccagcggcucugcuuguucgugugugugucguugcaggccuuauucaagcuuaccaugaagugggugaccuucaucagccugcuguuccuguucagcagcgccuacagcaagcugaagcagcccgccgacggcaaccccgaccccaacgccaaccccaacguggaccccaacgccaaccccaacguggaccccaacgccaaccccaacguggaccccaacgccaaccccaacgccaaccccaacgccaaccccaacgccaaccccaacgccaaccccaacgccaaccccaacgccaaccccaacgccaaccccaacgccaaccccaacgccaaccccaacgccaaccccaacgccaaccccaacgccaaccccaacgccaaccccaacgccaaccccaacgccaaccccaacgccaaccccaacguggaccccaacgccaaccccaacgccaaccccaacgccaaccccaacgccaaccccaacgccaaccccaacgccaaccccaacgccaaccccaacgccaaccccaacgccaaccccaacgccaaccccaacgccaaccccaacgccaaccccaacgccaaccccaacgccaaccccaacgccaaccccaacgccaaccccaacgccaaccccaacgccaaccccugaggacuagucccuguucccagagcccacuuuuuuuucuuuuuuugaaauaaaauagccugucuuucagaucucaaaggcucuuuucagagccaccaaaaaaaaaaaaaaaaaaaaaaaaaaaaaaaaaaaaaaaaaaaaaaaaaaaaaaaaaaaaaaaaagaauu

SEQ ID NO: 6702 - RNA, 1213 nt, Artificial Sequence
  mRNA Design a-1 (hSL-A64-N5) comprising derived and/or modified sequence from Pf(3D7)__XP_001351122.1__HsALB_Pf-CSP(93-397) (opt4)
aggagagucccgcagucggcguccagcggcucugcuuguucgugugugugucguugcaggccuuauucaagcuuaccaugaagugggugaccuucaucagccugcuguuccuguucagcagcgccuacagcaagcugaagcagcccgccgacggcaaccccgaccccaacgccaaccccaacguggaccccaacgccaaccccaacguggaccccaacgccaaccccaacguggaccccaacgccaaccccaacgccaaccccaacgccaaccccaacgccaaccccaacgccaaccccaacgccaaccccaacgccaaccccaacgccaaccccaacgccaaccccaacgccaaccccaacgccaaccccaacgccaaccccaacgccaaccccaacgccaaccccaacgccaaccccaacgccaaccccaacgccaaccccaacguggaccccaacgccaaccccaacgccaaccccaacgccaaccccaacgccaaccccaacgccaaccccaacgccaaccccaacgccaaccccaacgccaaccccaacgccaaccccaacgccaaccccaacgccaaccccaacgccaaccccaacgccaaccccaacgccaaccccaacgccaaccccaacgccaaccccaacgccaaccccaacgccaaccccaacaagaacaaccagggcaacggccagggccacaacaugcccaacgaccccaacagaaacguggacgagaacgccaacgccaacagcgccgugaagaacaacaacaacgaggagcccagcgacaagcacaucaaggaguaccugaacaagauccagaacagccugagcaccgaguggagccccugcagcgugaccugcggcaacggcauccaggugagaaucaagcccggcagcgccaacaagcccaaggacgagcuggacuacgccaacgacaucgagaagaagaucugcaagauggagaagugcagcagcguguucaacguggugaacagcagcaucggccugaucauggugcugagcuuccuguuccugaacugaggacuagucccuguucccagagcccacuuuuuuuucuuuuuuugaaauaaaauagccugucuuucagaucucaaaggcucuuuucagagccaccaaaaaaaaaaaaaaaaaaaaaaaaaaaaaaaaaaaaaaaaaaaaaaaaaaaaaaaaaaaaaaaaagaauu

SEQ ID NO: 6703 - RNA, 583 nt, Artificial Sequence
  mRNA Design a-1 (hSL-A64-N5) comprising derived and/or modified sequence from Pf(3D7)__XP_001351122.1__HsALB_Pf-CSP(98-192) (opt4)
aggagagucccgcagucggcguccagcggcucugcuuguucgugugugugucguugcaggccuuauucaagcuuaccaugaagugggugaccuucaucagccugcuguuccuguucagcagcgccuacagcgccgacggcaaccccgaccccaacgccaaccccaacguggaccccaacgccaaccccaacguggaccccaacgccaaccccaacguggaccccaacgccaaccccaacgccaaccccaacgccaaccccaacgccaaccccaacgccaaccccaacgccaaccccaacgccaaccccaacgccaaccccaacgccaaccccaacgccaaccccaacgccaaccccaacgccaaccccaacgccaaccccaacgccaaccccaacgccaaccccaacgccaaccccugaggacuagucccuguucccagagcccacuuuuuuuucuuuuuuugaaauaaaauagccugucuuucagaucucaaaggcucuuuucagagccaccaaaaaaaaaaaaaaaaaaaaaaaaaaaaaaaaaaaaaaaaaaaaaaaaaaaaaaaaaaaaaaaaagaauu

SEQ ID NO: 6704 - RNA, 823 nt, Artificial Sequence
  mRNA Design a-1 (hSL-A64-N5) comprising derived and/or modified sequence from Pf(3D7)__XP_001351122.1__HsALB_Pf-CSP(98-272) (opt4)
aggagagucccgcagucggcguccagcggcucugcuuguucgugugugugucguugcaggccuuauucaagcuuaccaugaagugggugaccuucaucagccugcuguuccuguucagcagcgccuacagcgccgacggcaaccccgaccccaacgccaaccccaacguggaccccaacgccaaccccaacguggaccccaacgccaaccccaacguggaccccaacgccaaccccaacgccaaccccaacgccaaccccaacgccaaccccaacgccaaccccaacgccaaccccaacgccaaccccaacgccaaccccaacgccaaccccaacgccaaccccaacgccaaccccaacgccaaccccaacgccaaccccaacgccaaccccaacgccaaccccaacgccaaccccaacgccaaccccaacguggaccccaacgccaaccccaacgccaaccccaacgccaaccccaacgccaaccccaacgccaaccccaacgccaaccccaacgccaaccccaacgccaaccccaacgccaaccccaacgccaaccccaacgccaaccccaacgccaaccccaacgccaaccccaacgccaaccccaacgccaaccccaacgccaaccccaacgccaaccccaacgccaaccccugaggacuagucccuguucccagagcccacuuuuuuuucuuuuuuugaaauaaaauagccugucuuucagaucucaaaggcucuuuucagagccaccaaaaaaaaaaaaaaaaaaaaaaaaaaaaaaaaaaaaaaaaaaaaaaaaaaaaaaaaaaaaaaaaagaauu

SEQ ID NO: 6705 - RNA, 1129 nt, Artificial Sequence
  mRNA Design a-1 (hSL-A64-N5) comprising derived and/or modified sequence from Pf(3D7)__XP_001351122.1__HsALB_Pf-CSP(98-374) (opt4)
aggagagucccgcagucggcguccagcggcucugcuuguucgugugugugucguugcaggccuuauucaagcuuaccaugaagugggugaccuucaucagccugcuguuccuguucagcagcgccuacagcgccgacggcaaccccgaccccaacgccaaccccaacguggaccccaacgccaaccccaacguggaccccaacgccaaccccaacguggaccccaacgccaaccccaacgccaaccccaacgccaaccccaacgccaaccccaacgccaaccccaacgccaaccccaacgccaaccccaacgccaaccccaacgccaaccccaacgccaaccccaacgccaaccccaacgccaaccccaacgccaaccccaacgccaaccccaacgccaaccccaacgccaaccccaacgccaaccccaacguggaccccaacgccaaccccaacgccaaccccaacgccaaccccaacgccaaccccaacgccaaccccaacgccaaccccaacgccaaccccaacgccaaccccaacgccaaccccaacgccaaccccaacgccaaccccaacgccaaccccaacgccaaccccaacgccaaccccaacgccaaccccaacgccaaccccaacgccaaccccaacgccaaccccaacaagaacaaccagggcaacggccagggccacaacaugcccaacgaccccaacagaaacguggacgagaacgccaacgccaacagcgccgugaagaacaacaacaacgaggagcccagcgacaagcacaucaaggaguaccugaacaagauccagaacagccugagcaccgaguggagccccugcagcgugaccugcggcaacggcauccaggugagaaucaagcccggcagcgccaacaagcccaaggacgagcuggacuacgccaacgacaucgagaagaagaucugcaagauggagaagugcugaggacuagucccuguucccagagcccacuuuuuuuucuuuuuuugaaauaaaauagccugucuuucagaucucaaaggcucuuuucagagccaccaaaaaaaaaaaaaaaaaaaaaaaaaaaaaaaaaaaaaaaaaaaaaaaaaaaaaaaaaaaaaaaaagaauu

SEQ ID NO: 6706 - RNA, 1198 nt, Artificial Sequence
  mRNA Design a-1 (hSL-A64-N5) comprising derived and/or modified sequence from Pf(3D7)__XP_001351122.1__HsALB_Pf-CSP(98-397) (opt4)
aggagagucccgcagucggcguccagcggcucugcuuguucgugugugugucguugcaggccuuauucaagcuuaccaugaagugggugaccuucaucagccugcuguuccuguucagcagcgccuacagcgccgacggcaaccccgaccccaacgccaaccccaacguggaccccaacgccaaccccaacguggaccccaacgccaaccccaacguggaccccaacgccaaccccaacgccaaccccaacgccaaccccaacgccaaccccaacgccaaccccaacgccaaccccaacgccaaccccaacgccaaccccaacgccaaccccaacgccaaccccaacgccaaccccaacgccaaccccaacgccaaccccaacgccaaccccaacgccaaccccaacgccaaccccaacgccaaccccaacguggaccccaacgccaaccccaacgccaaccccaacgccaaccccaacgccaaccccaacgccaaccccaacgccaaccccaacgccaaccccaacgccaaccccaacgccaaccccaacgccaaccccaacgccaaccccaacgccaaccccaacgccaaccccaacgccaaccccaacgccaaccccaacgccaaccccaacgccaaccccaacgccaaccccaacaagaacaaccagggcaacggccagggccacaacaugcccaacgaccccaacagaaacguggacgagaacgccaacgccaacagcgccgugaagaacaacaacaacgaggagcccagcgacaagcacaucaaggaguaccugaacaagauccagaacagccugagcaccgaguggagccccugcagcgugaccugcggcaacggcauccaggugagaaucaagcccggcagcgccaacaagcccaaggacgagcuggacuacgccaacgacaucgagaagaagaucugcaagauggagaagugcagcagcguguucaacguggugaacagcagcaucggccugaucauggugcugagcuuccuguuccugaacugaggacuagucccuguucccagagcccacuuuuuuuucuuuuuuugaaauaaaauagccugucuuucagaucucaaaggcucuuuucagagccaccaaaaaaaaaaaaaaaaaaaaaaaaaaaaaaaaaaaaaaaaaaaaaaaaaaaaaaaaaaaaaaaaagaauu

SEQ ID NO: 6707 - RNA, 1525 nt, Artificial Sequence
  mRNA Design a-1 (hSL-A64-N5) comprising derived and/or modified sequence from Pf(3D7)__XP_001351122.1__HsALB_Pf-CSP(199-377)_L(PVTN)_HBsAg (opt4)
aggagagucccgcagucggcguccagcggcucugcuuguucgugugugugucguugcaggccuuauucaagcuuaccaugaagugggugaccuucaucagccugcuguuccuguucagcagcgccuacagcgaccccaacgccaaccccaacgccaaccccaacgccaaccccaacgccaaccccaacgccaaccccaacgccaaccccaacgccaaccccaacgccaaccccaacgccaaccccaacgccaaccccaacgccaaccccaacgccaaccccaacgccaaccccaacgccaaccccaacgccaaccccaacgccaaccccaacgccaaccccaacgccaaccccaacaagaacaaccagggcaacggccagggccacaacaugcccaacgaccccaacagaaacguggacgagaacgccaacgccaacagcgccgugaagaacaacaacaacgaggagcccagcgacaagcacaucaaggaguaccugaacaagauccagaacagccugagcaccgaguggagccccugcagcgugaccugcggcaacggcauccaggugagaaucaagcccggcagcgccaacaagcccaaggacgagcuggacuacgccaacgacaucgagaagaagaucugcaagauggagaagugcagcagcgugcccgugaccaacauggagaacaucaccagcggcuuccugggcccccugcuggugcugcaggccggcuucuuccugcugaccagaauccugaccaucccccagagccuggacagcugguggaccagccugaacuuccugggcggcagccccgugugccugggccagaacagccagagccccaccagcaaccacagccccaccagcugcccccccaucugccccggcuacagauggaugugccugagaagauucaucaucuuccuguucauccugcugcugugccugaucuuccugcuggugcugcuggacuaccagggcaugcugcccgugugcccccugauccccggcagcaccaccaccaacaccggccccugcaagaccugcaccacccccgcccagggcaacagcauguuccccagcugcugcugcaccaagcccaccgacggcaacugcaccugcauccccauccccagcagcugggccuucgccaaguaccugugggagugggccagcgugagauucagcuggcugagccugcuggugcccuucgugcagugguucgugggccugagccccaccguguggcugagcgccaucuggaugaugugguacuggggccccagccuguacagcaucgugagccccuucaucccccugcugcccaucuucuucugccuguggguguacaucugaggacuagucccuguucccagagcccacuuuuuuuucuuuuuuugaaauaaaauagccugucuuucagaucucaaaggcucuuuucagagccaccaaaaaaaaaaaaaaaaaaaaaaaaaaaaaaaaaaaaaaaaaaaaaaaaaaaaaaaaaaaaaaaaagaauu

SEQ ID NO: 6708 - RNA, 1435 nt, Artificial Sequence
  mRNA Design a-1 (hSL-A64-N5) comprising derived and/or modified sequence from Pf(3D7)__XP_001351122.1__Pf-CSP (opt5)
aggagagucccgcagucggcguccagcggcucugcuuguucgugugugugucguugcaggccuuauucaagcuuaccaugaugagaaagcuggccauccucagcguguccucuuuccuguuugucgaggcucuuuuccaggaauaccaaugcuauggcagcuccucuaacacccggguucugaaugagcucaacuacgacaaugccgggacaaaccuguauaaugaacuugagaugaacuacuauggaaaacaggaaaauugguacagccugaagaaaaacucccgcucucucggcgagaaugaugacgggaacaaugaggauaacgaaaagcugagaaaacccaagcacaagaaacugaagcagccugcggacggaaauccggaucccaacgcuaauccuaacguggaccccaacgccaauccuaacguggaucccaaugccaacccuaaugucgacccgaacgcuaaucccaacgccaauccuaacgcuaaucccaacgccaauccuaacgcgaaucccaacgccaacccgaaugcuaacccuaaugccaaccccaaugcuaacccuaaugccaaccccaaugcgaaccccaaugccaacccuaaugcuaacccgaaugccaaccccaacgcuaauccuaacgccaaucccaacgccaauccuaacguggaucccaaugcuaacccgaaugcgaacccuaaugccaaccccaaugcuaacccuaaugccaaccccaacgccaauccuaacgcuaaucccaacgccaauccgaacgcgaauccuaacgcuaaucccaacgccaaucccaacgccaauccuaacgcuaauccgaacgccaaucccaacgcuaacccuaaugccaaccccaaugcgaacccuaaugccaaccccaauaaaaacaaucagggcaacgggcaaggacauaauaugccuaacgaccccaaucggaacguugaugagaaugcuaacgccaacagcgcugugaagaauaacaauaacgaggaaccguccgacaaacacauuaaggaguaucucaauaagauccagaacagccugucuacggaaugguccccuuguagcgugaccugcggcaauggcauucagguccgcaucaaacccgggucugccaacaagccuaaagaugagcuugacuacgcgaaugacauugaaaagaaaaucuguaagauggagaaaugcuccagcguuuuuaacguggucaauucuuccaucggacugauuauggugcucagcuuccuguuucuuaacugaggacuagucccuguucccagagcccacuuuuuuuucuuuuuuugaaauaaaauagccugucuuucagaucucaaaggcucuuuucagagccaccaaaaaaaaaaaaaaaaaaaaaaaaaaaaaaaaaaaaaaaaaaaaaaaaaaaaaaaaaaaaaaaaagaauu

SEQ ID NO: 6709 - RNA, 1366 nt, Artificial Sequence
  mRNA Design a-1 (hSL-A64-N5) comprising derived and/or modified sequence from Pf(3D7)__XP_001351122.1__Pf-CSP(1-374) (opt5)
aggagagucccgcagucggcguccagcggcucugcuuguucgugugugugucguugcaggccuuauucaagcuuaccaugaugagaaagcuggccauccucagcguguccucuuuccuguuugucgaggcucuuuuccaggaauaccaaugcuauggcagcuccucuaacacccggguucugaaugagcucaacuacgacaaugccgggacaaaccuguauaaugaacuugagaugaacuacuauggaaaacaggaaaauugguacagccugaagaaaaacucccgcucucucggcgagaaugaugacgggaacaaugaggauaacgaaaagcugagaaaacccaagcacaagaaacugaagcagccugcggacggaaauccggaucccaacgcuaauccuaacguggaccccaacgccaauccuaacguggaucccaaugccaacccuaaugucgacccgaacgcuaaucccaacgccaauccuaacgcuaaucccaacgccaauccuaacgcgaaucccaacgccaacccgaaugcuaacccuaaugccaaccccaaugcuaacccuaaugccaaccccaaugcgaaccccaaugccaacccuaaugcuaacccgaaugccaaccccaacgcuaauccuaacgccaaucccaacgccaauccuaacguggaucccaaugcuaacccgaaugcgaacccuaaugccaaccccaaugcuaacccuaaugccaaccccaacgccaauccuaacgcuaaucccaacgccaauccgaacgcgaauccuaacgcuaaucccaacgccaaucccaacgccaauccuaacgcuaauccgaacgccaaucccaacgcuaacccuaaugccaaccccaaugcgaacccuaaugccaaccccaauaaaaacaaucagggcaacgggcaaggacauaauaugccuaacgaccccaaucggaacguugaugagaaugcuaacgccaacagcgcugugaagaauaacaauaacgaggaaccguccgacaaacacauuaaggaguaucucaauaagauccagaacagccugucuacggaaugguccccuuguagcgugaccugcggcaauggcauucagguccgcaucaaacccgggucugccaacaagccuaaagaugagcuugacuacgcgaaugacauugaaaagaaaaucuguaagauggagaaaugcugaggacuagucccuguucccagagcccacuuuuuuuucuuuuuuugaaauaaaauagccugucuuucagaucucaaaggcucuuuucagagccaccaaaaaaaaaaaaaaaaaaaaaaaaaaaaaaaaaaaaaaaaaaaaaaaaaaaaaaaaaaaaaaaaagaauu

SEQ ID NO: 6710 - RNA, 1219 nt, Artificial Sequence
  mRNA Design a-1 (hSL-A64-N5) comprising derived and/or modified sequence from Pf(3D7)__XP_001351122.1__Pf-CSP(1-325) (opt5)
aggagagucccgcagucggcguccagcggcucugcuuguucgugugugugucguugcaggccuuauucaagcuuaccaugaugagaaagcuggccauccucagcguguccucuuuccuguuugucgaggcucuuuuccaggaauaccaaugcuauggcagcuccucuaacacccggguucugaaugagcucaacuacgacaaugccgggacaaaccuguauaaugaacuugagaugaacuacuauggaaaacaggaaaauugguacagccugaagaaaaacucccgcucucucggcgagaaugaugacgggaacaaugaggauaacgaaaagcugagaaaacccaagcacaagaaacugaagcagccugcggacggaaauccggaucccaacgcuaauccuaacguggaccccaacgccaauccuaacguggaucccaaugccaacccuaaugucgacccgaacgcuaaucccaacgccaauccuaacgcuaaucccaacgccaauccuaacgcgaaucccaacgccaacccgaaugcuaacccuaaugccaaccccaaugcuaacccuaaugccaaccccaaugcgaaccccaaugccaacccuaaugcuaacccgaaugccaaccccaacgcuaauccuaacgccaaucccaacgccaauccuaacguggaucccaaugcuaacccgaaugcgaacccuaaugccaaccccaaugcuaacccuaaugccaaccccaacgccaauccuaacgcuaaucccaacgccaauccgaacgcgaauccuaacgcuaaucccaacgccaaucccaacgccaauccuaacgcuaauccgaacgccaaucccaacgcuaacccuaaugccaaccccaaugcgaacccuaaugccaaccccaauaaaaacaaucagggcaacgggcaaggacauaauaugccuaacgaccccaaucggaacguugaugagaaugcuaacgccaacagcgcugugaagaauaacaauaacgaggaaccguccgacaaacacauuaaggaguaucucaauaagauccagaacugaggacuagucccuguucccagagcccacuuuuuuuucuuuuuuugaaauaaaauagccugucuuucagaucucaaaggcucuuuucagagccaccaaaaaaaaaaaaaaaaaaaaaaaaaaaaaaaaaaaaaaaaaaaaaaaaaaaaaaaaaaaaaaaaagaauu

SEQ ID NO: 6711 - RNA, 1435 nt, Artificial Sequence
  mRNA Design a-1 (hSL-A64-N5) comprising derived and/or modified sequence from Pf(3D7)__XP_001351122.1__HsALB_Pf-CSP(19-397) (opt5)
aggagagucccgcagucggcguccagcggcucugcuuguucgugugugugucguugcaggccuuauucaagcuuaccaugaagugggugaccuucaucagccugcucuuucuguucuccucugccuacagccuuuuucaggaguaucaaugcuacggcuccucuagcaacacaagaguccugaaugaacucaacuaugacaaugcugggacgaaccuguacaaugagcuugaaaugaacuauuacggaaaacaggagaauugguauucccugaagaaaaacucucggagccucggcgaaaaugaugacgggaacaaugaggauaacgagaagcugcgcaaacccaagcacaagaaacugaagcagccugccgacggaaauccggaucccaacgcgaauccuaacguugaccccaacgcuaauccuaacguggaucccaaugccaacccuaauguggacccgaacgccaaucccaacgcuaauccuaacgccaaucccaacgcuaauccuaacgccaaucccaacgcgaacccgaaugccaacccuaaugcuaaccccaaugccaacccuaaugcuaaccccaaugccaaccccaaugcgaacccuaaugccaacccgaaugcuaaccccaacgccaauccuaacgcuaaucccaacgccaauccuaacgucgaucccaaugccaacccgaaugcuaacccuaaugcgaaccccaaugccaacccuaaugcuaaccccaacgccaauccuaacgccaaucccaacgcuaauccgaacgccaauccuaacgcgaaucccaacgcuaaucccaacgccaauccuaacgccaauccgaacgcuaaucccaacgccaacccuaaugcuaaccccaaugccaacccuaaugcgaaccccaauaaaaacaaucagggcaacgggcaaggacauaauaugccuaacgaccccaauagaaacguggaugaaaaugccaacgcuaacuccgccguuaagaauaacaauaacgaggaaccgagcgacaaacacauuaaggaguaccucaauaagauccagaacucucuguccaccgaguggagcccuuguucugugacaugcggcaauggcauucagguccggaucaaacccggguccgcuaacaagccuaaagaugaacuugacuacgccaaugacauugagaagaaaaucuguaagauggaaaaaugcagcucuguguucaacguugucaauuccagcaucggacugauuauggugcucuccuuucuguuccuuaacugaggacuagucccuguucccagagcccacuuuuuuuucuuuuuuugaaauaaaauagccugucuuucagaucucaaaggcucuuuucagagccaccaaaaaaaaaaaaaaaaaaaaaaaaaaaaaaaaaaaaaaaaaaaaaaaaaaaaaaaaaaaaaaaaagaauu

SEQ ID NO: 6712 - RNA, 1453 nt, Artificial Sequence
  mRNA Design a-1 (hSL-A64-N5) comprising derived and/or modified sequence from Pf(3D7)__XP_001351122.1__HsIns-iso1_Pf-CSP(19-397) (opt5)
aggagagucccgcagucggcguccagcggcucugcuuguucgugugugugucguugcaggccuuauucaagcuuaccauggcccuguggaugagacuccugccccuucuggcucuccuggcccuuuggggcccugacccggcggcugcccuguuccaggaguaccaaugcuaugggagcuccucuaacacccgggugcucaaugaacugaacuacgauaaugccggaacaaaccuguauaaugagcucgaaaugaacuacuauggcaagcaggagaauugguacagccugaaaaagaacucccgcucucuuggggaaaaugacgauggaaacaaugaggacaacgagaaacugagaaagcccaaacacaagaagcucaaacagccugcugauggcaaucccgacccuaacgccaaucccaacgucgauccuaacgcuaauccgaacguugaccccaaugccaacccuaauguggaucccaacgcgaauccuaacgccaaucccaacgcuaauccgaacgccaauccuaacgcuaaucccaacgccaacccuaaugcgaaccccaaugccaaccccaaugcuaacccuaaugccaacccgaaugcuaaccccaaugccaacccuaaugccaaccccaaugcuaacccuaacgcgaaucccaacgccaauccgaacgcuaauccuaacguggaccccaaugccaacccuaaugccaaccccaaugcuaacccuaaugccaaccccaaugcgaacccgaacgcuaauccuaacgccaaucccaacgccaaucccaacgcuaauccuaacgccaauccgaacgcuaaucccaacgccaauccuaacgcgaaucccaacgccaauccuaacgcuaaccccaaugccaacccuaaugcuaaccccaaugccaacccgaauaagaacaaucaggggaacggacaaggccauaauaugccuaacgaucccaaucggaacgucgacgaaaaugcgaacgccaacagcgcugugaaaaauaacaauaacgaggaaccuuccgauaagcacaucaaagaguaucugaauaagauucagaacucucuuagcacggaguggucccccuguagcguuaccugcggcaaugggauccaggugcgcauuaagccgggaucugccaacaaaccuaaggacgaacuggacuacgcuaaugauaucgagaaaaagauuuguaaaauggaaaagugcuccagcgucuuuaacgugguuaauucuuccaucggccucaucauggugcugagcuuccuguuucucaacugaggacuagucccuguucccagagcccacuuuuuuuucuuuuuuugaaauaaaauagccugucuuucagaucucaaaggcucuuuucagagccaccaaaaaaaaaaaaaaaaaaaaaaaaaaaaaaaaaaaaaaaaaaaaaaaaaaaaaaaaaaaaaaaaagaauu

SEQ ID NO: 6713 - RNA, 1432 nt, Artificial Sequence
  mRNA Design a-1 (hSL-A64-N5) comprising derived and/or modified sequence from Pf(3D7)__XP_001351122.1__HsSPARC_Pf-CSP(19-397) (opt5)
aggagagucccgcagucggcguccagcggcucugcuuguucgugugugugucguugcaggccuuauucaagcuuaccaugagagccuggaucuucuuucugcucugccuggcuggccgggcccuugcgcuguuccaggaguaccaauguuaugggagcuccucuaacacccgcgugcucaaugaacugaacuacgacaaugcuggaacaaaccuuuauaaugagcuggaaaugaacuacuauggcaagcaggagaauugguacagccucaaaaagaacuccagaucucugggggaaaaugaugacggaaacaaugaggauaacgagaaacugcggaagcccaaacacaagaagcucaaacagccugccgacggcaauccggaucccaacgccaauccuaacgucgaccccaacgcuaauccuaacguugaucccaaugccaacccuaauguggacccgaacgcuaaucccaacgccaauccuaacgcgaaucccaacgccaauccuaacgcuaaucccaacgccaacccgaaugcuaacccuaaugccaaccccaaugcgaacccuaaugccaaccccaaugcuaaccccaaugccaacccuaaugcuaacccgaaugccaaccccaacgccaauccuaacgcuaaucccaacgcgaauccuaacguggaucccaaugccaacccgaaugcuaacccuaaugccaaccccaaugccaacccuaaugcuaaccccaacgccaauccuaacgcgaaucccaacgcuaauccgaacgccaauccuaacgccaaucccaacgcuaaucccaacgccaauccuaacgcuaauccgaacgccaaucccaacgcgaacccuaaugccaaccccaaugcuaacccuaaugccaaccccaauaagaacaaucaggggaacggacaaggccauaauaugccuaacgaccccaaucgcaacgucgaugaaaaugcuaacgccaacagcgcggugaaaaauaacaauaacgaggaaccguccgacaagcacauuaaagaguaucugaauaagauccagaacucucuuagcacggagugguccccuugcagcguuaccuguggcaaugggauucaggugagaaucaagcccggaucugccaacaaaccuaaggaugaacuggacuacgcuaaugacauugagaaaaagaucugcaaaauggaaaaguguuccagcgucuuuaacgugguuaauucuuccaucggccucauuauggugcugagcuuccuuuuucugaacugaggacuagucccuguucccagagcccacuuuuuuuucuuuuuuugaaauaaaauagccugucuuucagaucucaaaggcucuuuucagagccaccaaaaaaaaaaaaaaaaaaaaaaaaaaaaaaaaaaaaaaaaaaaaaaaaaaaaaaaaaaaaaaaaagaauu

SEQ ID NO: 6714 - RNA, 1435 nt, Artificial Sequence
  mRNA Design a-1 (hSL-A64-N5) comprising derived and/or modified sequence from Pf(3D7)__XP_001351122.1__IgE_Pf-CSP(19-397) (opt5)
aggagagucccgcagucggcguccagcggcucugcuuguucgugugugugucguugcaggccuuauucaagcuuaccauggacuggaccuggauccuguuccucguggccgcugccacaagaguccacagccuguuucaggaguaccaaugcuauggcuccucuagcaacacgcggguucuuaaugaacugaacuacgauaaugcggggaccaaccucuauaaugagcuggaaaugaacuacuauggaaagcaggagaauugguacucccuuaaaaagaacucucgcagccugggcgaaaaugacgaugggaacaaugaggacaacgagaaacucagaaagcccaaacauaagaagcugaaacagccugcugauggaaauccggaccccaacgccaauccuaacguggaucccaacgccaauccuaacguggaccccaaugcuaacccuaaugucgauccgaacgccaaucccaacgcuaauccuaacgccaaucccaacgcgaauccuaacgccaaucccaacgcuaacccgaaugccaacccuaaugcuaaccccaaugccaacccuaaugcgaaccccaaugccaaccccaaugcuaacccuaaugccaacccgaaugcuaaccccaacgccaauccuaacgccaaucccaacgcuaauccuaacguggaccccaaugcgaacccgaaugccaacccuaaugcuaaccccaaugccaacccuaaugccaaccccaacgcuaauccuaacgccaaucccaacgcgaauccgaacgcuaauccuaacgccaaucccaacgccaaucccaacgcuaauccuaacgccaauccgaacgcuaaucccaacgccaacccuaaugcgaaccccaaugccaacccuaaugcuaaccccaauaagaacaaucagggcaacgggcaaggacacaauaugccuaacgaucccaaucggaacguugacgaaaaugccaacgcuaacuccgccgugaaaaauaacaauaacgaggaaccgucugauaagcauauuaaagaguaucugaauaagauccagaacagccucuccacagaguggagcccuuguucugugaccugcggcaauggcauucagguccgcaucaagcccggguccgcgaacaaaccuaaggacgaacuggacuacgccaaugauauugagaaaaagaucuguaaaauggaaaagugcagcucuguuuucaacguggucaauuccagcaucggacuuauuauggugcugucuuuucucuuccugaacugaggacuagucccuguucccagagcccacuuuuuuuucuuuuuuugaaauaaaauagccugucuuucagaucucaaaggcucuuuucagagccaccaaaaaaaaaaaaaaaaaaaaaaaaaaaaaaaaaaaaaaaaaaaaaaaaaaaaaaaaaaaaaaaaagaauu

SEQ ID NO: 6715 - RNA, 1600 nt, Artificial Sequence
  mRNA Design a-1 (hSL-A64-N5) comprising derived and/or modified sequence from Pf(3D7)__XP_001351122.1__Pf-CSP_L(G4SG4)_TM domain HA (opt5)
aggagagucccgcagucggcguccagcggcucugcuuguucgugugugugucguugcaggccuuauucaagcuuaccaugaugagaaagcuggccauccucagcguguccucuuuccuguuugucgaggcucuuuuccaggaauaccaaugcuauggcagcuccucuaacacccggguucugaaugagcucaacuacgacaaugccgggacaaaccuguauaaugaacuugagaugaacuacuauggaaaacaggaaaauugguacagccugaagaaaaacucccgcucucucggcgagaaugaugacgggaacaaugaggauaacgaaaagcugagaaaacccaagcacaagaaacugaagcagccugcggacggaaauccggaucccaacgcuaauccuaacguggaccccaacgccaauccuaacguggaucccaaugccaacccuaaugucgacccgaacgcuaaucccaacgccaauccuaacgcuaaucccaacgccaauccuaacgcgaaucccaacgccaacccgaaugcuaacccuaaugccaaccccaaugcuaacccuaaugccaaccccaaugcgaaccccaaugccaacccuaaugcuaacccgaaugccaaccccaacgcuaauccuaacgccaaucccaacgccaauccuaacguggaucccaaugcuaacccgaaugcgaacccuaaugccaaccccaaugcuaacccuaaugccaaccccaacgccaauccuaacgcuaaucccaacgccaauccgaacgcgaauccuaacgcuaaucccaacgccaaucccaacgccaauccuaacgcuaauccgaacgccaaucccaacgcuaacccuaaugccaaccccaaugcgaacccuaaugccaaccccaauaaaaacaaucagggcaacgggcaaggacauaauaugccuaacgaccccaaucggaacguugaugagaaugcuaacgccaacagcgcugugaagaauaacaauaacgaggaaccguccgacaaacacauuaaggaguaucucaauaagauccagaacagccugucuacggaaugguccccuuguagcgugaccugcggcaauggcauucagguccgcaucaaacccgggucugccaacaagccuaaagaugagcuugacuacgcgaaugacauugaaaagaaaaucuguaagauggagaaaugcuccagcguuuuuaacguggucaauucuuccaucggacugauuauggugcucagcuuccuguuucuuaacggcgggggaggcuccgggggaggcggcaagcuggaaucuacaagaaucuaccagauucucgccaucuauagcaccguggcuuccagccugguccugguugugucucucggggccauuuccuucuggauguguagcaauggaucucugcaaugccggaucuguauuugaggacuagucccuguucccagagcccacuuuuuuuucuuuuuuugaaauaaaauagccugucuuucagaucucaaaggcucuuuucagagccaccaaaaaaaaaaaaaaaaaaaaaaaaaaaaaaaaaaaaaaaaaaaaaaaaaaaaaaaaaaaaaaaaagaauu

SEQ ID NO: 6716 - RNA, 1474 nt, Artificial Sequence
  mRNA Design a-1 (hSL-A64-N5) comprising derived and/or modified sequence from Pf(3D7)__XP_001351122.1__Pf-CSP(199-377)_L(PVTN)_HBsAg (opt5)
aggagagucccgcagucggcguccagcggcucugcuuguucgugugugugucguugcaggccuuauucaagcuuaccauggaccccaacgccaauccuaacgcuaauccgaacgccaaucccaacgcgaauccuaacgcuaaucccaacgccaauccuaacgccaaucccaacgcuaauccuaacgccaacccgaaugcuaaccccaaugccaacccuaaugcgaaccccaaugccaacccuaaugcuaaccccaaugccaacccgaaugcuaacccuaaugccaaccccaacgcgaauccuaacaagaauaaccagggcaaugggcaaggacacaacaugcccaaugaucccaacagaaauguggacgagaacgccaaugcuaacagcgccgucaaaaauaacaauaacgaggaaccuuccgauaagcauaucaaagaauaccugaacaagauucaaaauucucucagcaccgagugguccccgugcucuguuacauguggcaacgggauccaggugcggauuaaacccggaagcgcuaauaagccuaaggacgaacuggauuaugccaacgacaucgagaaaaagauuugcaaaauggagaaguguuccucugugcccgucacgaauauggaaaacaucaccagcggcuuccuugggccucugcucgugcugcaggccggauuuuuccuucugacacgcauccucaccauuccccagucccuggauagcugguggacaucucugaauuuucucggcggcuccccgguuugccuggggcagaacagccagucuccuaccuccaaucacagccccacaucuuguccucccaucugcccuggauacagauggaugugucuucggcgcuucauuaucuuucuguucauucuccugcuuugccugaucuuucuccuggugcugcucgacuaucagggcaugcugcccgucuguccgcuuauuccuggguccaccacgaccaacacaggacccugcaaaaccuguacaacccccgcucaaggcaauagcauguucccuuccugcugcuguacgaagccgacagaugggaacugcaccuguauccccaucccuucuagcugggcguuugccaaguaccugugggagugggcuuccgugagauucagcuggcucucucugcuuguucccuuugugcagugguucgucggacuguccccuacaguguggcucagcgccauuuggaugaugugguauuggggccccucucuguacagcaucguguccccuuuuauuccccugcucccgaucuucuucugccugugggucuauauuugaggacuagucccuguucccagagcccacuuuuuuuucuuuuuuugaaauaaaauagccugucuuucagaucucaaaggcucuuuucagagccaccaaaaaaaaaaaaaaaaaaaaaaaaaaaaaaaaaaaaaaaaaaaaaaaaaaaaaaaaaaaaaaaaagaauu

SEQ ID NO: 6717 - RNA, 1516 nt, Artificial Sequence
  mRNA Design a-1 (hSL-A64-N5) comprising derived and/or modified sequence from Pf(3D7)__XP_001351122.1__Pf-CSP(199-387)_L(PVTN)_HBsAg (opt5)
aggagagucccgcagucggcguccagcggcucugcuuguucgugugugugucguugcaggccuuauucaagcuuaccaugauggcccccgacccuaacgcuaauccgaacgccaaucccaacgcgaauccuaacgcuaaucccaacgccaauccuaacgccaaucccaacgcuaauccuaacgccaauccgaacgcuaaccccaaugccaacccuaaugcgaaccccaaugccaacccuaaugcuaaccccaaugccaacccgaaugcuaacccuaaugccaaccccaaugcgaacccuaacgccaaucccaacaagaauaaccagggcaaugggcaaggacacaacaugcccaaugauccuaacagaaauguggacgagaacgcuaaugccaacagcgcugucaaaaauaacaauaacgaggaaccguccgauaagcauaucaaagaauaccugaacaagauucaaaauucucucagcaccgaguggucccccugcucuguuacauguggcaacgggauccaggugcggauuaaaccuggaagcgccaauaagcccaaggacgaacuggauuaugccaacgacaucgagaaaaagauuugcaaaauggagaaguguuccucuguguucaaugucgugaacagcuccaucggccuugggccuguuacgaauauggaaaacaucaccagcggauuucugggcccccuccuggugcuucaggcuggcuucuuucugcucacacgcauucugaccaucccgcagucucuggauuccugguggacaagccucaauuuccuugggggaucuccugucugccugggccagaacucccagagccccaccucuaaucacuccccuacaagcugucccccuauuugccccggguacagauggaugugucugcggcgcuuuaucauuuuccucuuuauccugcuucugugccucauuuuccugcuggugcuccuggacuaucagggaaugcuuccgguuuguccucugauccccggcuccaccacgaccaacacagggcccugcaaaaccuguacaaccccugcgcaaggaaauucuauguuuccgagcugcugcuguacgaagcccacagauggcaacugcaccuguaucccuauucccuccagcugggccuucgcuaaguaccucugggagugggccucugugagauuuuccuggcugagccuucuggucccuuucgugcagugguuugugggccucucucccacagucuggcugagcgccaucuggaugaugugguauugggggccuucccuguacucuauuguuagccccuucaucccgcuccugccuauuuucuuuugccuuuggguguauaucugaggacuagucccuguucccagagcccacuuuuuuuucuuuuuuugaaauaaaauagccugucuuucagaucucaaaggcucuuuucagagccaccaaaaaaaaaaaaaaaaaaaaaaaaaaaaaaaaaaaaaaaaaaaaaaaaaaaaaaaaaaaaaaaaagaauu

SEQ ID NO: 6718 - RNA, 700 nt, Artificial Sequence
  mRNA Design a-1 (hSL-A64-N5) comprising derived and/or modified sequence from Pf(3D7)__XP_001351122.1__HsALB_Pf-CSP(19-152) (opt5)
aggagagucccgcagucggcguccagcggcucugcuuguucgugugugugucguugcaggccuuauucaagcuuaccaugaagugggugaccuucaucagccugcucuuucuguucuccucugccuacagccuuuuucaggaguaucaaugcuacggcuccucuagcaacacaagaguccugaaugaacucaacuaugacaaugcugggacgaaccuguacaaugagcuugaaaugaacuauuacggaaaacaggagaauugguauucccugaagaaaaacucucggagccucggcgaaaaugaugacgggaacaaugaggauaacgagaagcugcgcaaacccaagcacaagaaacugaagcagccugccgacggaaauccggaucccaacgcgaauccuaacguugaccccaacgcuaauccuaacguggaucccaaugccaacccuaauguggacccgaacgccaaucccaacgcuaauccuaacgccaaucccaacgcuaauccuaacgccaaucccaacgcgaacccgugaggacuagucccuguucccagagcccacuuuuuuuucuuuuuuugaaauaaaauagccugucuuucagaucucaaaggcucuuuucagagccaccaaaaaaaaaaaaaaaaaaaaaaaaaaaaaaaaaaaaaaaaaaaaaaaaaaaaaaaaaaaaaaaaagaauu

SEQ ID NO: 6719 - RNA, 820 nt, Artificial Sequence
  mRNA Design a-1 (hSL-A64-N5) comprising derived and/or modified sequence from Pf(3D7)__XP_001351122.1__HsALB_Pf-CSP(19-192) (opt5)
aggagagucccgcagucggcguccagcggcucugcuuguucgugugugugucguugcaggccuuauucaagcuuaccaugaagugggugaccuucaucagccugcucuuucuguucuccucugccuacagccuuuuucaggaguaucaaugcuacggcuccucuagcaacacaagaguccugaaugaacucaacuaugacaaugcugggacgaaccuguacaaugagcuugaaaugaacuauuacggaaaacaggagaauugguauucccugaagaaaaacucucggagccucggcgaaaaugaugacgggaacaaugaggauaacgagaagcugcgcaaacccaagcacaagaaacugaagcagccugccgacggaaauccggaucccaacgcgaauccuaacguugaccccaacgcuaauccuaacguggaucccaaugccaacccuaauguggacccgaacgccaaucccaacgcuaauccuaacgccaaucccaacgcuaauccuaacgccaaucccaacgcgaacccgaaugccaacccuaaugcuaaccccaaugccaacccuaaugcuaaccccaaugccaaccccaaugcgaacccuaaugccaacccgaaugcuaaccccaacgccaauccuaacgcuaaucccugaggacuagucccuguucccagagcccacuuuuuuuucuuuuuuugaaauaaaauagccugucuuucagaucucaaaggcucuuuucagagccaccaaaaaaaaaaaaaaaaaaaaaaaaaaaaaaaaaaaaaaaaaaaaaaaaaaaaaaaaaaaaaaaaagaauu

SEQ ID NO: 6720 - RNA, 1060 nt, Artificial Sequence
  mRNA Design a-1 (hSL-A64-N5) comprising derived and/or modified sequence from Pf(3D7)__XP_001351122.1__HsALB_Pf-CSP(19-272) (opt5)
aggagagucccgcagucggcguccagcggcucugcuuguucgugugugugucguugcaggccuuauucaagcuuaccaugaagugggugaccuucaucagccugcucuuucuguucuccucugccuacagccuuuuucaggaguaucaaugcuacggcuccucuagcaacacaagaguccugaaugaacucaacuaugacaaugcugggacgaaccuguacaaugagcuugaaaugaacuauuacggaaaacaggagaauugguauucccugaagaaaaacucucggagccucggcgaaaaugaugacgggaacaaugaggauaacgagaagcugcgcaaacccaagcacaagaaacugaagcagccugccgacggaaauccggaucccaacgcgaauccuaacguugaccccaacgcuaauccuaacguggaucccaaugccaacccuaauguggacccgaacgccaaucccaacgcuaauccuaacgccaaucccaacgcuaauccuaacgccaaucccaacgcgaacccgaaugccaacccuaaugcuaaccccaaugccaacccuaaugcuaaccccaaugccaaccccaaugcgaacccuaaugccaacccgaaugcuaaccccaacgccaauccuaacgcuaaucccaacgccaauccuaacgucgaucccaaugccaacccgaaugcuaacccuaaugcgaaccccaaugccaacccuaaugcuaaccccaacgccaauccuaacgccaaucccaacgcuaauccgaacgccaauccuaacgcgaaucccaacgcuaaucccaacgccaauccuaacgccaauccgaacgcuaaucccaacgccaacccuaaugcuaaccccaaugccaacccuaaugcgaaccccugaggacuagucccuguucccagagcccacuuuuuuuucuuuuuuugaaauaaaauagccugucuuucagaucucaaaggcucuuuucagagccaccaaaaaaaaaaaaaaaaaaaaaaaaaaaaaaaaaaaaaaaaaaaaaaaaaaaaaaaaaaaaaaaaagaauu

SEQ ID NO: 6721 - RNA, 1222 nt, Artificial Sequence
  mRNA Design a-1 (hSL-A64-N5) comprising derived and/or modified sequence from Pf(3D7)__XP_001351122.1__HsALB_Pf-CSP(19-272)_L(AAY)_Pf-CSP(310-3 27)_L(AAY)_Pf-CSP(346-375) (opt5)
aggagagucccgcagucggcguccagcggcucugcuuguucgugugugugucguugcaggccuuauucaagcuuaccaugaagugggugaccuucaucagccugcucuuucuguucuccucugccuacagccuuuuucaggaguaucaaugcuacggcuccucuagcaacacaagaguccugaaugaacucaacuaugacaaugcugggacgaaccuguacaaugagcuugaaaugaacuauuacggaaaacaggagaauugguauucccugaagaaaaacucucggagccucggcgaaaaugaugacgggaacaaugaggauaacgagaagcugcgcaaacccaagcacaagaaacugaagcagccugccgacggaaauccggaucccaacgcgaauccuaacguugaccccaacgcuaauccuaacguggaucccaaugccaacccuaauguggacccgaacgccaaucccaacgcuaauccuaacgccaaucccaacgcuaauccuaacgccaaucccaacgcgaacccgaaugccaacccuaaugcuaaccccaaugccaacccuaaugcuaaccccaaugccaaccccaaugcgaacccuaaugccaacccgaaugcuaaccccaacgccaauccuaacgcuaaucccaacgccaauccuaacgucgaucccaaugccaacccgaaugcuaacccuaaugcgaaccccaaugccaacccuaaugcuaaccccaacgccaauccuaacgccaaucccaacgcuaauccgaacgccaauccuaacgcgaaucccaacgcuaaucccaacgccaauccuaacgccaauccgaacgcuaaucccaacgccaacccuaaugcuaaccccaaugccaacccuaaugcgaaccccgccgcuuacgaaccuuccgacaaacauauuaaggaguaccucaauaaaauccagaacagccuggccgcuuauauuaagcccggcucugccaauaagccgaaagaugaacuugacuacgcgaacgauaucgagaagaaaauuuguaagauggagaaaugcuccugaggacuagucccuguucccagagcccacuuuuuuuucuuuuuuugaaauaaaauagccugucuuucagaucucaaaggcucuuuucagagccaccaaaaaaaaaaaaaaaaaaaaaaaaaaaaaaaaaaaaaaaaaaaaaaaaaaaaaaaaaaaaaaaaagaauu

SEQ ID NO: 6722 - RNA, 1183 nt, Artificial Sequence
  mRNA Design a-1 (hSL-A64-N5) comprising derived and/or modified sequence from Pf(3D7)__XP_001351122.1__HsALB_Pf-CSP(19-272)_L(AAY)_Pf-CSP(346-3 65)_L(AAY)_P2 (opt5)
aggagagucccgcagucggcguccagcggcucugcuuguucgugugugugucguugcaggccuuauucaagcuuaccaugaagugggugaccuucaucagccugcucuuucuguucuccucugccuacagccuuuuucaggaguaucaaugcuacggcuccucuagcaacacaagaguccugaaugaacucaacuaugacaaugcugggacgaaccuguacaaugagcuugaaaugaacuauuacggaaaacaggagaauugguauucccugaagaaaaacucucggagccucggcgaaaaugaugacgggaacaaugaggauaacgagaagcugcgcaaacccaagcacaagaaacugaagcagccugccgacggaaauccggaucccaacgcgaauccuaacguugaccccaacgcuaauccuaacguggaucccaaugccaacccuaauguggacccgaacgccaaucccaacgcuaauccuaacgccaaucccaacgcuaauccuaacgccaaucccaacgcgaacccgaaugccaacccuaaugcuaaccccaaugccaacccuaaugcuaaccccaaugccaaccccaaugcgaacccuaaugccaacccgaaugcuaaccccaacgccaauccuaacgcuaaucccaacgccaauccuaacgucgaucccaaugccaacccgaaugcuaacccuaaugcgaaccccaaugccaacccuaaugcuaaccccaacgccaauccuaacgccaaucccaacgcuaauccgaacgccaauccuaacgcgaaucccaacgcuaaucccaacgccaauccuaacgccaauccgaacgcuaaucccaacgccaacccuaaugcuaaccccaaugccaacccuaaugcgaaccccgccgcuuacauuaaaccuggcuccgccaauaagcccaaagacgaacucgauuacgcuaacgacaucgaggccgcguaucaguacauuaaggccaauagcaaguucaucgggauuaccgaacugugaggacuagucccuguucccagagcccacuuuuuuuucuuuuuuugaaauaaaauagccugucuuucagaucucaaaggcucuuuucagagccaccaaaaaaaaaaaaaaaaaaaaaaaaaaaaaaaaaaaaaaaaaaaaaaaaaaaaaaaaaaaaaaaaagaauu

SEQ ID NO: 6723 - RNA, 1177 nt, Artificial Sequence
  mRNA Design a-1 (hSL-A64-N5) comprising derived and/or modified sequence from Pf(3D7)__XP_001351122.1__HsALB_Pf-CSP(19-272)_L(AAY)_Pf-CSP(346-3 65)_L(AAY)_PADRE (opt5)
aggagagucccgcagucggcguccagcggcucugcuuguucgugugugugucguugcaggccuuauucaagcuuaccaugaagugggugaccuucaucagccugcucuuucuguucuccucugccuacagccuuuuucaggaguaucaaugcuacggcuccucuagcaacacaagaguccugaaugaacucaacuaugacaaugcugggacgaaccuguacaaugagcuugaaaugaacuauuacggaaaacaggagaauugguauucccugaagaaaaacucucggagccucggcgaaaaugaugacgggaacaaugaggauaacgagaagcugcgcaaacccaagcacaagaaacugaagcagccugccgacggaaauccggaucccaacgcgaauccuaacguugaccccaacgcuaauccuaacguggaucccaaugccaacccuaauguggacccgaacgccaaucccaacgcuaauccuaacgccaaucccaacgcuaauccuaacgccaaucccaacgcgaacccgaaugccaacccuaaugcuaaccccaaugccaacccuaaugcuaaccccaaugccaaccccaaugcgaacccuaaugccaacccgaaugcuaaccccaacgccaauccuaacgcuaaucccaacgccaauccuaacgucgaucccaaugccaacccgaaugcuaacccuaaugcgaaccccaaugccaacccuaaugcuaaccccaacgccaauccuaacgccaaucccaacgcuaauccgaacgccaauccuaacgcgaaucccaacgcuaaucccaacgccaauccuaacgccaauccgaacgcuaaucccaacgccaacccuaaugcuaaccccaaugccaacccuaaugcgaaccccgccgcuuacauuaaaccuggcuccgccaauaagcccaaagacgaacucgauuacgcuaacgacaucgaggccgcguaugccaaguucguggcugccuggacccugaaggcugccgccugaggacuagucccuguucccagagcccacuuuuuuuucuuuuuuugaaauaaaauagccugucuuucagaucucaaaggcucuuuucagagccaccaaaaaaaaaaaaaaaaaaaaaaaaaaaaaaaaaaaaaaaaaaaaaaaaaaaaaaaaaaaaaaaaagaauu

SEQ ID NO: 6724 - RNA, 1234 nt, Artificial Sequence
  mRNA Design a-1 (hSL-A64-N5) comprising derived and/or modified sequence from Pf(3D7)__XP_001351122.1__HsALB_Pf-CSP(19-272)_L(G4S)_Pf-CSP(310-3 27)_L(G4S)_Pf-CSP(346-375) (opt5)
aggagagucccgcagucggcguccagcggcucugcuuguucgugugugugucguugcaggccuuauucaagcuuaccaugaagugggugaccuucaucagccugcucuuucuguucuccucugccuacagccuuuuucaggaguaucaaugcuacggcuccucuagcaacacaagaguccugaaugaacucaacuaugacaaugcugggacgaaccuguacaaugagcuugaaaugaacuauuacggaaaacaggagaauugguauucccugaagaaaaacucucggagccucggcgaaaaugaugacgggaacaaugaggauaacgagaagcugcgcaaacccaagcacaagaaacugaagcagccugccgacggaaauccggaucccaacgcgaauccuaacguugaccccaacgcuaauccuaacguggaucccaaugccaacccuaauguggacccgaacgccaaucccaacgcuaauccuaacgccaaucccaacgcuaauccuaacgccaaucccaacgcgaacccgaaugccaacccuaaugcuaaccccaaugccaacccuaaugcuaaccccaaugccaaccccaaugcgaacccuaaugccaacccgaaugcuaaccccaacgccaauccuaacgcuaaucccaacgccaauccuaacgucgaucccaaugccaacccgaaugcuaacccuaaugcgaaccccaaugccaacccuaaugcuaaccccaacgccaauccuaacgccaaucccaacgcuaauccgaacgccaauccuaacgcgaaucccaacgcuaaucccaacgccaauccuaacgccaauccgaacgcuaaucccaacgccaacccuaaugcuaaccccaaugccaacccuaaugcgaaccccggcgggggaggcuccgaaccuagcgacaaacauauuaaggaguaccucaauaaaauccagaacucucugggcgggggaggcuccauuaagcccgggagcgccaauaagccgaaagaugaacuugacuacgcuaacgauaucgagaagaaaauuuguaagauggagaaaugcucuugaggacuagucccuguucccagagcccacuuuuuuuucuuuuuuugaaauaaaauagccugucuuucagaucucaaaggcucuuuucagagccaccaaaaaaaaaaaaaaaaaaaaaaaaaaaaaaaaaaaaaaaaaaaaaaaaaaaaaaaaaaaaaaaaagaauu

SEQ ID NO: 6725 - RNA, 1219 nt, Artificial Sequence
  mRNA Design a-1 (hSL-A64-N5) comprising derived and/or modified sequence from Pf(3D7)__XP_001351122.1__HsALB_Pf-CSP(19-272)_L(G4S)_Pf-CSP(310-3 27)_Pf-CSP(346-375) (opt5)
aggagagucccgcagucggcguccagcggcucugcuuguucgugugugugucguugcaggccuuauucaagcuuaccaugaagugggugaccuucaucagccugcucuuucuguucuccucugccuacagccuuuuucaggaguaucaaugcuacggcuccucuagcaacacaagaguccugaaugaacucaacuaugacaaugcugggacgaaccuguacaaugagcuugaaaugaacuauuacggaaaacaggagaauugguauucccugaagaaaaacucucggagccucggcgaaaaugaugacgggaacaaugaggauaacgagaagcugcgcaaacccaagcacaagaaacugaagcagccugccgacggaaauccggaucccaacgcgaauccuaacguugaccccaacgcuaauccuaacguggaucccaaugccaacccuaauguggacccgaacgccaaucccaacgcuaauccuaacgccaaucccaacgcuaauccuaacgccaaucccaacgcgaacccgaaugccaacccuaaugcuaaccccaaugccaacccuaaugcuaaccccaaugccaaccccaaugcgaacccuaaugccaacccgaaugcuaaccccaacgccaauccuaacgcuaaucccaacgccaauccuaacgucgaucccaaugccaacccgaaugcuaacccuaaugcgaaccccaaugccaacccuaaugcuaaccccaacgccaauccuaacgccaaucccaacgcuaauccgaacgccaauccuaacgcgaaucccaacgcuaaucccaacgccaauccuaacgccaauccgaacgcuaaucccaacgccaacccuaaugcuaaccccaaugccaacccuaaugcgaaccccggcgggggaggcuccgaaccuagcgacaaacauauuaaggaguaccucaauaaaauccagaacucucugauuaagcccggcuccgccaauaagccgaaagaugaacuugacuacgcuaacgauaucgagaagaaaauuuguaagauggagaaaugcagcugaggacuagucccuguucccagagcccacuuuuuuuucuuuuuuugaaauaaaauagccugucuuucagaucucaaaggcucuuuucagagccaccaaaaaaaaaaaaaaaaaaaaaaaaaaaaaaaaaaaaaaaaaaaaaaaaaaaaaaaaaaaaaaaaagaauu

SEQ ID NO: 6726 - RNA, 1219 nt, Artificial Sequence
  mRNA Design a-1 (hSL-A64-N5) comprising derived and/or modified sequence from Pf(3D7)__XP_001351122.1__HsALB_Pf-CSP(19-325) (opt5)
aggagagucccgcagucggcguccagcggcucugcuuguucgugugugugucguugcaggccuuauucaagcuuaccaugaagugggugaccuucaucagccugcucuuucuguucuccucugccuacagccuuuuucaggaguaucaaugcuacggcuccucuagcaacacaagaguccugaaugaacucaacuaugacaaugcugggacgaaccuguacaaugagcuugaaaugaacuauuacggaaaacaggagaauugguauucccugaagaaaaacucucggagccucggcgaaaaugaugacgggaacaaugaggauaacgagaagcugcgcaaacccaagcacaagaaacugaagcagccugccgacggaaauccggaucccaacgcgaauccuaacguugaccccaacgcuaauccuaacguggaucccaaugccaacccuaauguggacccgaacgccaaucccaacgcuaauccuaacgccaaucccaacgcuaauccuaacgccaaucccaacgcgaacccgaaugccaacccuaaugcuaaccccaaugccaacccuaaugcuaaccccaaugccaaccccaaugcgaacccuaaugccaacccgaaugcuaaccccaacgccaauccuaacgcuaaucccaacgccaauccuaacgucgaucccaaugccaacccgaaugcuaacccuaaugcgaaccccaaugccaacccuaaugcuaaccccaacgccaauccuaacgccaaucccaacgcuaauccgaacgccaauccuaacgcgaaucccaacgcuaaucccaacgccaauccuaacgccaauccgaacgcuaaucccaacgccaacccuaaugcuaaccccaaugccaacccuaaugcgaaccccaauaaaaacaaucagggcaacgggcaaggacauaauaugccuaacgaccccaauagaaacguggaugaaaaugccaacgcuaacuccgccguuaagaauaacaauaacgaggaaccgagcgacaaacacauuaaggaguaccucaauaagauccagaacugaggacuagucccuguucccagagcccacuuuuuuuucuuuuuuugaaauaaaauagccugucuuucagaucucaaaggcucuuuucagagccaccaaaaaaaaaaaaaaaaaaaaaaaaaaaaaaaaaaaaaaaaaaaaaaaaaaaaaaaaaaaaaaaaagaauu

SEQ ID NO: 6727 - RNA, 1396 nt, Artificial Sequence
  mRNA Design a-1 (hSL-A64-N5) comprising derived and/or modified sequence from Pf(3D7)__XP_001351122.1__HsALB_Pf-CSP(19-384) (opt5)
aggagagucccgcagucggcguccagcggcucugcuuguucgugugugugucguugcaggccuuauucaagcuuaccaugaagugggugaccuucaucagccugcucuuucuguucuccucugccuacagccuuuuucaggaguaucaaugcuacggcuccucuagcaacacaagagugcugaaugaacucaacuaugacaaugcugggacgaaccuguacaaugagcuugaaaugaacuauuacggaaaacaggagaauugguauucccugaagaaaaacucucggagccucggcgaaaaugaugacgggaacaaugaggauaacgagaagcugcgcaaacccaagcacaagaaacugaagcagccugccgacggaaauccggaucccaacgcgaauccuaacguugaccccaacgcuaauccuaacguggaucccaaugccaacccuaauguggacccgaacgccaaucccaacgcuaauccuaacgccaaucccaacgcuaauccuaacgccaaucccaacgcgaacccgaaugccaacccuaaugcuaaccccaaugccaacccuaaugcuaaccccaaugccaaccccaaugcgaacccuaaugccaacccgaaugcuaaccccaacgccaauccuaacgcuaaucccaacgccaauccuaacgucgaucccaaugccaacccgaaugcuaacccuaaugcgaaccccaaugccaacccuaaugcuaaccccaacgccaauccuaacgccaaucccaacgcuaauccgaacgccaauccuaacgcgaaucccaacgcuaaucccaacgccaauccuaacgccaauccgaacgcuaaucccaacgccaacccuaaugcuaaccccaaugccaacccuaaugcgaaccccaauaaaaacaaucagggcaacgggcaaggacauaauaugccuaacgaccccaauagaaacguggaugaaaaugccaacgcuaacuccgccguuaagaauaacaauaacgaggaaccgagcgacaaacacauuaaggaguaccucaauaagauccagaacucucuguccaccgaguggagcccuuguucugugacaugcggcaauggcauucagguccggaucaaacccggguccgcuaacaagccuaaagaugaacuugacuacgccaaugacauugagaagaaaaucuguaagauggaaaaaugcagcucuguguucaacguugucaauuccagcugaggacuagucccuguucccagagcccacuuuuuuuucuuuuuuugaaauaaaauagccugucuuucagaucucaaaggcucuuuucagagccaccaaaaaaaaaaaaaaaaaaaaaaaaaaaaaaaaaaaaaaaaaaaaaaaaaaaaaaaaaaaaaaaaagaauu

SEQ ID NO: 6728 - RNA, 1534 nt, Artificial Sequence
  mRNA Design a-1 (hSL-A64-N5) comprising derived and/or modified sequence from Pf(3D7)__XP_001351122.1__HsALB_Pf-CSP(19-384)_TM domain HA (opt5)
aggagagucccgcagucggcguccagcggcucugcuuguucgugugugugucguugcaggccuuauucaagcuuaccaugaagugggugaccuucaucagccugcucuuucuguucuccucugccuacagccuuuuucaggaguaucaaugcuacggcuccucuagcaacacaagaguccugaaugaacucaacuaugacaaugcugggacgaaccuguacaaugagcuugaaaugaacuauuacggaaaacaggagaauugguauucccugaagaaaaacucucggagccucggcgaaaaugaugacgggaacaaugaggauaacgagaagcugcgcaaacccaagcacaagaaacugaagcagccugccgacggaaauccggaucccaacgcgaauccuaacguugaccccaacgcuaauccuaacguggaucccaaugccaacccuaauguggacccgaacgccaaucccaacgcuaauccuaacgccaaucccaacgcuaauccuaacgccaaucccaacgcgaacccgaaugccaacccuaaugcuaaccccaaugccaacccuaaugcuaaccccaaugccaaccccaaugcgaacccuaaugccaacccgaaugcuaaccccaacgccaauccuaacgcuaaucccaacgccaauccuaacgucgaucccaaugccaacccgaaugcuaacccuaaugcgaaccccaaugccaacccuaaugcuaaccccaacgccaauccuaacgccaaucccaacgcuaauccgaacgccaauccuaacgcgaaucccaacgcuaaucccaacgccaauccuaacgccaauccgaacgcuaaucccaacgccaacccuaaugcuaaccccaaugccaacccuaaugcgaaccccaauaaaaacaaucagggcaacgggcaaggacauaauaugccuaacgaccccaauagaaacguggaugaaaaugccaacgcuaacuccgccguuaagaauaacaauaacgaggaaccgagcgacaaacacauuaaggaguaccucaauaagauccagaacucucuguccaccgaguggagcccuuguucugugacaugcggcaauggcauucagguccggaucaaacccggguccgcuaacaagccuaaagaugaacuugacuacgccaaugacauugagaagaaaaucuguaagauggaaaaaugcagcucuguguucaacguugucaauuccagcaagcuggaguccacccgcaucuaucagauucucgcgaucuacucuacaguggccagcucccuggugcuuguggucagccugggagcuauuucuuuuuggauguguuccaacggcagccuccaaugcagaaucuguauuugaggacuagucccuguucccagagcccacuuuuuuuucuuuuuuugaaauaaaauagccugucuuucagaucucaaaggcucuuuucagagccaccaaaaaaaaaaaaaaaaaaaaaaaaaaaaaaaaaaaaaaaaaaaaaaaaaaaaaaaaaaaaaaaaagaauu

SEQ ID NO: 6729 - RNA, 1246 nt, Artificial Sequence
  mRNA Design a-1 (hSL-A64-N5) comprising derived and/or modified sequence from Pf(3D7)__XP_001351122.1__HsALB_Pf-CSP(82-397) (opt5)
aggagagucccgcagucggcguccagcggcucugcuuguucgugugugugucguugcaggccuuauucaagcuuaccaugaagugggugaccuucaucagccugcucuuucuguucuccucugccuacagcgacaacgagaaacuuagaaagcccaaacacaagaaacugaagcagccugcugauggcaauccggaccccaacgccaauccuaacgucgaucccaaugcgaacccuaauguugaccccaacgcuaauccuaacguggauccgaaugccaaccccaaugccaacccuaaugcuaaccccaacgccaauccuaacgcuaaucccaacgccaauccgaacgcgaauccuaacgccaaucccaacgcuaauccuaacgccaaucccaacgcuaaucccaacgccaacccuaaugcgaacccgaaugccaaccccaaugcuaacccuaaugccaaccccaaugcuaacccuaauguggaccccaacgccaauccgaacgccaauccuaacgcuaaccccaaugcgaacccuaaugccaaccccaaugcuaacccuaaugccaaccccaaugccaacccgaaugcuaacccuaaugccaaccccaaugcgaaccccaacgcuaauccuaacgccaauccgaacgccaaucccaacgcuaauccuaacgccaaucccaacgcuaauccuaacgccaaucccaacaagaauaaccaagggaauggacagggccauaacaugccuaacgaucccaaucggaacgucgacgaaaaugcgaacgccaauuccgcugugaaaaacaauaacaaugaggaaccgucugauaagcacauuaaagaguaucucaacaagauccagaauagccuguccacagaauggucuccuugcagcguuacgugugggaacggcauucaggugcgcaucaaacccggauccgccaauaagccuaaggacgagcuugauuacgcuaacgacauugagaaaaagaucugcaaaauggaaaaguguagcucugucuuuaaugugguuaacuccagcaucgggcugauuauggugcucucuuuccuguuucugaacugaggacuagucccuguucccagagcccacuuuuuuuucuuuuuuugaaauaaaauagccugucuuucagaucucaaaggcucuuuucagagccaccaaaaaaaaaaaaaaaaaaaaaaaaaaaaaaaaaaaaaaaaaaaaaaaaaaaaaaaaaaaaaaaaagaauu

SEQ ID NO: 6730 - RNA, 598 nt, Artificial Sequence
  mRNA Design a-1 (hSL-A64-N5) comprising derived and/or modified sequence from Pf(3D7)__XP_001351122.1__HsALB_Pf-CSP(93-192) (opt5)
aggagagucccgcagucggcguccagcggcucugcuuguucgugugugugucguugcaggccuuauucaagcuuaccaugaagugggugaccuucaucagccugcucuuucuguucuccucugccuacagcaaacuuaagcagcccgcugacggcaacccugauccgaaugccaaccccaaugucgacccuaacgcgaaucccaacguugauccuaaugcuaaccccaauguggacccuaacgccaauccgaacgccaaucccaacgcuaauccuaacgccaaccccaaugcuaacccuaaugccaaccccaaugcgaacccgaaugccaacccuaaugcuaaccccaaugccaacccuaaugcuaaccccaaugccaaccccaacgcgaauccuaacgccaauccgaacgcuaaucccaacgccaauccuugaggacuagucccuguucccagagcccacuuuuuuuucuuuuuuugaaauaaaauagccugucuuucagaucucaaaggcucuuuucagagccaccaaaaaaaaaaaaaaaaaaaaaaaaaaaaaaaaaaaaaaaaaaaaaaaaaaaaaaaaaaaaaaaaagaauu

SEQ ID NO: 6731 - RNA, 838 nt, Artificial Sequence
  mRNA Design a-1 (hSL-A64-N5) comprising derived and/or modified sequence from Pf(3D7)__XP_001351122.1__HsALB_Pf-CSP(93-272) (opt5)
aggagagucccgcagucggcguccagcggcucugcuuguucgugugugugucguugcaggccuuauucaagcuuaccaugaagugggugaccuucaucagccugcucuuucuguucuccucugccuacagcaaacuuaagcagcccgcugacggcaacccugauccgaaugccaaccccaaugucgacccuaacgcgaaucccaacguugauccuaaugcuaaccccaauguggacccuaacgccaauccgaacgccaaucccaacgcuaauccuaacgccaaccccaaugcuaacccuaaugccaaccccaaugcgaacccgaaugccaacccuaaugcuaaccccaaugccaacccuaaugcuaaccccaaugccaaccccaacgcgaauccuaacgccaauccgaacgcuaaucccaacgccaauccuaacgcuaaucccaacguggauccuaaugccaaccccaaugccaacccgaaugcuaacccuaacgcgaaucccaacgccaauccuaacgcuaaucccaacgccaauccuaacgccaaucccaacgcuaauccgaacgccaauccuaacgcgaaucccaacgcuaaccccaaugccaacccuaaugccaacccgaaugcuaaccccaaugccaacccuaaugcuaaccccaaugccaacccuugaggacuagucccuguucccagagcccacuuuuuuuucuuuuuuugaaauaaaauagccugucuuucagaucucaaaggcucuuuucagagccaccaaaaaaaaaaaaaaaaaaaaaaaaaaaaaaaaaaaaaaaaaaaaaaaaaaaaaaaaaaaaaaaaagaauu

SEQ ID NO: 6732 - RNA, 1213 nt, Artificial Sequence
  mRNA Design a-1 (hSL-A64-N5) comprising derived and/or modified sequence from Pf(3D7)__XP_001351122.1__HsALB_Pf-CSP(93-397) (opt5)
aggagagucccgcagucggcguccagcggcucugcuuguucgugugugugucguugcaggccuuauucaagcuuaccaugaagugggugaccuucaucagccugcucuuucuguucuccucugccuacagcaaacuuaagcagcccgcugacggcaacccugauccgaaugccaaccccaaugucgacccuaacgcgaaucccaacguugauccuaaugcuaaccccaauguggacccuaacgccaauccgaacgccaaucccaacgcuaauccuaacgccaaccccaaugcuaacccuaaugccaaccccaaugcgaacccgaaugccaacccuaaugcuaaccccaaugccaacccuaaugcuaaccccaaugccaaccccaacgcgaauccuaacgccaauccgaacgcuaaucccaacgccaauccuaacgcuaaucccaacguggauccuaaugccaaccccaaugccaacccgaaugcuaacccuaacgcgaaucccaacgccaauccuaacgcuaaucccaacgccaauccuaacgccaaucccaacgcuaauccgaacgccaauccuaacgcgaaucccaacgcuaaccccaaugccaacccuaaugccaacccgaaugcuaaccccaaugccaacccuaaugcuaaccccaaugccaacccuaauaaaaacaaucaagggaacggacagggccacaauaugcccaacgacccuaacagaaaugucgaugagaacgcgaaugccaacuccgcugugaagaauaacaauaacgaggaacccucugacaaacauauuaaggaauaucugaauaagauccagaacagccucuccacagaguggucuccgugcagcguuacgugugggaauggcauucaggugcggaucaaaccuggauccgccaacaagcccaaagaugaacuggacuacgcuaaugauauugagaagaaaaucugcaagauggagaaguguagcucugucuuuaacgugguuaauuccagcaucgggcuuauuauggugcugucuuuccucuuucugaacugaggacuagucccuguucccagagcccacuuuuuuuucuuuuuuugaaauaaaauagccugucuuucagaucucaaaggcucuuuucagagccaccaaaaaaaaaaaaaaaaaaaaaaaaaaaaaaaaaaaaaaaaaaaaaaaaaaaaaaaaaaaaaaaaagaauu

SEQ ID NO: 6733 - RNA, 583 nt, Artificial Sequence
  mRNA Design a-1 (hSL-A64-N5) comprising derived and/or modified sequence from Pf(3D7)__XP_001351122.1__HsALB_Pf-CSP(98-192) (opt5)
aggagagucccgcagucggcguccagcggcucugcuuguucgugugugugucguugcaggccuuauucaagcuuaccaugaagugggugaccuucaucagccugcucuuucuguucuccucugccuacagcgcugacggcaaccccgauccuaaugccaacccgaaugucgaccccaacgcgaauccuaacguugaucccaaugcuaacccuaauguggaccccaacgccaauccuaacgccaauccgaacgcuaaucccaacgccaacccuaaugcuaaccccaaugccaacccuaaugcgaaccccaaugccaacccgaaugcuaacccuaaugccaaccccaaugcuaacccuaaugccaaccccaacgcgaaucccaacgccaauccuaacgcuaauccgaacgccaaucccugaggacuagucccuguucccagagcccacuuuuuuuucuuuuuuugaaauaaaauagccugucuuucagaucucaaaggcucuuuucagagccaccaaaaaaaaaaaaaaaaaaaaaaaaaaaaaaaaaaaaaaaaaaaaaaaaaaaaaaaaaaaaaaaaagaauu

SEQ ID NO: 6734 - RNA, 823 nt, Artificial Sequence
  mRNA Design a-1 (hSL-A64-N5) comprising derived and/or modified sequence from Pf(3D7)__XP_001351122.1__HsALB_Pf-CSP(98-272) (opt5)
aggagagucccgcagucggcguccagcggcucugcuuguucgugugugugucguugcaggccuuauucaagcuuaccaugaagugggugaccuucaucagccugcucuuucuguucuccucugccuacagcgcugacggcaaccccgauccuaaugccaacccgaaugucgaccccaacgcgaauccuaacguugaucccaaugcuaacccuaauguggaccccaacgccaauccuaacgccaauccgaacgcuaaucccaacgccaacccuaaugcuaaccccaaugccaacccuaaugcgaaccccaaugccaacccgaaugcuaacccuaaugccaaccccaaugcuaacccuaaugccaaccccaacgcgaaucccaacgccaauccuaacgcuaauccgaacgccaaucccaacgcuaauccuaacguggaucccaaugccaacccuaaugccaaccccaaugcuaacccgaacgcgaauccuaacgccaaucccaacgcuaauccuaacgccaaucccaacgccaauccuaacgcuaaucccaacgccaauccgaacgcgaauccuaacgcuaaccccaaugccaaccccaaugccaacccuaaugcuaacccgaaugccaaccccaaugcuaacccuaaugccaaccccugaggacuagucccuguucccagagcccacuuuuuuuucuuuuuuugaaauaaaauagccugucuuucagaucucaaaggcucuuuucagagccaccaaaaaaaaaaaaaaaaaaaaaaaaaaaaaaaaaaaaaaaaaaaaaaaaaaaaaaaaaaaaaaaaagaauu

SEQ ID NO: 6735 - RNA, 1129 nt, Artificial Sequence
  mRNA Design a-1 (hSL-A64-N5) comprising derived and/or modified sequence from Pf(3D7)__XP_001351122.1__HsALB_Pf-CSP(98-374) (opt5)
aggagagucccgcagucggcguccagcggcucugcuuguucgugugugugucguugcaggccuuauucaagcuuaccaugaagugggugaccuucaucagccugcucuuucuguucuccucugccuacagcgcugacggcaaccccgauccuaaugccaacccgaaugucgaccccaacgcgaauccuaacguugaucccaaugcuaacccuaauguggaccccaacgccaauccuaacgccaauccgaacgcuaaucccaacgccaacccuaaugcuaaccccaaugccaacccuaaugcgaaccccaaugccaacccgaaugcuaacccuaaugccaaccccaaugcuaacccuaaugccaaccccaacgcgaaucccaacgccaauccuaacgcuaauccgaacgccaaucccaacgcuaauccuaacguggaucccaaugccaacccuaaugccaaccccaaugcuaacccgaacgcgaauccuaacgccaaucccaacgcuaauccuaacgccaaucccaacgccaauccuaacgcuaaucccaacgccaauccgaacgcgaauccuaacgcuaaccccaaugccaaccccaaugccaacccuaaugcuaacccgaaugccaaccccaaugcuaacccuaaugccaaccccaauaaaaacaaucaggggaacggacaaggccacaauaugccuaacgaccccaacagaaaugucgaugagaacgcgaaugccaacuccgcugugaagaauaacaauaacgaggaaccuucugacaaacauauuaaggaauaucuuaauaaaauccagaacagccuguccacagaguggucucccugcagcguuacgugugggaauggcauucaggugcggaucaagccgggauccgccaacaagccuaaagaugaacucgacuacgcuaaugauauugagaagaaaaucugcaagauggagaaauguugaggacuagucccuguucccagagcccacuuuuuuuucuuuuuuugaaauaaaauagccugucuuucagaucucaaaggcucuuuucagagccaccaaaaaaaaaaaaaaaaaaaaaaaaaaaaaaaaaaaaaaaaaaaaaaaaaaaaaaaaaaaaaaaaagaauu

SEQ ID NO: 6736 - RNA, 1198 nt, Artificial Sequence
  mRNA Design a-1 (hSL-A64-N5) comprising derived and/or modified sequence from Pf(3D7)__XP_001351122.1__HsALB_Pf-CSP(98-397) (opt5)
aggagagucccgcagucggcguccagcggcucugcuuguucgugugugugucguugcaggccuuauucaagcuuaccaugaagugggugaccuucaucagccugcucuuucuguucuccucugccuacagcgcugacggcaaccccgauccuaaugccaacccgaaugucgaccccaacgcgaauccuaacguugaucccaaugcuaacccuaauguggaccccaacgccaauccuaacgccaauccgaacgcuaaucccaacgccaacccuaaugcuaaccccaaugccaacccuaaugcgaaccccaaugccaacccgaaugcuaacccuaaugccaaccccaaugcuaacccuaaugccaaccccaacgcgaaucccaacgccaauccuaacgcuaauccgaacgccaaucccaacgcuaauccuaacguggaucccaaugccaacccuaaugccaaccccaaugcuaacccgaacgcgaauccuaacgccaaucccaacgcuaauccuaacgccaaucccaacgccaauccuaacgcuaaucccaacgccaauccgaacgcgaauccuaacgcuaaccccaaugccaaccccaaugccaacccuaaugcuaacccgaaugccaaccccaaugcuaacccuaaugccaaccccaauaaaaacaaucaggggaacggacaaggccacaauaugccuaacgaccccaacagaaaugucgaugagaacgcgaaugccaacuccgcugugaagaauaacaauaacgaggaaccuucugacaaacauauuaaggaauaucuuaauaaaauccagaacagccuguccacagaguggucucccugcagcguuacgugugggaauggcauucaggugcggaucaagccgggauccgccaacaagccuaaagaugaacucgacuacgcuaaugauauugagaagaaaaucugcaagauggagaaauguagcucugucuuuaacgugguuaauuccagcaucgggcugauuauggugcuuucuuuccuguuucucaacugaggacuagucccuguucccagagcccacuuuuuuuucuuuuuuugaaauaaaauagccugucuuucagaucucaaaggcucuuuucagagccaccaaaaaaaaaaaaaaaaaaaaaaaaaaaaaaaaaaaaaaaaaaaaaaaaaaaaaaaaaaaaaaaaagaauu

SEQ ID NO: 6737 - RNA, 1525 nt, Artificial Sequence
  mRNA Design a-1 (hSL-A64-N5) comprising derived and/or modified sequence from Pf(3D7)__XP_001351122.1__HsALB_Pf-CSP(199-377)_L(PVTN)_HBsAg (opt5)
aggagagucccgcagucggcguccagcggcucugcuuguucgugugugugucguugcaggccuuauucaagcuuaccaugaagugggugaccuucaucagccugcucuuucuguucuccucugccuacagcgaccccaacgcuaauccuaacgccaauccgaacgcgaaucccaacgcuaauccuaacgccaaucccaacgccaauccuaacgcuaaucccaacgccaauccuaacgcuaacccgaaugccaaccccaaugcgaacccuaaugccaaccccaaugcuaacccuaaugccaaccccaaugcuaacccgaaugccaacccuaaugcgaaccccaacgccaauccuaacaaaaauaaccagggcaaugggcaaggacacaacaugcccaaugaucccaacagaaaugucgacgagaacgcuaaugccaacuccgcuguuaagaauaacaauaacgaggaaccuucugauaaacauauuaaggaauaucuuaacaaaauccagaauagccuguccacagaguggucuccgugcagcgugacguguggcaacgggauucaggugcggaucaagcccggauccgccaauaagccuaaagacgaacucgauuacgccaacgacauugagaagaaaaucugcaagauggagaaauguagcucuguccccgugaccaauauggaaaacaucacauccggcuuucuggggccucuucugguucuccaggcuggauucuuucugcugacccgcauucucacaaucccccaaagccuggauucuugguggaccucccuuaauuuccugggcggcagcccggugugccucgggcagaacucucaguccccuacaagcaaucacucccccaccucuuguccucccauuugcccuggauauagauggaugugucugcggcgcuuuaucauuuuccuuuuuauccugcuccugugccugauuuuccuccugguccuucuggacuaccagggcaugcuccccguguguccgcugaucccugggagcacgaccacaaacaccggacccugcaagacauguaccacgcccgcgcaaggcaauuccauguuuccuagcugcugcuguacaaagccgaccgaugggaacugcacauguauccccauuccuucuuccugggccuucgcuaaauaucuuugggagugggccagcguuagauuuucuuggcugagccuccuggugcccuucguccagugguucgugggacuguccccuaccguguggcucucugccaucuggaugaugugguacuggggccccagccuguauuccauugucagcccuuuuaucccccuucugccgauuuucuuuugccucuggguuuacaucugaggacuagucccuguucccagagcccacuuuuuuuucuuuuuuugaaauaaaauagccugucuuucagaucucaaaggcucuuuucagagccaccaaaaaaaaaaaaaaaaaaaaaaaaaaaaaaaaaaaaaaaaaaaaaaaaaaaaaaaaaaaaaaaaagaauu

SEQ ID NO: 6738 - RNA, 1435 nt, Artificial Sequence
  mRNA Design a-1 (hSL-A64-N5) comprising derived and/or modified sequence from Pf(3D7)__XP_001351122.1__Pf-CSP (opt6)
aggagagucccgcagucggcguccagcggcucugcuuguucgugugugugucguugcaggccuuauucaagcuuaccaugaugagaaaacuugcaauacuaagcguaucuucauuccuauucguagaagcacuauuccaagaauaucaaugcuauggaucaagcuccaacacaagaguacuuaacgaacuaaauuacgacaaugcaggaacaaaccuauacaaugaacuugaaaugaauuacuacggcaaacaagaaaacugguacucccuaaaaaaaaacucaaggucauuaggagaaaacgacgacggaaacaacgaagacaacgaaaaacuacgaaaacccaaacacaaaaaauuaaaacaaccagcagacggaaaccccgacccaaacgcaaacccaaacgucgacccaaacgcaaacccgaacguagacccaaacgcgaacccaaacguagacccaaacgcaaacccaaacgcaaacccaaacgcaaacccaaacgcaaacccaaaugcaaacccaaacgcaaacccaaacgccaauccaaacgccaacccaaacgcaaacccaaacgcaaacccaaacgcaaacccaaacgcaaaccccaacgcaaacccaaacgcuaacccaaacgcaaacccuaaugcaaacccuaacgcaaacccaaacgucgacccgaacgcaaacccaaaugcaaacccaaacgcaaacccaaacgcaaaccccaacgccaacccaaaugcaaacccaaaugcaaauccaaacgcaaacccaaacgcaaacccuaacgcaaacccaaacgcaaaccccaacgcaaacccaaacgcaaacccaaacgccaacccaaacgcaaaccccaaugcaaacccaaacgcaaacccaaacgcaaacccaaacaaaaacaaucaaggcaacggacaaggacacaacaugcccaacgacccaaaccgaaacgucgacgaaaacgccaacgcaaacagcgcaguaaaaaacaacaacaacgaagaacccucagacaaacacauaaaagaauacuuaaacaaaauacaaaacucacuaucuacagaauggucacccuguagcguaaccugcggcaacggaauacaaguaagaauaaaaccaggcucagcaaacaaaccaaaagaugaacuagacuacgccaaugauauagaaaaaaaaauauguaaaauggaaaaauguagcucagucuucaacguagucaacucaucaauaggacuaauaaugguacucuccuuccucuuccuaaauuaaggacuagucccuguucccagagcccacuuuuuuuucuuuuuuugaaauaaaauagccugucuuucagaucucaaaggcucuuuucagagccaccaaaaaaaaaaaaaaaaaaaaaaaaaaaaaaaaaaaaaaaaaaaaaaaaaaaaaaaaaaaaaaaaagaauu

SEQ ID NO: 6739 - RNA, 1366 nt, Artificial Sequence
  mRNA Design a-1 (hSL-A64-N5) comprising derived and/or modified sequence from Pf(3D7)__XP_001351122.1__Pf-CSP(1-374) (opt6)
aggagagucccgcagucggcguccagcggcucugcuuguucgugugugugucguugcaggccuuauucaagcuuaccaugaugagaaaacuagcaauauuaagcguaagcucauuccuauucguugaagcauuauuccaagaauaccaaugcuacggcucaagcucaaacacaagaguauuaaacgaauuaaacuacgacaaugcaggaaccaaccucuacaacgaacuagaaaugaauuauuacggcaaacaagaaaacugguacucacucaaaaaaaacucacgaucccuaggagaaaacgaugacggaaacaaugaagauaacgaaaaauuaagaaaaccaaaacacaaaaaauuaaaacaaccugcagacggaaacccagacccaaacgcaaauccaaauguagacccaaacgcaaaccccaacguagacccaaaugcaaacccaaacguagacccaaacgcaaacccaaaugcaaacccaaacgcaaacccaaacgcaaacccaaacgcaaaccccaacgcaaacccaaacgcaaacccaaacgccaaccccaacgcaaacccaaacgcaaacccgaaugcaaacccaaacgcaaacccaaacgcaaacccaaacgcaaacccaaacgcaaacccaaacgcaaacccaaaugcaaacccaaacguggauccaaacgcaaauccaaacgcaaacccaaacgcaaacccaaacgcaaaccccaacgcaaauccaaacgcaaaccccaaugcaaauccaaacgcaaacccaaacgccaacccaaacgcaaacccgaacgccaauccaaacgcaaacccaaacgcaaacccaaacgcaaacccaaacgccaacccaaacgcaaacccaaacgcaaacccaaacgcaaaccccaacaaaaacaaccaaggaaacggacaaggacacaacaugccaaacgauccaaacagaaacgucgacgaaaacgccaacgcuaacagcgcaguaaaaaacaauaacaacgaagaaccaucagacaaacauauaaaagaauacuuaaacaaaauccaaaacucacuaucaacagaauggucccccuguuccguaacaugcggaaacggaauacaaguacgaaucaaaccaggaucagccaacaaaccgaaagacgaacuagacuaugccaacgauauagaaaaaaaaauaugcaaaauggaaaaaugcugaggacuagucccuguucccagagcccacuuuuuuuucuuuuuuugaaauaaaauagccugucuuucagaucucaaaggcucuuuucagagccaccaaaaaaaaaaaaaaaaaaaaaaaaaaaaaaaaaaaaaaaaaaaaaaaaaaaaaaaaaaaaaaaaagaauu

SEQ ID NO: 6740 - RNA, 1219 nt, Artificial Sequence
  mRNA Design a-1 (hSL-A64-N5) comprising derived and/or modified sequence from Pf(3D7)__XP_001351122.1__Pf-CSP(1-325) (opt6)
aggagagucccgcagucggcguccagcggcucugcuuguucgugugugugucguugcaggccuuauucaagcuuaccaugaugcgaaaauuagcaauacuaagcguaagcucauucuuauucguagaagcacucuuccaagaauaccaaugcuacggaucaagcucaaacacaagaguccuaaacgaauuaaacuaugacaacgcaggaacaaaccuauacaacgaacuagaaaugaacuacuacggaaaacaagaaaacugguacucacucaaaaaaaacagcagaagucuaggagaaaacgacgacggaaacaacgaagacaacgaaaaacuacgaaaaccaaaacacaaaaaacuaaaacaaccagcagacgggaacccagacccaaacgcaaacccaaacguagauccaaacgcaaacccaaauguagacccuaacgcaaacccaaauguagacccaaacgcaaacccuaacgcaaacccaaaugcaaacccaaacgcaaauccaaacgcaaacccaaacgcaaacccaaacgcgaacccaaacgcaaacccaaacgcaaacccaaaugcaaaccccaacgcaaauccaaaugcaaacccaaaugcaaauccaaacgcaaacccaaacgcaaacccaaaugcaaauccaaacgcaaauccaaacguggauccaaacgcaaacccaaacgcaaacccaaacgcaaacccaaacgcaaacccaaacgcaaacccaaacgcaaauccaaacgccaauccaaacgcaaauccaaaugcaaacccaaacgcaaacccaaacgcaaacccaaacgcaaacccaaacgcaaacccaaacgcaaacccaaacgcaaacccaaacgcaaacccaaacgcaaacccaaacgcaaacccaaacaaaaacaaccaaggaaacggacaaggacacaacaugccaaacgacccaaacagaaacguagacgaaaacgccaacgcaaauagcgcagucaaaaacaacaauaacgaagaaccaucggacaaacacauaaaagaauacuuaaacaaaauacaaaacugaggacuagucccuguucccagagcccacuuuuuuuucuuuuuuugaaauaaaauagccugucuuucagaucucaaaggcucuuuucagagccaccaaaaaaaaaaaaaaaaaaaaaaaaaaaaaaaaaaaaaaaaaaaaaaaaaaaaaaaaaaaaaaaaagaauu

SEQ ID NO: 6741 - RNA, 1435 nt, Artificial Sequence
  mRNA Design a-1 (hSL-A64-N5) comprising derived and/or modified sequence from Pf(3D7)__XP_001351122.1__HsALB_Pf-CSP(19-397) (opt6)
aggagagucccgcagucggcguccagcggcucugcuuguucgugugugugucguugcaggccuuauucaagcuuaccaugaaaugggucacauuuauuucacuacuauucuuauucucaagcgcauacucacuauuucaagaauaccaaugcuacggcucauccucaaauacacgaguacuaaaugaacucaacuacgacaacgcaggaaccaaucucuacaacgaauuagaaaugaacuacuacggcaaacaagaaaacugguauucacuaaaaaaaaacaguagaucacuaggagaaaaugacgacggaaacaaugaagacaacgaaaaacuaagaaaaccaaaacacaaaaaauuaaaacaaccagcagacggaaacccagacccaaacgcaaacccuaacguagaucccaaugccaacccaaauguagacccaaacgcaaaccccaacgucgauccaaacgcaaacccaaacgcaaacccaaacgcaaacccaaacgcaaacccaaacgcaaacccaaaugcaaaccccaacgcaaacccaaacgcuaacccaaacgcaaacccaaacgcaaacccaaacgcaaacccaaacgcaaacccaaacgccaacccaaacgccaacccaaacgcaaauccaaacgcaaacccaaaugccaauccaaacguugacccaaacgcaaacccaaacgcaaaccccaacgcaaacccaaacgcaaauccaaacgcgaaccccaacgcaaacccaaacgcaaacccaaaugcaaacccaaacgcuaacccaaaugcaaacccaaacgccaacccaaacgccaacccaaacgcaaaccccaacgcaaacccaaacgcaaacccaaacgccaauccaaacgcaaacccaaaugcaaacccaaacaaaaacaaccaaggaaacggacaaggacacaacaugccaaacgaccccaacagaaacguagaugaaaaugcaaaugcuaacucagccguaaaaaacaauaacaacgaagaaccaucagacaaacacauaaaagaauaccuaaauaaaauacaaaauuccuuaucaacagaaugguccccaugcucaguaacuugcgguaacggcauacaaguaagaauaaaaccaggaucagcaaacaaaccaaaagacgaauuagacuaugcaaacgacauagaaaaaaaaauauguaaaauggaaaaaugcagcucaguauucaacguaguaaauuccucaaucggacucaucaugguauuaucauuccuauuuuuaaauuaaggacuagucccuguucccagagcccacuuuuuuuucuuuuuuugaaauaaaauagccugucuuucagaucucaaaggcucuuuucagagccaccaaaaaaaaaaaaaaaaaaaaaaaaaaaaaaaaaaaaaaaaaaaaaaaaaaaaaaaaaaaaaaaaagaauu

SEQ ID NO: 6742 - RNA, 1453 nt, Artificial Sequence
  mRNA Design a-1 (hSL-A64-N5) comprising derived and/or modified sequence from Pf(3D7)__XP_001351122.1__HsIns-iso1_Pf-CSP(19-397) (opt6)
aggagagucccgcagucggcguccagcggcucugcuuguucgugugugugucguugcaggccuuauucaagcuuaccauggcacuauggaugagacuacuaccacuacuagcacuccuagccuuauggggacccgauccagccgcagcacucuuccaagaauaccaaugcuauggaucauccuccaacacaagaguccuaaacgaauuaaauuacgacaacgcuggaacaaaccuauacaaugaacuagaaaugaauuauuacggaaaacaagaaaauugguacucacuaaaaaaaaacucuagaagccuaggagaaaacgacgacggaaacaacgaagauaacgaaaaacuaagaaaaccaaaacacaaaaaauuaaaacaacccgcagacggcaacccagacccaaaugcaaauccaaacguagacccaaacgcaaauccaaacguagacccaaacgcaaacccaaauguagacccaaacgcaaauccaaacgcaaacccaaaugcaaacccaaaugcaaacccaaacgcaaauccaaacgcaaaucccaacgccaacccaaacgcaaacccaaacgcaaauccaaacgcaaacccaaacgcaaacccaaacgcaaacccaaacgcaaacccaaaugcaaacccaaaugccaauccaaacgccaacccaaacgcaaacccaaacguagacccaaacgcaaacccaaacgccaacccaaacgcaaaccccaaugcaaacccaaacgcaaacccaaacgcaaaccccaacgcaaauccaaacgcaaacccaaacgcaaauccaaacgcaaauccaaacgccaacccaaacgcaaacccaaacgcaaauccaaacgcaaaccccaacgcaaacccaaacgccaacccaaaugcaaacccaaacgcaaaucccaauaaaaacaaccaaggaaacggacaaggacacaacaugccaaacgauccaaacagaaacguagacgaaaacgcaaacgcaaacucagcagucaaaaacaauaacaacgaagaaccaucagacaaacacauaaaagaauaccuaaacaaaauacaaaacucacuauccacagaauggucaccaugcucaguaaccugcggaaacggaauacaaguaagaauaaaaccaggaucagccaacaaaccaaaagacgaacuagacuaugcuaaugacauagaaaaaaaaauaugcaaaauggaaaaaugcuccucaguauucaacgucguaaacucuucaauaggacuaauaaugguacuauccuucuuauuucuaaacuaaggacuagucccuguucccagagcccacuuuuuuuucuuuuuuugaaauaaaauagccugucuuucagaucucaaaggcucuuuucagagccaccaaaaaaaaaaaaaaaaaaaaaaaaaaaaaaaaaaaaaaaaaaaaaaaaaaaaaaaaaaaaaaaaagaauu

SEQ ID NO: 6743 - RNA, 1432 nt, Artificial Sequence
  mRNA Design a-1 (hSL-A64-N5) comprising derived and/or modified sequence from Pf(3D7)__XP_001351122.1__HsSPARC_Pf-CSP(19-397) (opt6)
aggagagucccgcagucggcguccagcggcucugcuuguucgugugugugucguugcaggccuuauucaagcuuaccaugcgcgcauggauauucuuccuccuaugucuagcaggucgagcacuugcacucuuccaagaauaccaauguuacggauccucaagcaacacacgaguacuaaacgaacuaaacuacgauaacgcaggaaccaacuuauacaacgaacuagaaaugaacuacuacggcaaacaagaaaacugguacucacucaaaaaaaacagcagaagccuaggagaaaaugacgacggaaacaacgaagauaacgaaaaauuacgaaaacccaaacacaaaaaauuaaaacaacccgcagauggaaauccagacccgaacgcaaacccaaacguagacccaaacgcaaacccaaacguugacccaaacgcaaacccaaacguagacccaaacgcaaacccuaacgccaacccaaacgcaaacccaaacgcaaacccaaaugcgaacccaaaugcaaacccaaacgccaacccaaaugcaaaccccaacgcaaauccaaacgcaaacccaaaugcaaacccaaacgcaaacccaaacgcaaacccaaacgcaaacccaaacgccaaccccaaugcaaacccaaacgcaaacccaaacgucgacccaaacgcaaacccaaacgcaaacccaaacgcaaauccaaacgcaaauccaaacgcaaacccuaacgcaaacccaaacgcaaacccaaaugcaaauccaaacgcaaacccaaacgcaaacccaaacgcaaauccaaacgcaaacccaaacgcaaacccaaacgcaaacccuaaugcaaacccaaaugcaaauccaaacgcaaacccaaaugcaaaccccaacaaaaacaaccaaggaaacggacaaggacacaauaugccaaacgacccaaacagaaacguagacgaaaacgcaaacgccaacagcgcaguaaaaaacaacaacaacgaagaaccaucagacaaacacauaaaagaauaccuaaacaaaauacaaaacucacuaucaacagaauggucucccugcuccguaacaugcggaaacggcauacaaguacgaauaaaaccuggaucagccaacaaaccaaaagacgaacuagacuaugcaaaugacauagaaaaaaaaauaugcaaaauggaaaaaugcaguucagucuucaacguagucaacagcucaauaggccuaauaaugguacucucauuccuauucuuaaacuaaggacuagucccuguucccagagcccacuuuuuuuucuuuuuuugaaauaaaauagccugucuuucagaucucaaaggcucuuuucagagccaccaaaaaaaaaaaaaaaaaaaaaaaaaaaaaaaaaaaaaaaaaaaaaaaaaaaaaaaaaaaaaaaaagaauu

SEQ ID NO: 6744 - RNA, 1435 nt, Artificial Sequence
  mRNA Design a-1 (hSL-A64-N5) comprising derived and/or modified sequence from Pf(3D7)__XP_001351122.1__IgE_Pf-CSP(19-397) (opt6)
aggagagucccgcagucggcguccagcggcucugcuuguucgugugugugucguugcaggccuuauucaagcuuaccauggauuggacauggauucucuuccucguagcagcagccacaagaguacacucuuuauuucaagaauaccaaugcuacggaucaagcucaaacacacgcguacuaaacgaacuaaacuacgacaacgcaggaacaaacuuauacaacgaacuagaaaugaacuauuauggcaaacaagaaaacugguacucacuaaaaaaaaacuccagaagcuuaggagaaaacgacgacggaaacaacgaagacaacgaaaaacuacgcaaaccuaaacacaaaaaacuaaaacaaccugcagacggaaacccagacccaaacgcgaacccaaacguagauccaaacgcaaacccaaacguagaucccaacgcaaacccgaacguagacccuaacgcaaauccaaacgcaaaccccaacgcaaacccgaacgcaaacccaaacgcaaacccaaacgcaaacccaaacgcaaacccaaacgcaaacccaaacgccaacccaaacgcaaauccaaacgcuaacccaaaugcaaacccuaacgcaaacccaaacgccaacccaaacgcaaacccaaacgcaaacccaaacgcaaaucccaauguagacccaaacgcaaacccaaacgcaaacccaaacgcuaacccaaaugcaaacccaaacgcaaacccaaacgcaaacccaaacgcuaaccccaacgcaaacccgaacgcaaacccaaaugcaaacccaaacgcaaacccaaaugcaaacccaaacgcaaacccaaacgcaaaccccaaugccaacccaaacgcaaauccaaaugccaauccaaacgcaaacccaaacaaaaacaaccaaggaaauggacaaggacauaacaugccaaacgaccccaaccgaaauguagacgaaaacgccaacgcaaauagugcagucaaaaacaauaacaaugaagaacccucagauaaacauauaaaagaauacuuaaacaaaauacaaaacucacuaucaaccgaguggucuccuugcucaguaacauguggaaacggaauacaaguacgaauaaaaccaggaucagcaaacaaaccgaaagacgaacuagacuacgccaacgacauagaaaagaaaauauguaaaauggagaaauguaguucaguauucaacgugguaaacagcucaauaggccuaauaaugguacucucuuuccuauuccuaaacuaaggacuagucccuguucccagagcccacuuuuuuuucuuuuuuugaaauaaaauagccugucuuucagaucucaaaggcucuuuucagagccaccaaaaaaaaaaaaaaaaaaaaaaaaaaaaaaaaaaaaaaaaaaaaaaaaaaaaaaaaaaaaaaaaagaauu

SEQ ID NO: 6745 - RNA, 1600 nt, Artificial Sequence
  mRNA Design a-1 (hSL-A64-N5) comprising derived and/or modified sequence from Pf(3D7)__XP_001351122.1__Pf-CSP_L(G4SG4)_TM domain HA (opt6)
aggagagucccgcagucggcguccagcggcucugcuuguucgugugugugucguugcaggccuuauucaagcuuaccaugaugcguaaacuagcaauacuaucugucaguucauucuuauucguagaagcacuauuccaagaauaccaauguuacggaucuucaucaaacacaagaguacucaacgaauuaaacuacgauaacgcuggaaccaauuuauacaacgaacuagaaaugaacuacuauggaaaacaagaaaacugguauucacuaaaaaaaaacagcagaaguuuaggagaaaaugacgacggaaacaaugaagacaaugaaaaauuacgaaaaccaaaacacaaaaaauuaaaacaacccgccgacggaaauccagacccaaacgcaaacccaaauguagacccaaacgcaaacccaaauguagaucccaacgcaaacccaaacguagaucccaaugcaaacccaaacgcaaacccaaaugcaaaccccaacgcaaacccaaaugcaaacccuaacgcaaacccgaacgcaaacccaaacgcaaaucccaaugcaaaccccaacgcaaauccaaaugcaaacccuaacgcaaauccgaacgcaaauccaaacgcaaacccaaacgcaaacccaaacgcaaacccaaacgcaaacccaaacgucgacccaaacgccaauccaaacgcaaaccccaaugcaaacccaaaugcaaacccaaacgcaaacccaaaugccaacccaaacgcaaacccaaacgcaaacccaaacgcaaacccaaacgcaaacccaaaugcaaacccaaaugcaaacccaaacgccaacccaaacgcaaacccaaacgcaaacccaaacgccaacccaaacgcaaacccuaacgcaaauccaaacaaaaacaaccaagggaacggacaaggacacaacaugccaaacgacccaaacagaaacguagacgaaaacgccaacgcaaacucagcugucaaaaacaauaacaacgaagaacccuccgauaaacacauaaaagaauaccuaaacaaaauccaaaacucccuuucuacagaauggucacccugcucaguaacaugcggcaacggcauacaaguuagaaucaaaccaggaucagcaaauaaaccaaaagacgaauuagacuaugccaacgacauagaaaaaaaaauauguaaaauggaaaaaugcucaucaguuuucaacguaguaaacagcucaaucggauuaauaaugguacuaucauucuuauuuuuaaacggaggaggaggcuccggcggagguggaaaacuagaaucaacuagaauauaccaaauauuagcaauauacucaacaguagcaucaucacucguauuaguaguaucgcuaggagcaauaaguuucuggaugugcucuaacggaagccuacaaugccgaauaugcauauaaggacuagucccuguucccagagcccacuuuuuuuucuuuuuuugaaauaaaauagccugucuuucagaucucaaaggcucuuuucagagccaccaaaaaaaaaaaaaaaaaaaaaaaaaaaaaaaaaaaaaaaaaaaaaaaaaaaaaaaaaaaaaaaaagaauu

SEQ ID NO: 6746 - RNA, 1474 nt, Artificial Sequence
  mRNA Design a-1 (hSL-A64-N5) comprising derived and/or modified sequence from Pf(3D7)__XP_001351122.1__Pf-CSP(199-377)_L(PVTN)_HBsAg (opt6)
aggagagucccgcagucggcguccagcggcucugcuuguucgugugugugucguugcaggccuuauucaagcuuaccauggacccaaacgccaaccccaacgcaaacccaaaugcaaacccaaacgcuaaccccaacgcaaacccaaacgcuaacccuaacgcaaauccaaacgcaaaucccaacgcaaauccaaacgcaaacccaaacgcaaacccaaaugccaacccaaacgcaaacccuaacgcaaaucccaacgcaaauccaaaugcaaaccccaaugcaaacccaaacgcaaauccaaacaaaaauaaucaaggaaauggacaaggacauaacaugccaaacgacccuaaccgaaacgucgacgaaaaugcaaacgcaaacuccgcaguaaaaaacaacaacaacgaagaaccuuccgacaaacacauaaaagaauaccuaaacaaaauacaaaacucucuauccacugaauggucaccaugcucaguaaccugcggaaauggcauacaaguaagaauaaaaccaggaucugcaaauaaaccuaaagacgaacuagauuacgcaaaugacauagaaaaaaaaauaugcaaaauggaaaaaugcucaucagucccaguaacaaacauggaaaacaucacaucaggauucuuaggaccacuacucguauuacaagcaggauucuuucuuuuaacaagaauauuaacaauaccacaaucccuagacucaugguggacaucauuaaacuuccuagguggaucaccagucugccucggacaaaacucacaaucaccaacaucaaaccacucaccaacauccugcccaccaauuuguccaggauacagauggaugugccuacgaagauucauaauauucuuauuuauauuacuacuaugucucauauuuuuacucguacuauuagacuaucagggcauguuacccguauguccacuaauaccaggcucaaccaccacaaacacagguccaugcaaaaccugcaccacaccagcacaaggaaacuccauguuucccucauguugcugcaccaaacccaccgauggaaacugcaccugcauaccaaucccaucuucaugggcauucgcaaaauaucuaugggaaugggcauccguaagauuuucauggcuaucacuauuaguaccauucguacaaugguucguaggauuaucaccaacaguaugguuaucagcaauauggaugaugugguacuggggaccaucacuauacucaauaguauccccuuucauaccauuacucccaauauuuuucugccuuuggguauacauauaaggacuagucccuguucccagagcccacuuuuuuuucuuuuuuugaaauaaaauagccugucuuucagaucucaaaggcucuuuucagagccaccaaaaaaaaaaaaaaaaaaaaaaaaaaaaaaaaaaaaaaaaaaaaaaaaaaaaaaaaaaaaaaaaagaauu

SEQ ID NO: 6747 - RNA, 1516 nt, Artificial Sequence
  mRNA Design a-1 (hSL-A64-N5) comprising derived and/or modified sequence from Pf(3D7)__XP_001351122.1__Pf-CSP(199-387)_L(PVTN)_HBsAg (opt6)
aggagagucccgcagucggcguccagcggcucugcuuguucgugugugugucguugcaggccuuauucaagcuuaccaugauggcaccagauccaaacgcaaacccaaacgcaaacccaaacgcaaauccaaaugcaaacccaaacgcaaaucccaaugcaaacccuaacgcaaacccaaacgccaacccaaaugccaacccaaacgcaaacccaaacgcaaauccaaacgcaaacccaaacgcuaacccaaaugcaaaccccaacgcaaauccaaacgcaaacccaaacgcaaauccaaacgcuaacccaaacaaaaauaaccaaggaaacggacaaggacacaauaugccaaaugacccaaauagaaacguagacgaaaacgcaaacgcaaauucagcagucaaaaacaauaacaacgaagaaccauccgauaaacacauaaaagaauacuuaaacaaaauccaaaacucacuaucaacugaauggucaccuuguucaguaacauguggcaacggaauacaaguaagaauaaaaccagguucagccaacaaaccuaaagacgaacuagacuacgcaaacgacauagaaaaaaaaaucugcaaaauggaaaaaugcucaucaguauuuaauguaguaaacucaucaauaggacuaggcccuguaacaaacauggaaaacauaaccucaggauucuuaggcccacuacuaguacuccaagcaggauucuuucuucuaacaagaauauuaaccauuccucaaucauuagacucaugguggacaucccuuaacuuucuaggaggaagccccguaugcuuaggacaaaacagccaauccccaacauccaaccacuccccaacaucaugccccccaauaugcccaggauacagauggaugugccuaagaagauucaucauauuccuauuuauucucuuacucugcuuaauauucuuacucguauuacucgacuaccaaggaauguuaccaguaugcccacuaauaccaggauccacaacaacaaacacgggaccaugcaaaacaugcacaacaccugcccaaggaaauuccauguucccaucaugcugcugcacaaaaccaaccgacggcaacugcacaugcauaccaauaccaucaagcugggccuucgcaaaauaccuaugggaaugggcaucagugagauucucauggcucucauuacuagucccauucguacaaugguuuguaggauuaucaccaacaguuuggcucagcgcaauauggaugaugugguacuggggccccucuuuauauucaauaguauccccauuuauaccacuacucccaauauucuucuguuuauggguauacauauaaggacuagucccuguucccagagcccacuuuuuuuucuuuuuuugaaauaaaauagccugucuuucagaucucaaaggcucuuuucagagccaccaaaaaaaaaaaaaaaaaaaaaaaaaaaaaaaaaaaaaaaaaaaaaaaaaaaaaaaaaaaaaaaaagaauu

SEQ ID NO: 6748 - RNA, 700 nt, Artificial Sequence
  mRNA Design a-1 (hSL-A64-N5) comprising derived and/or modified sequence from Pf(3D7)__XP_001351122.1__HsALB_Pf-CSP(19-152) (opt6)
aggagagucccgcagucggcguccagcggcucugcuuguucgugugugugucguugcaggccuuauucaagcuuaccaugaaauggguaacauucauaucacuacuauuccuauucuccagcgcauacucacuauuccaagaauaccaaugcuacggaucaagcucaaacacacgaguacuaaacgaacuaaacuacgacaacgcaggaaccaaccuauacaacgaacuagaaaugaacuacuacggaaaacaagaaaacugguacucacuaaaaaaaaacagcagaucacuaggagaaaacgacgacggaaacaacgaagacaacgaaaaacuaagaaaaccaaaacacaaaaaacuaaaacaacccgcagacggaaacccagacccaaacgcaaacccaaacguagacccaaaugcaaacccaaacguagacccaaacgcaaacccaaacguagacccaaacgcaaacccaaacgcaaacccaaacgcaaacccaaacgcaaacccaaacgcaaacccaaacgcaaacccauaaggacuagucccuguucccagagcccacuuuuuuuucuuuuuuugaaauaaaauagccugucuuucagaucucaaaggcucuuuucagagccaccaaaaaaaaaaaaaaaaaaaaaaaaaaaaaaaaaaaaaaaaaaaaaaaaaaaaaaaaaaaaaaaaagaauu

SEQ ID NO: 6749 - RNA, 820 nt, Artificial Sequence
  mRNA Design a-1 (hSL-A64-N5) comprising derived and/or modified sequence from Pf(3D7)__XP_001351122.1__HsALB_Pf-CSP(19-192) (opt6)
aggagagucccgcagucggcguccagcggcucugcuuguucgugugugugucguugcaggccuuauucaagcuuaccaugaaauggguaacauucaucucacuacuauucuuauucucaucagcauacucacuauuccaagaauaccaaugcuacggaucaucaucaaacacacgaguacucaacgaacuaaacuacgacaacgcaggaacaaaccuauacaacgaacuagaaaugaacuacuacggaaaacaagaaaacugguauucacuaaaaaaaaacucaagaucacuaggagaaaacgacgacggaaacaacgaagacaacgaaaaacuaagaaaaccaaaacacaaaaaacuaaaacaaccagcagacggaaacccagacccaaacgcaaacccaaacguagacccaaacgccaacccaaacguagacccaaacgcaaacccaaacguagacccaaacgcaaacccaaacgcaaacccaaacgcaaacccaaacgcaaacccaaacgcaaacccaaacgcaaacccaaacgcaaacccaaacgcaaacccaaacgcaaacccaaacgcaaacccaaacgcaaacccaaacgcaaauccaaacgcaaacccaaacgcaaacccaaacgcaaacccaaacgcaaaccccuaaggacuagucccuguucccagagcccacuuuuuuuucuuuuuuugaaauaaaauagccugucuuucagaucucaaaggcucuuuucagagccaccaaaaaaaaaaaaaaaaaaaaaaaaaaaaaaaaaaaaaaaaaaaaaaaaaaaaaaaaaaaaaaaaagaauu

SEQ ID NO: 6750 - RNA, 1060 nt, Artificial Sequence
  mRNA Design a-1 (hSL-A64-N5) comprising derived and/or modified sequence from Pf(3D7)__XP_001351122.1__HsALB_Pf-CSP(19-272) (opt6)
aggagagucccgcagucggcguccagcggcucugcuuguucgugugugugucguugcaggccuuauucaagcuuaccaugaaauggguaacauucauaucacuacuauuccuauucucaagcgcauauucacuauuccaagaauaccaaugcuacggaucaagcucaaacacaagaguacuuaacgaacuaaacuacgacaacgcaggaacaaaccuauacaacgaacuugaaaugaacuacuacggaaaacaagaaaacugguacucacuaaaaaaaaauagcagaagcuuaggagaaaacgacgacggaaacaacgaagacaacgaaaaauuaagaaaaccuaaacacaaaaaacuaaaacaacccgcagacggaaacccagacccuaacgccaacccaaauguagacccaaacgcaaacccaaacguagacccaaacgcaaaccccaacguagacccaaacgcaaacccaaacgcaaacccaaacgcaaacccaaacgcaaaccccaacgcaaacccaaacgcaaacccaaacgcaaacccaaacgcaaacccaaacgcaaacccaaacgcaaacccaaacgcaaacccaaacgcaaacccaaacgcgaacccaaacgcaaacccaaacgcaaacccaaacgcaaacccaaacgcaaacccaaacguagacccaaaugcaaaccccaacgcaaacccaaacgcaaacccaaaugcaaaccccaacgcaaacccaaacgcaaacccaaacgcaaacccaaacgcaaacccaaaugcaaacccaaacgcaaacccaaacgccaacccaaacgcaaacccaaacgcaaacccaaacgcaaacccaaacgcaaacccgaacgcaaacccaaacgcaaacccaaacgcaaacccauaaggacuagucccuguucccagagcccacuuuuuuuucuuuuuuugaaauaaaauagccugucuuucagaucucaaaggcucuuuucagagccaccaaaaaaaaaaaaaaaaaaaaaaaaaaaaaaaaaaaaaaaaaaaaaaaaaaaaaaaaaaaaaaaaagaauu

SEQ ID NO: 6751 - RNA, 1222 nt, Artificial Sequence
  mRNA Design a-1 (hSL-A64-N5) comprising derived and/or modified sequence from Pf(3D7)__XP_001351122.1__HsALB_Pf-CSP(19-272)_L(AAY)_Pf-CSP(310-3 27)_L(AAY)_Pf-CSP(346-375) (opt6)
aggagagucccgcagucggcguccagcggcucugcuuguucgugugugugucguugcaggccuuauucaagcuuaccaugaaauggguaacauuuauaucacuccuauuccuuuuuucgucagcauacucacuauuccaagaauaucaaugcuacggaucaagcuccaacacaagaguacuaaacgaacuaaacuacgacaacgcaggaacaaaccuauacaacgaacuagaaaugaacuacuacggaaaacaagaaaacugguacucacuaaaaaaaaacagccgaagcuuaggagaaaaugacgacggaaacaacgaagacaacgaaaaauuacgcaaacccaaacacaaaaaacugaaacaaccagcagacggaaacccagacccaaacgcaaacccaaacguagacccaaacgcaaacccaaacguagacccaaacgcaaacccaaacguagacccaaacgcaaacccaaacgcgaacccaaacgccaacccaaacgcaaacccaaacgcaaacccaaacgcaaacccaaacgcaaacccaaacgcaaacccaaacgccaacccgaacgcaaacccaaacgcaaacccaaacgcaaauccaaacgcaaacccaaacgcaaacccaaacgccaacccaaacgcaaacccaaacgcaaacccaaauguggacccaaacgcaaacccaaacgcaaacccaaacgcaaacccaaaugcaaacccaaacgcaaacccaaacgcaaacccaaacgcaaacccaaacgcaaacccaaaugcaaacccaaacgcaaauccaaacgcaaacccaaacgcaaacccaaacgcaaacccaaacgcaaacccuaacgcaaacccaaacgcaaacccaaacgccaaccccaaugcaaacccagcagcauacgaaccaucagacaaacacauaaaagaauaccuaaacaaaauacaaaacucacucgcagcauauauaaagccaggaagcgccaacaaaccaaaagacgaacuagauuacgcaaacgacauagaaaaaaaaaucuguaaaauggaaaaaugcucauaaggacuagucccuguucccagagcccacuuuuuuuucuuuuuuugaaauaaaauagccugucuuucagaucucaaaggcucuuuucagagccaccaaaaaaaaaaaaaaaaaaaaaaaaaaaaaaaaaaaaaaaaaaaaaaaaaaaaaaaaaaaaaaaaagaauu

SEQ ID NO: 6752 - RNA, 1183 nt, Artificial Sequence
  mRNA Design a-1 (hSL-A64-N5) comprising derived and/or modified sequence from Pf(3D7)__XP_001351122.1__HsALB_Pf-CSP(19-272)_L(AAY)_Pf-CSP(346-3 65)_L(AAY)_P2 (opt6)
aggagagucccgcagucggcguccagcggcucugcuuguucgugugugugucguugcaggccuuauucaagcuuaccaugaaauggguaacauucauaucacuauuauuccuuuucucaucagcuuacucacuauuccaagaauaccaaugcuacggaucauccucaaacacaagaguacuaaacgaacuaaacuacgacaacgccggaaccaaccuauacaacgaacucgaaaugaacuacuacggaaaacaagaaaacugguacucacuaaaaaaaaacagccgaucccuaggagaaaacgacgacggaaauaacgaagacaaugaaaaauuaagaaaaccaaaacacaaaaaacuaaaacaaccagcagacggaaacccagacccaaacgcaaacccaaacguagauccaaacgcaaacccaaacguagacccaaacgcaaacccaaacguagacccaaacgcuaacccaaacgcaaacccaaacgcaaacccaaacgcaaacccaaacgcaaacccaaacgcaaacccgaacgcaaaccccaacgcaaacccaaacgcaaacccaaacgcaaaccccaacgcaaacccaaacgcaaacccgaacgcaaacccaaacgcaaacccaaacgcaaacccaaacgcaaacccaaacgcaaacccaaacguagacccaaacgccaacccaaacgcaaacccaaacgcaaacccaaacgcaaacccaaacgcaaacccaaacgcaaacccaaacgcaaacccaaacgcaaacccaaacgcaaacccaaacgcaaaccccaacgcaaacccaaaugcaaacccaaacgcaaacccaaaugcaaaccccaacgcaaacccaaaugccaauccaaacgcaaacccaaacgcaaacccagccgcauacauaaaaccaggauccgcaaacaaaccaaaagacgaacuagacuacgcaaacgacauagaagcagcauaccaauauauaaaagccaacuccaaauucauagguauaacagaacucuaaggacuagucccuguucccagagcccacuuuuuuuucuuuuuuugaaauaaaauagccugucuuucagaucucaaaggcucuuuucagagccaccaaaaaaaaaaaaaaaaaaaaaaaaaaaaaaaaaaaaaaaaaaaaaaaaaaaaaaaaaaaaaaaaagaauu

SEQ ID NO: 6753 - RNA, 1177 nt, Artificial Sequence
  mRNA Design a-1 (hSL-A64-N5) comprising derived and/or modified sequence from Pf(3D7)__XP_001351122.1__HsALB_Pf-CSP(19-272)_L(AAY)_Pf-CSP(346-3 65)_L(AAY)_PADRE (opt6)
aggagagucccgcagucggcguccagcggcucugcuuguucgugugugugucguugcaggccuuauucaagcuuaccaugaaauggguaaccuucauaucacuacuauucuuauucucaucagcauacucacucuuccaagaauaccaaugcuacggcucaagcucaaacacaagaguacuaaacgaauuaaacuaugacaacgccggaacaaaccuauacaaugaauuagaaaugaacuacuacggcaaacaagaaaacugguacucacucaaaaaaaacuccagaaguuuaggagaaaaugacgacggaaacaaugaagacaaugaaaaauuacgaaaaccaaaacacaaaaaacuaaaacaacccgccgacggaaaccccgacccgaacgcaaacccaaacguagacccaaacgcaaacccaaacguagacccaaaugcaaacccaaacguagacccaaacgcaaacccaaacgcaaacccaaacgcaaauccaaacgcaaacccaaaugcaaacccaaaugcaaauccaaacgcaaaccccaacgcaaacccaaacgcaaacccaaaugcaaauccaaacgccaacccaaaugcaaacccaaacgcaaauccaaacgcaaacccaaacgcaaauccaaacgcaaacccaaaugcaaacccaaacguagauccaaacgcaaacccaaacgccaacccaaacgcaaacccgaacgcaaacccaaacgcaaacccaaacgccaacccaaacgccaacccaaacgccaacccaaacgcaaacccaaacgcaaacccaaacgcaaacccaaacgcaaacccaaaugcaaacccuaacgcaaacccaaacgcaaacccaaacgcaaacccaaacgccaacccaaacgcaaauccagcagcauacauaaaaccaggaucagcaaacaaaccaaaagaugaacuagacuacgcaaaugacaucgaagcagccuacgcuaaauucguagcagccuggacacuaaaagcagcagccuaaggacuagucccuguucccagagcccacuuuuuuuucuuuuuuugaaauaaaauagccugucuuucagaucucaaaggcucuuuucagagccaccaaaaaaaaaaaaaaaaaaaaaaaaaaaaaaaaaaaaaaaaaaaaaaaaaaaaaaaaaaaaaaaaagaauu

SEQ ID NO: 6754 - RNA, 1234 nt, Artificial Sequence
  mRNA Design a-1 (hSL-A64-N5) comprising derived and/or modified sequence from Pf(3D7)__XP_001351122.1__HsALB_Pf-CSP(19-272)_L(G4S)_Pf-CSP(310-3 27)_L(G4S)_Pf-CSP(346-375) (opt6)
aggagagucccgcagucggcguccagcggcucugcuuguucgugugugugucguugcaggccuuauucaagcuuaccaugaaauggguaaccuucaucucacuacuauuccuauucucaagcgcauacucacucuuucaagaauaccaaugcuacggcucaagcucaaacacacgaguacuaaacgaacuaaacuacgacaacgcaggaacaaaccuauauaacgaacucgaaaugaacuacuacggcaaacaagaaaauugguacucacuaaaaaaaaacagcagaagcuuaggagaaaacgacgacggaaacaacgaagauaacgaaaaacuaagaaaaccaaaacacaaaaaacuaaaacaacccgcagacggaaacccagacccaaacgcaaauccaaauguagacccgaacgcaaacccaaacguagacccaaaugcgaacccaaacgucgacccaaacgcaaacccaaaugcaaacccaaaugcgaacccaaacgcaaacccaaacgcaaauccaaacgcaaauccaaaugcaaacccaaacgcgaauccaaacgcaaacccaaacgcaaacccaaacgcaaacccaaacgcaaacccaaacgcaaacccaaacgcaaacccgaacgcuaacccaaacgcaaacccaaacgcaaacccaaacguagauccaaacgcgaacccaaacgcaaacccaaaugcaaacccaaacgcaaacccaaacgcaaacccaaacgcaaacccaaacgcaaacccaaacgcaaacccaaacgcgaacccaaacgcaaauccaaaugcaaacccaaacgcaaacccaaacgcaaacccaaacgcaaacccaaaugcaaacccaaacgcaaacccaaaugcaaacccaaacgcaaacccaggaggaggaggaucagaacccucagacaaacacauaaaagaauaccuaaacaaaauacaaaacucacuaggaggaggaggaucgaucaaaccaggaagcgcaaacaaaccaaaagacgaacucgacuacgcaaacgauauagaaaaaaaaauaugcaaaauggaaaaaugcucguaaggacuagucccuguucccagagcccacuuuuuuuucuuuuuuugaaauaaaauagccugucuuucagaucucaaaggcucuuuucagagccaccaaaaaaaaaaaaaaaaaaaaaaaaaaaaaaaaaaaaaaaaaaaaaaaaaaaaaaaaaaaaaaaaagaauu

SEQ ID NO: 6755 - RNA, 1219 nt, Artificial Sequence
  mRNA Design a-1 (hSL-A64-N5) comprising derived and/or modified sequence from Pf(3D7)__XP_001351122.1__HsALB_Pf-CSP(19-272)_L(G4S)_Pf-CSP(310-3 27)_Pf-CSP(346-375) (opt6)
aggagagucccgcagucggcguccagcggcucugcuuguucgugugugugucguugcaggccuuauucaagcuuaccaugaaauggguaacauucauaucacuccuauuccuauucuccucagcauacucccucuuccaagaauaccaaugcuacggcucaagcucaaacacacgaguacuaaacgaacuaaauuacgacaacgccggaacaaaccuauauaaugaacuagaaaugaauuacuacggaaaacaagaaaacugguacucacuuaaaaaaaacucaagaucauuaggagaaaacgacgacggcaacaacgaagacaacgaaaaacuaagaaaaccaaaacacaaaaaacuaaaacaacccgcagacggaaauccagauccaaacgcaaacccaaacguagacccaaacgcaaacccaaacguagacccaaacgcaaacccaaacgucgacccaaacgccaacccaaacgcaaacccaaacgcaaacccaaacgcaaacccaaacgccaacccaaacgcaaacccaaacgcaaacccaaacgcaaacccaaacgcaaacccaaacgcaaacccaaacgcaaacccgaacgcaaacccaaacgcaaauccuaacgcaaacccaaacgcaaacccaaacgcaaauccgaacgcaaacccaaacguagacccaaacgcaaacccaaacgcaaacccaaacgcaaacccaaacgcaaacccaaacgcaaacccuaacgcaaacccaaaugcaaacccaaacgcgaacccaaaugcaaacccaaaugcaaacccaaacgcaaacccaaacgcaaacccaaacgcaaauccaaacgcaaauccaaacgcaaacccaaacgcaaacccaaacgcaaacccaaacgccaacccaggaggagguggaagcgaaccauccgacaaacacauaaaagaauaccuaaacaaaauacaaaacucacuaauaaaacccggcucagcaaacaaaccaaaagacgaacuagacuacgccaacgacauagaaaaaaaaauauguaaaauggaaaaaugcucauaaggacuagucccuguucccagagcccacuuuuuuuucuuuuuuugaaauaaaauagccugucuuucagaucucaaaggcucuuuucagagccaccaaaaaaaaaaaaaaaaaaaaaaaaaaaaaaaaaaaaaaaaaaaaaaaaaaaaaaaaaaaaaaaaagaauu

SEQ ID NO: 6756 - RNA, 1219 nt, Artificial Sequence
  mRNA Design a-1 (hSL-A64-N5) comprising derived and/or modified sequence from Pf(3D7)__XP_001351122.1__HsALB_Pf-CSP(19-325) (opt6)
aggagagucccgcagucggcguccagcggcucugcuuguucgugugugugucguugcaggccuuauucaagcuuaccaugaaauggguaacauucauaucacuccuauuccuauucucaagcgcauacucauuauuccaagaauaccaaugcuacggaucaucaucuaacacaagaguacucaacgaacuaaacuacgacaacgcaggaacuaaucucuacaacgaacuagaaaugaacuacuacggaaaacaagaaaacugguauucacuaaaaaaaaacagccgaucauuaggagaaaacgacgacggcaacaacgaagacaacgaaaaacuacgaaaaccaaaacacaaaaaauuaaaacagccagccgacggaaacccagacccaaacgcaaacccaaacguagacccaaacgcaaacccaaacguagacccaaacgcaaacccaaacguagacccaaacgcaaacccaaacgcaaacccaaacgcaaauccaaacgcaaacccaaacgccaacccaaacgcaaacccaaacgcaaaccccaacgcaaacccaaacgcaaacccaaacgcaaacccaaaugccaacccaaacgcaaacccaaacgcaaacccaaacgcaaacccaaacgcaaacccaaaugcaaacccaaacgcaaacccaaacguagacccaaacgcaaacccaaaugcaaacccaaacgcaaaccccaacgcaaacccaaacgcaaacccaaacgcaaacccaaacgcaaacccaaacgccaacccaaacgcaaacccaaacgcaaacccaaacgcaaacccaaacgcaaacccaaacgcaaauccaaacgcaaacccaaacgcaaacccaaacgcaaacccaaacgcaaacccaaacgcaaacccaaauaaaaacaaucaaggaaacggacaaggacacaacaugccaaacgauccaaaucgcaacguagacgaaaacgcaaacgcaaacagcgcagucaaaaacaacaacaacgaagaaccaucagacaaacacauaaaagaauaccuaaauaaaauacaaaacuagggacuagucccuguucccagagcccacuuuuuuuucuuuuuuugaaauaaaauagccugucuuucagaucucaaaggcucuuuucagagccaccaaaaaaaaaaaaaaaaaaaaaaaaaaaaaaaaaaaaaaaaaaaaaaaaaaaaaaaaaaaaaaaaagaauu

SEQ ID NO: 6757 - RNA, 1396 nt, Artificial Sequence
  mRNA Design a-1 (hSL-A64-N5) comprising derived and/or modified sequence from Pf(3D7)__XP_001351122.1__HsALB_Pf-CSP(19-384) (opt6)
aggagagucccgcagucggcguccagcggcucugcuuguucgugugugugucguugcaggccuuauucaagcuuaccaugaaauggguaaccuuuauaucacucuuauuccuauuuucaucagcauacucacucuuccaagaauaucaaugcuacggaucaucaucaaacacaagaguccucaaugaauuaaacuaugacaaugcaggaaccaaccuauacaacgaauuagaaaugaacuacuacggcaaacaagaaaacugguacucacucaaaaaaaacucaagauccuuaggagaaaaugaugacggaaacaacgaagacaacgaaaaacuccgaaaaccaaaacacaaaaaacuaaaacaacccgccgacggaaacccagaccccaacgcaaacccaaauguagaccccaacgcaaacccaaacguagacccaaacgcaaacccaaacguagacccaaacgcaaauccaaacgccaacccaaacgcaaacccaaacgccaacccaaacgcaaacccaaacgcaaacccaaacgcaaacccaaacgcaaacccaaaugcaaacccaaaugcaaacccaaacgcaaacccaaacgcaaacccaaacgcaaacccaaacgcaaacccaaaugcaaacccaaacgcaaacccaaacgcaaacccaaacguagacccaaaugcaaacccaaacgcaaacccaaacgcaaauccaaaugcaaauccaaacgcaaauccaaacgcaaacccaaacgcaaacccaaacgcaaacccaaacgcaaauccaaaugcaaacccaaacgcaaacccaaacgcaaacccaaacgcuaacccaaacgccaauccaaacgcaaacccaaacgcaaacccuaaugcaaacccaaacgccaacccaaauaaaaauaaccaaggaaacggacaaggacacaacaugccaaacgacccaaacagaaacgucgaugaaaacgcaaacgcaaauuccgcagucaaaaacaacaacaacgaagaaccaucagacaaacacauaaaagaauaccucaacaaaauacaaaacucccuaucaacagaauggucacccugcuccguuacaugcgguaacggcauacaaguaagaauaaaaccaggaucagcuaacaaacccaaagacgaacuagacuacgccaacgacauagaaaaaaaaauaugcaaaauggaaaaaugcuccucaguauucaacguaguaaacucaucauaaggacuagucccuguucccagagcccacuuuuuuuucuuuuuuugaaauaaaauagccugucuuucagaucucaaaggcucuuuucagagccaccaaaaaaaaaaaaaaaaaaaaaaaaaaaaaaaaaaaaaaaaaaaaaaaaaaaaaaaaaaaaaaaaagaauu

SEQ ID NO: 6758 - RNA, 1534 nt, Artificial Sequence
  mRNA Design a-1 (hSL-A64-N5) comprising derived and/or modified sequence from Pf(3D7)__XP_001351122.1__HsALB_Pf-CSP(19-384)_TM domain HA (opt6)
aggagagucccgcagucggcguccagcggcucugcuuguucgugugugugucguugcaggccuuauucaagcuuaccaugaaauggguaacauuuauaucacuacuuuuccuauucucaucagcauacucacucuuccaagaauaucaaugcuauggauccucaucaaacacaagaguacucaacgaauuaaacuacgauaaugccggaacaaaccuauauaacgaacuagaaaugaacuacuacggaaaacaagaaaauugguacucauuaaaaaaaaacuccagaucccuuggagaaaacgacgauggaaacaacgaagauaacgaaaaauuaagaaaaccaaaacacaaaaaauugaaacaaccagcagacgguaacccagacccaaacgccaacccaaacguagacccaaacgcgaauccaaacgucgacccaaacgcaaaucccaacguagacccaaaugcaaauccaaaugccaauccaaacgcaaacccaaacgcaaacccaaaugcaaacccaaacgccaacccaaacgcaaauccaaacgcaaacccaaacgcaaacccaaacgccaacccaaacgccaaccccaaugcaaacccaaaugcaaacccaaacgcaaacccaaacgcaaauccaaacgcaaacccaaacgccaacccaaacguagacccaaacgcaaauccaaacgcaaacccaaacgccaauccaaacgcaaacccaaacgccaacccaaaugcaaaucccaacgcaaacccaaacgcaaauccaaaugcaaaccccaacgcaaauccaaacgcaaacccaaacgcaaauccaaacgcaaauccaaaugcaaacccaaacgcaaacccuaaugcaaacccaaacgcaaacccaaacgccaacccaaacaaaaacaaccaaggaaacggacaaggucacaauaugccaaaugacccaaaccgaaacguagacgaaaacgcaaaugccaauagcgcaguaaaaaacaauaacaacgaagaaccuucagauaaacacauaaaagaauaccuaaacaaaauacaaaacucccuaucaacagaauggucaccuuguucagucacauguggaaacggaauacaaguaagaauaaaaccaggaucagcaaacaaaccaaaagacgaacuagauuacgcaaacgauauagaaaaaaaaauauguaaaauggaaaaaugcuccucagucuucaacguagucaacaguuccaaacuagaaucaaccagaaucuaccaaauacuagcaauauauuccacaguagcaagcucacucguauuaguagucucccuaggagcaauaucauucuggaugugcucaaacggaagcuuacaaugccgaauauguauauaaggacuagucccuguucccagagcccacuuuuuuuucuuuuuuugaaauaaaauagccugucuuucagaucucaaaggcucuuuucagagccaccaaaaaaaaaaaaaaaaaaaaaaaaaaaaaaaaaaaaaaaaaaaaaaaaaaaaaaaaaaaaaaaaagaauu

SEQ ID NO: 6759 - RNA, 1246 nt, Artificial Sequence
  mRNA Design a-1 (hSL-A64-N5) comprising derived and/or modified sequence from Pf(3D7)__XP_001351122.1__HsALB_Pf-CSP(82-397) (opt6)
aggagagucccgcagucggcguccagcggcucugcuuguucgugugugugucguugcaggccuuauucaagcuuaccaugaaauggguaacauucauaucacuacuauuccucuucaguucagccuauagcgauaacgaaaaacuaagaaaaccaaaacacaaaaaacucaaacaaccagcagacggaaacccagacccaaacgcaaacccaaacguagacccaaacgcaaacccaaacguagacccaaacgcaaauccaaacguagacccaaaugcaaaccccaacgcaaacccaaacgcaaacccaaacgcaaacccaaacgcaaacccaaaugcgaacccaaaugcaaauccaaacgcaaacccaaacgcaaacccaaacgcaaacccaaacgcuaacccaaacgcaaacccaaacgcaaacccaaaugcaaacccaaacgcaaacccaaacgcaaaccccaacgcaaacccaaacguagacccaaacgcaaacccaaacgcaaacccaaacgcaaacccaaacgccaacccaaaugccaacccaaacgcaaacccaaaugcaaaccccaacgcaaacccaaacgccaacccaaacgcaaacccaaacgcaaacccaaacgcaaaccccaaugcaaacccaaacgcaaacccaaaugcaaauccaaacgcaaacccaaacgcaaacccaaacgcaaacccaaacaaaaacaaccaaggaaacggacaaggacacaacaugccaaacgacccaaaucgaaacgucgaugaaaacgccaacgcaaacucagcaguaaaaaacaacaacaacgaagaaccaucugacaaacacauaaaagaauaccuaaacaaaauacaaaacucauuauccaccgaauggucaccauguucaguaacaugcggcaacggaauacaagucagaauaaaaccaggcucagcaaauaaaccaaaagacgaacuagacuacgcaaacgacauagaaaaaaaaauaugcaaaauggaaaaauguucaucagucuucaacguaguaaacucaucaauaggacucauaaugguacuaucauuccuauucuuaaacuaaggacuagucccuguucccagagcccacuuuuuuuucuuuuuuugaaauaaaauagccugucuuucagaucucaaaggcucuuuucagagccaccaaaaaaaaaaaaaaaaaaaaaaaaaaaaaaaaaaaaaaaaaaaaaaaaaaaaaaaaaaaaaaaaagaauu

SEQ ID NO: 6760 - RNA, 598 nt, Artificial Sequence
  mRNA Design a-1 (hSL-A64-N5) comprising derived and/or modified sequence from Pf(3D7)__XP_001351122.1__HsALB_Pf-CSP(93-192) (opt6)
aggagagucccgcagucggcguccagcggcucugcuuguucgugugugugucguugcaggccuuauucaagcuuaccaugaaauggguaacauucaucucacuacuauuccuauucucaagcgcauacucaaaacuaaaacaaccagcagacggaaacccagacccaaacgcaaacccaaacguagacccaaacgcaaacccaaacguagacccaaacgcaaacccaaacguagacccaaacgcaaacccaaacgcaaacccaaacgcaaacccaaacgcaaacccaaacgcaaacccaaacgcaaacccaaacgcaaacccaaacgcaaacccaaacgcaaacccaaacgcaaacccaaacgcaaacccaaacgcaaacccaaacgcaaacccaaacgcaaacccaaacgcaaacccaaacgcaaacccauaaggacuagucccuguucccagagcccacuuuuuuuucuuuuuuugaaauaaaauagccugucuuucagaucucaaaggcucuuuucagagccaccaaaaaaaaaaaaaaaaaaaaaaaaaaaaaaaaaaaaaaaaaaaaaaaaaaaaaaaaaaaaaaaaagaauu

SEQ ID NO: 6761 - RNA, 838 nt, Artificial Sequence
  mRNA Design a-1 (hSL-A64-N5) comprising derived and/or modified sequence from Pf(3D7)__XP_001351122.1__HsALB_Pf-CSP(93-272) (opt6)
aggagagucccgcagucggcguccagcggcucugcuuguucgugugugugucguugcaggccuuauucaagcuuaccaugaaaugggucacauucauaucacuccuauuccuauucucaagcgcauacucaaaacuaaaacaaccagcagacggaaacccagacccaaacgcaaacccaaacguagacccaaacgcaaacccaaacguagacccaaacgcaaacccaaacguagacccaaacgcaaacccaaacgcaaacccaaacgccaacccaaacgcaaacccaaacgcaaacccaaacgcaaacccaaacgcaaacccaaacgcaaacccaaacgcaaacccaaacgcaaacccaaacgcaaacccaaacgcaaacccaaacgcaaauccaaacgcaaacccaaacgccaacccaaacgcaaacccaaacgcaaacccaaacguagacccaaacgcaaacccaaacgcaaacccaaacgcaaacccaaacgcaaacccaaacgcaaacccaaacgcaaacccaaacgcaaacccaaacgcaaacccaaacgcaaauccaaacgcaaacccaaacgcaaacccaaacgcaaacccaaacgcaaacccaaacgcaaacccaaacgcaaacccaaacgcaaacccaaacgcaaacccaaacgcaaacccauaaggacuagucccuguucccagagcccacuuuuuuuucuuuuuuugaaauaaaauagccugucuuucagaucucaaaggcucuuuucagagccaccaaaaaaaaaaaaaaaaaaaaaaaaaaaaaaaaaaaaaaaaaaaaaaaaaaaaaaaaaaaaaaaaagaauu

SEQ ID NO: 6762 - RNA, 1213 nt, Artificial Sequence
  mRNA Design a-1 (hSL-A64-N5) comprising derived and/or modified sequence from Pf(3D7)__XP_001351122.1__HsALB_Pf-CSP(93-397) (opt6)
aggagagucccgcagucggcguccagcggcucugcuuguucgugugugugucguugcaggccuuauucaagcuuaccaugaaauggguaacauucauaucacuccuauuccuauucucaucagcauacucaaaacuaaaacaacccgcagacggaaacccagacccaaacgccaacccaaacguagacccaaacgcaaacccgaacguagacccaaacgcaaaccccaacguagacccaaacgcaaacccaaaugcaaacccaaacgcaaacccaaacgcaaacccaaacgcaaacccaaacgcaaacccaaacgcaaacccaaacgcaaacccaaacgcaaacccaaacgcgaaucccaacgcaaauccaaacgcaaacccaaacgcaaauccaaacgcaaacccgaacgcaaacccaaacgcaaacccaaacgcaaacccaaacguagauccaaacgcaaauccaaacgcaaacccaaacgcaaauccaaacgcaaacccaaacgcaaacccaaacgcaaaccccaacgcaaacccaaacgcaaacccaaacgcaaacccaaacgcaaauccaaacgccaacccaaacgcaaacccaaacgcaaacccaaacgcgaacccaaacgcgaacccaaacgcaaacccaaacgcaaacccaaacgcaaacccaaacaaaaacaaccaagggaacggacaaggacacaacaugccaaacgauccaaacagaaacguagacgaaaacgcaaacgcaaacucagcaguaaaaaacaacaacaacgaagaaccaucagacaaacacauaaaagaauaccuaaacaaaauacaaaacucacucucaacagaauggucaccaugcaguguaacaugcggaaauggaauacaaguacguauaaaaccaggaucagcaaacaaaccaaaagacgaauuagacuacgccaacgauauagaaaaaaaaauaugcaaaauggaaaaaugcagcucagucuucaacguagucaacagcucaauaggacuaauaaugguccucucauucuuauuucuaaacugaggacuagucccuguucccagagcccacuuuuuuuucuuuuuuugaaauaaaauagccugucuuucagaucucaaaggcucuuuucagagccaccaaaaaaaaaaaaaaaaaaaaaaaaaaaaaaaaaaaaaaaaaaaaaaaaaaaaaaaaaaaaaaaaagaauu

SEQ ID NO: 6763 - RNA, 583 nt, Artificial Sequence
  mRNA Design a-1 (hSL-A64-N5) comprising derived and/or modified sequence from Pf(3D7)__XP_001351122.1__HsALB_Pf-CSP(98-192) (opt6)
aggagagucccgcagucggcguccagcggcucugcuuguucgugugugugucguugcaggccuuauucaagcuuaccaugaaauggguaacauucauaagccuacuauuccuauucagcucagcauacagcgcagacggaaacccagacccaaacgcaaacccaaacguagacccaaacgcaaacccaaacguagacccaaacgcaaacccaaacguagacccaaacgcaaacccaaacgcaaacccaaacgcaaacccaaacgcaaacccaaacgcaaacccaaacgcaaacccaaacgcaaacccaaacgcaaacccaaacgcaaacccaaacgcaaacccaaacgcaaacccaaacgcaaacccaaacgcaaacccaaacgcaaacccaaacgcaaacccaaacgcaaacccauaaggacuagucccuguucccagagcccacuuuuuuuucuuuuuuugaaauaaaauagccugucuuucagaucucaaaggcucuuuucagagccaccaaaaaaaaaaaaaaaaaaaaaaaaaaaaaaaaaaaaaaaaaaaaaaaaaaaaaaaaaaaaaaaaagaauu

SEQ ID NO: 6764 - RNA, 823 nt, Artificial Sequence
  mRNA Design a-1 (hSL-A64-N5) comprising derived and/or modified sequence from Pf(3D7)__XP_001351122.1__HsALB_Pf-CSP(98-272) (opt6)
aggagagucccgcagucggcguccagcggcucugcuuguucgugugugugucguugcaggccuuauucaagcuuaccaugaaauggguaacauucauaucacuacuauuccuauucagcucagccuacagcgcagacggaaacccagacccaaacgcaaacccaaacguagacccaaacgcaaacccaaacgucgacccaaacgcaaacccaaacguagacccaaacgcaaacccaaacgcaaacccaaacgcaaacccaaacgcaaacccaaacgcaaacccaaacgcaaacccaaacgcaaacccaaacgcaaacccaaacgcaaacccaaacgcaaacccaaacgcaaacccaaacgcaaacccaaacgcaaacccaaacgcaaacccaaacgcaaacccaaacgcaaacccaaacgcaaacccaaacguagacccaaaugcaaacccaaacgcaaacccaaacgcaaacccaaacgcaaacccaaacgcaaacccaaacgcaaacccaaacgcaaacccaaacgcaaacccaaacgcaaacccaaacgcaaacccaaacgcaaacccaaacgcgaacccaaacgcaaacccaaacgcaaacccaaacgcaaacccaaacgcaaacccaaaugcaaacccaaacgcaaacccauaaggacuagucccuguucccagagcccacuuuuuuuucuuuuuuugaaauaaaauagccugucuuucagaucucaaaggcucuuuucagagccaccaaaaaaaaaaaaaaaaaaaaaaaaaaaaaaaaaaaaaaaaaaaaaaaaaaaaaaaaaaaaaaaaagaauu

SEQ ID NO: 6765 - RNA, 1129 nt, Artificial Sequence
  mRNA Design a-1 (hSL-A64-N5) comprising derived and/or modified sequence from Pf(3D7)__XP_001351122.1__HsALB_Pf-CSP(98-374) (opt6)
aggagagucccgcagucggcguccagcggcucugcuuguucgugugugugucguugcaggccuuauucaagcuuaccaugaaaugggucacauucauaucccuacuauuccuauucucaucagcauauucagcagauggaaacccagacccaaacgccaacccaaacguagacccaaacgcaaacccaaacguagacccaaacgcaaacccaaacguagacccaaacgcaaacccaaacgcaaacccaaacgcaaacccaaacgcaaacccaaacgcaaacccaaacgcaaacccaaacgcaaacccaaacgcaaacccaaacgcaaacccaaacgcaaacccaaacgcaaacccaaaugcaaauccaaacgcaaauccaaacgcaaacccaaacgccaacccaaacgcaaauccaaacgcaaacccaaacguagacccgaacgcaaacccgaacgcaaacccaaacgcaaacccaaaugcaaacccaaacgcaaacccaaacgccaacccaaacgcaaacccaaacgcaaacccaaaugcaaacccaaacgcaaacccaaacgccaacccaaacgcaaacccaaacgcaaacccaaacgcaaacccaaacgcaaacccaaaugcaaacccaaacgcaaacccaaacgcaaacccaaacaaaaacaaccaaggaaauggacaaggccacaacaugccaaacgacccaaacagaaacguagacgaaaacgcaaacgcaaacuccgcagucaaaaacaacaacaacgaagaaccauccgacaaacacauaaaagaauaccucaauaaaauacaaaacucacuaucaacagaaugguccccaugcucaguaacaugcggaaacggaauacaaguaagaauaaaaccaggauccgcaaacaaaccaaaagacgaacuagacuacgcaaacgauauagaaaaaaaaauaugcaaaauggaaaaaugcuaaggacuagucccuguucccagagcccacuuuuuuuucuuuuuuugaaauaaaauagccugucuuucagaucucaaaggcucuuuucagagccaccaaaaaaaaaaaaaaaaaaaaaaaaaaaaaaaaaaaaaaaaaaaaaaaaaaaaaaaaaaaaaaaaagaauu

SEQ ID NO: 6766 - RNA, 1198 nt, Artificial Sequence
  mRNA Design a-1 (hSL-A64-N5) comprising derived and/or modified sequence from Pf(3D7)__XP_001351122.1__HsALB_Pf-CSP(98-397) (opt6)
aggagagucccgcagucggcguccagcggcucugcuuguucgugugugugucguugcaggccuuauucaagcuuaccaugaaauggguaaccuucauaucauuacuauuccuuuucagcucggcauacucagcagacggcaacccagacccaaacgcaaacccaaacgucgacccaaaugcgaacccaaacguagacccaaacgcaaacccaaacguagauccaaacgcaaacccaaacgcaaacccaaacgcaaacccaaacgcaaacccaaacgccaacccaaaugcaaacccaaacgcaaaccccaacgcaaacccaaacgcaaacccaaacgcaaacccaaacgcaaaucccaacgcaaauccaaacgcaaacccaaaugcaaacccaaacgccaacccaaacgcaaacccaaacgcaaaccccaaugucgacccaaacgcaaacccaaacgcaaacccaaacgcaaacccaaacgcaaauccaaacgcaaaccccaacgcaaacccaaacgcaaacccaaacgcaaacccaaacgcaaacccaaacgcaaacccaaacgcaaacccaaacgcaaacccaaacgcaaacccaaacgcaaacccaaacgcaaauccaaacgcaaacccaaacgcaaacccaaacgcaaacccaaacaaaaacaaccaaggaaauggacaaggacacaacaugccaaaugaccccaacagaaacgucgacgaaaacgccaacgcaaacagcgcaguaaaaaacaacaacaaugaagaaccaucagacaaacacauaaaagaauaccuaaacaaaauucaaaacucacuaucaaccgaaugguccccaugcucaguaacaugcggaaacgguauacaaguacgaauaaaaccaggaucagcaaacaaaccaaaagacgaacuagacuacgcaaacgacauagaaaaaaaaauaugcaaaauggaaaaaugcucaucaguuuuuaacguagucaauagcucaaucggacucauaaugguacuaucauuucucuuccuaaauuaaggacuagucccuguucccagagcccacuuuuuuuucuuuuuuugaaauaaaauagccugucuuucagaucucaaaggcucuuuucagagccaccaaaaaaaaaaaaaaaaaaaaaaaaaaaaaaaaaaaaaaaaaaaaaaaaaaaaaaaaaaaaaaaaagaauu

SEQ ID NO: 6767 - RNA, 1525 nt, Artificial Sequence
  mRNA Design a-1 (hSL-A64-N5) comprising derived and/or modified sequence from Pf(3D7)__XP_001351122.1__HsALB_Pf-CSP(199-377)_L(PVTN)_HBsAg (opt6)
aggagagucccgcagucggcguccagcggcucugcuuguucgugugugugucguugcaggccuuauucaagcuuaccaugaaauggguaacauuuauauccuuacuauuucucuucuccucagcuuacucugacccaaacgcaaaucccaacgcaaacccaaaugcaaacccaaacgcaaauccaaacgcaaacccaaaugcuaaucccaacgcaaacccaaacgcaaaccccaaugccaacccaaacgcuaacccaaacgcaaacccaaacgccaacccaaaugcaaacccaaacgcaaacccaaacgcaaauccaaaugcaaacccaaacgcaaauccaaacgcaaacccaaacaaaaacaaccaaggaaacggacaaggccauaauaugccuaaugaccccaacagaaacguagacgaaaaugcuaacgccaacucagcaguaaaaaacaacaauaacgaagaaccaucagauaaacacauaaaagaauacuuaaacaaaauacaaaauucauuaucaacagaauggucaccaugcucagucaccugcggaaacgguauacaaguacgcauaaaaccaggcucagcaaauaaaccaaaagacgaacuagauuacgcuaacgacauagaaaaaaaaauaugcaaaauggaaaaaugcucaucaguaccaguaacaaauauggaaaacauaacaucaggauuccuaggcccacucuuaguacuacaagcaggauuuuuucuucuaacaagaaucuuaacuauaccccaaucacucgacucaugguggaccucacuaaauuuccucggaggaucuccaguaugccucggacaaaauucacaaucaccaacauccaaucacucacccaccuccugcccaccaaucugcccaggauacagauggaugugcuuacgaagauucauaauauuccuauucauacuacuucuaugcuuaauauuccuucucguccuacucgacuaucaaggaaugcucccuguaugcccacucauaccaggauccacaacaacuaacacaggacccuguaaaacaugcacaacacccgcccaaggaaauucaauguuccccucuugcugcugcacaaaaccaacagacggaaauugcacaugcauuccaauuccaucaucuugggcauuugcaaaauacuuaugggaaugggcaucaguccgauucucgugguuaucuuuacuaguaccauucguucaaugguuuguaggacuuucaccuacaguaugguuaucugcaauauggaugaugugguacuggggaccaucauuauacucaaucguaucaccauuuauaccacuacuacccauauuuuucugccuauggguauacauauaaggacuagucccuguucccagagcccacuuuuuuuucuuuuuuugaaauaaaauagccugucuuucagaucucaaaggcucuuuucagagccaccaaaaaaaaaaaaaaaaaaaaaaaaaaaaaaaaaaaaaaaaaaaaaaaaaaaaaaaaaaaaaaaaagaauu

SEQ ID NO: 6768 - RNA, 1435 nt, Artificial Sequence
  mRNA Design a-1 (hSL-A64-N5) comprising derived and/or modified sequence from Pf(3D7)__XP_001351122.1__Pf-CSP (opt11)
aggagagucccgcagucggcguccagcggcucugcuuguucgugugugugucguugcaggccuuauucaagcuuaccaugaugcgaaagcuugcgauccucagcgucuccucauuccuauucguagaagcacuauuccaagaauaccaaugcuacggcucauccucaaacacacgcguacucaacgaacucaacuacgacaacgcaggaacaaaccucuacaacgaacuagagaugaacuacuacggcaaacaagaaaacugguacucucucaaaaaaaacucacgaagccucggcgagaacgacgacggaaacaacgaagacaacgaaaaacuccgcaaaccaaaacacaaaaaacucaaacaacccgccgacggaaacccagacccaaacgcaaacccaaacguagacccaaacgccaaccccaacguagaccccaacgccaacccuaacgucgaccccaaugcaaaccccaacgcgaacccaaacgcaaaccccaacgcaaaccccaacgcaaacccaaacgccaaccccaacgcaaacccaaacgcaaacccuaacgccaacccaaacgccaacccaaacgccaacccaaacgcaaacccgaacgccaaccccaacgccaacccaaacgcaaacccaaacgcaaaccccaacgccaaccccaacguagaccccaacgcaaaccccaacgcaaacccaaacgccaaccccaacgccaaccccaacgccaaccccaacgccaaccccaaugccaacccaaacgcgaaccccaacgcaaacccgaacgcaaacccaaacgcgaacccaaacgcgaacccaaacgccaaccccaacgccaaccccaacgcaaacccaaacgcgaacccaaacgcaaaccccaacgccaacccaaacaaaaacaaccaaggaaacggacaaggccacaacaugccaaacgaccccaaccgcaacguagacgaaaacgccaacgccaacuccgcugucaagaacaacaacaacgaagaaccauccgacaaacacauaaaagaauaccuaaacaaaauccaaaacucccucucaaccgaauggucccccugcuccgucacaugcggaaacggcauccaaguccgaaucaaaccaggcuccgccaacaaacccaaagacgaacuggacuacgccaacgacaucgaaaaaaaaaucugcaaaauggaaaaaugcucauccgucuucaacguggucaacuccuccaucggacuaauaaugguccucuccuuccuauuccuaaacuaaggacuagucccuguucccagagcccacuuuuuuuucuuuuuuugaaauaaaauagccugucuuucagaucucaaaggcucuuuucagagccaccaaaaaaaaaaaaaaaaaaaaaaaaaaaaaaaaaaaaaaaaaaaaaaaaaaaaaaaaaaaaaaaaagaauu

SEQ ID NO: 6769 - RNA, 1366 nt, Artificial Sequence
  mRNA Design a-1 (hSL-A64-N5) comprising derived and/or modified sequence from Pf(3D7)__XP_001351122.1__Pf-CSP(1-374) (opt11)
aggagagucccgcagucggcguccagcggcucugcuuguucgugugugugucguugcaggccuuauucaagcuuaccaugaugcgcaaacucgcaauccucuccgucucaucguuccuauucguagaagcacucuuccaagaauaccaaugcuacggcucaagcuccaacacaagaguacucaacgaacucaacuacgacaaugccggaacaaaccuauacaacgagcuagaaaugaacuacuacggcaaacaagaaaacugguacucgcuaaaaaaaaacagcagaagccuaggugaaaacgacgacggaaacaacgaagacaacgaaaaacugcgcaaaccaaaacacaaaaaacuaaaacaacccgcagacggcaacccagacccaaacgcaaacccaaacguagaccccaacgccaacccaaacguagacccaaacgccaacccaaacguagacccaaacgcaaacccgaacgcaaacccaaacgcaaacccaaacgcaaacccaaacgcaaacccaaacgccaaccccaacgcaaauccaaacgcaaaccccaacgcaaaccccaacgccaacccaaacgcaaaccccaacgcgaacccaaacgccaaccccaacgccaacccaaacgcaaacccaaacgcaaacccaaacgccaaccccaacgucgacccaaacgccaacccaaacgcaaaccccaacgccaaccccaacgcaaacccaaacgccaacccgaacgcaaacccgaacgcaaacccaaacgcaaaccccaacgcaaaccccaacgcaaacccaaacgcaaaccccaacgccaaccccaacgccaaccccaacgcaaacccaaacgcaaacccgaacgcaaaccccaacgcaaaccccaacgccaaucccaacaaaaacaaccaaggcaacggacaaggacacaacaugccaaacgaccccaaccgcaacgucgacgaaaacgccaacgccaacuccgcggucaaaaacaacaacaacgaagagcccucagacaaacacauaaaagaauaccuaaacaaaauccaaaacucccucucgacagaauggucccccugcagcgucaccugcggaaacggcauacaaguacgaauaaaacccggcucagccaacaaaccaaaagacgaacuagacuacgccaacgacauagaaaaaaaaauaugcaaaauggaaaaaugcugaggacuagucccuguucccagagcccacuuuuuuuucuuuuuuugaaauaaaauagccugucuuucagaucucaaaggcucuuuucagagccaccaaaaaaaaaaaaaaaaaaaaaaaaaaaaaaaaaaaaaaaaaaaaaaaaaaaaaaaaaaaaaaaaagaauu

SEQ ID NO: 6770 - RNA, 1219 nt, Artificial Sequence
  mRNA Design a-1 (hSL-A64-N5) comprising derived and/or modified sequence from Pf(3D7)__XP_001351122.1__Pf-CSP(1-325) (opt11)
aggagagucccgcagucggcguccagcggcucugcuuguucgugugugugucguugcaggccuuauucaagcuuaccaugaugcgcaaacucgcaauccuaucaguaagcucauuccuguucguagaagcacuauuccaagaauaccaaugcuacggcucauccucaaacacaagaguacuaaacgaacuaaacuacgacaacgccggaaccaaccuauacaacgaacucgaaaugaacuacuacggcaaacaagaaaacugguacucacuaaagaaaaacagcagaagccucggcgaaaacgacgacggcaacaacgaagacaacgagaaacugagaaaaccaaaacacaagaaacuaaaacaacccgcggacgggaacccagacccaaaugcaaacccaaacgucgacccaaacgcaaacccaaacguagacccaaacgcaaaccccaacguagaccccaacgcaaacccaaacgcaaacccaaacgcaaacccaaacgcaaacccaaacgcaaaccccaacgcaaacccaaacgcaaacccaaacgcaaaccccaacgccaacccaaacgccaaccccaacgcaaacccaaacgcaaacccaaacgcaaaccccaacgccaacccgaacgcaaacccaaacgcaaacccaaacgcaaaccccaacguagacccaaacgcaaacccaaacgccaaccccaacgcaaacccaaacgcaaacccgaacgcaaaccccaacgcaaaccccaacgcaaacccaaacgcaaaccccaacgcaaauccaaacgcaaacccaaacgcaaacccaaacgccaacccaaacgcaaaucccaacgcaaacccaaacgcaaaccccaacgcaaacccaaacgcaaacccaaacgcaaacccaaacaaaaacaaccaaggaaacggccaaggacacaacaugccaaacgacccaaaccgaaacguagacgaaaacgccaacgccaacagcgcagucaaaaacaacaauaaugaagaacccuccgacaaacacauaaaagaauaccuaaacaaaauccaaaacugaggacuagucccuguucccagagcccacuuuuuuuucuuuuuuugaaauaaaauagccugucuuucagaucucaaaggcucuuuucagagccaccaaaaaaaaaaaaaaaaaaaaaaaaaaaaaaaaaaaaaaaaaaaaaaaaaaaaaaaaaaaaaaaaagaauu

SEQ ID NO: 6771 - RNA, 1435 nt, Artificial Sequence
  mRNA Design a-1 (hSL-A64-N5) comprising derived and/or modified sequence from Pf(3D7)__XP_001351122.1__HsALB_Pf-CSP(19-397) (opt11)
aggagagucccgcagucggcguccagcggcucugcuuguucgugugugugucguugcaggccuuauucaagcuuaccaugaaaugggucaccuucauaucccuccuauuccucuucucaucagccuacucccucuuccaggaauaccaaugcuacggaucguccucaaacacuagaguacucaaugaauuaaacuacgacaacgccggcaccaaccucuacaacgaacucgaaaugaacuacuacggaaaacaagaaaacugguacucacucaaaaaaaacucucgaucccucggcgaaaacgacgacggcaacaacgaagacaacgagaaacuacgcaaaccaaaacacaaaaaauuaaaacaacccgccgacggcaaccccgaccccaacgccaaccccaacguagaccccaacgcgaaccccaacgucgacccaaacgccaaccccaacguggaccccaacgccaacccaaacgccaaccccaacgccaacccaaacgcaaaccccaacgccaacccaaacgccaaccccaacgcaaacccaaacgcgaacccaaacgcaaacccaaacgccaacccaaacgcaaacccaaacgcgaacccaaacgccaacccaaacgccaaccccaacgcaaacccaaacgccaacccaaacgccaacccaaacguagacccaaacgcgaaccccaacgcuaacccaaacgcaaacccaaacgccaacccaaacgccaacccuaacgcaaacccaaacgccaaccccaacgccaaccccaacgccaaccccaacgcaaacccaaacgccaacccaaacgccaaccccaacgccaacccaaacgcaaacccaaacgcaaacccaaacgcaaaccccaacgccaacccaaacgccaacccaaacaaaaauaaccaaggcaaugggcaaggccacaacaugccaaacgaccccaaccgcaaugucgacgaaaacgccaacgccaacucugcaguaaaaaacaauaacaacgaagaacccucagacaaacacaucaaagaauaccucaacaagauccaaaauucccucuccacagaauggucccccugcagcguaaccugcggcaacggcauccaaguccgcaucaaacccggcuccgccaacaaaccgaaagacgaacuagacuacgccaacgacauagaaaaaaaaaucugcaaaauggaaaaaugcagcuccgucuucaacgucgucaacagcuccaucggccucaucaugguccucuccuuccuguuccucaacuaaggacuagucccuguucccagagcccacuuuuuuuucuuuuuuugaaauaaaauagccugucuuucagaucucaaaggcucuuuucagagccaccaaaaaaaaaaaaaaaaaaaaaaaaaaaaaaaaaaaaaaaaaaaaaaaaaaaaaaaaaaaaaaaaagaauu

SEQ ID NO: 6772 - RNA, 1453 nt, Artificial Sequence
  mRNA Design a-1 (hSL-A64-N5) comprising derived and/or modified sequence from Pf(3D7)__XP_001351122.1__HsIns-iso1_Pf-CSP(19-397) (opt11)
aggagagucccgcagucggcguccagcggcucugcuuguucgugugugugucguugcaggccuuauucaagcuuaccauggcacucuggaugagacuccucccccuccucgcacuccucgcccuauggggcccagacccagcggcagcccucuuccaagaauaccaaugcuacggcucauccuccaacacccgaguccucaaugaacuaaacuacgacaacgccggcaccaaccuauacaacgaacuagaaaugaacuacuacggcaaacaagaaaacugguacucccucaaaaaaaauucacgcucccuaggugagaacgacgacggaaacaacgaagacaacgaaaaacuccgaaaacccaaacacaaaaaacuaaaacaaccagcagacggcaaccccgaccccaacgcaaaccccaacguagacccaaacgcgaaccccaacgucgauccaaacgccaacccaaacguugaccccaacgcgaaccccaacgcaaacccaaacgcaaacccuaacgcgaaccccaacgcaaaccccaacgccaaccccaacgccaaccccaacgccaacccaaacgcaaaccccaacgccaaccccaacgcaaacccaaacgcaaacccgaacgcaaaccccaacgccaacccaaacgcaaacccaaacgccaacccaaacgcaaaccccaacguagacccaaacgccaaucccaacgcgaaccccaacgcaaacccaaacgcgaacccaaacgccaacccaaacgcaaacccgaacgccaacccaaacgccaaccccaacgcaaaccccaacgcaaacccaaacgccaacccaaacgcaaacccaaacgcaaaccccaacgccaaccccaacgcaaacccaaaugccaaccccaacgccaaccccaacgcaaacccaaacaaaaacaaccaaggaaacggccaaggccacaacaugccgaacgaccccaaccgaaacgucgacgaaaacgcaaacgccaacucagcggucaaaaacaacaacaacgaagaacccucagacaaacacaucaaagaauaccuaaacaagauccagaacucucucucaacagaauggucccccugcuccguaacaugcggcaacggcauccaaguacgaaucaaaccgggaucagccaauaaacccaaagacgaacucgacuacgccaacgacaucgaaaaaaaaauaugcaaaauggaaaaaugcagcucagucuucaacguagucaacagcuccauaggccucaucaugguacucuccuuccuguuccuaaacuaaggacuagucccuguucccagagcccacuuuuuuuucuuuuuuugaaauaaaauagccugucuuucagaucucaaaggcucuuuucagagccaccaaaaaaaaaaaaaaaaaaaaaaaaaaaaaaaaaaaaaaaaaaaaaaaaaaaaaaaaaaaaaaaaagaauu

SEQ ID NO: 6773 - RNA, 1432 nt, Artificial Sequence
  mRNA Design a-1 (hSL-A64-N5) comprising derived and/or modified sequence from Pf(3D7)__XP_001351122.1__HsSPARC_Pf-CSP(19-397) (opt11)
aggagagucccgcagucggcguccagcggcucugcuuguucgugugugugucguugcaggccuuauucaagcuuaccaugcgcgccuggauauucuuccuccuaugccuagcaggacgcgcccucgcacucuuccaagaauaccaaugcuacggcucauccucaaacacccgcguacuuaacgaacuaaacuacgacaacgccggaaccaaccuauacaacgaacucgaaaugaacuacuacgguaaacaagaaaacugguacucccucaaaaaaaacagccgaagccuaggagaaaacgacgacggaaacaacgaagacaacgaaaaacugcgcaaacccaaacacaaaaaacucaaacaacccgcagacgggaacccagacccaaacgcaaacccaaacguggacccaaacgccaacccuaacguagaccccaacgcaaaccccaacgucgacccuaaugcaaacccaaacgccaaccccaacgcgaacccaaacgcaaaccccaacgcuaacccgaacgccaaccccaacgccaacccgaacgcaaacccaaacgcaaacccaaacgcgaacccaaacgcaaacccaaacgccaaccccaacgcgaacccaaacgccaauccaaacgccaacccaaacgcaaacccaaacgccaaccccaacguagacccaaacgccaacccaaacgcgaacccaaacgcaaaccccaacgcaaacccaaacgcaaacccaaacgccaacccuaacgcaaacccaaacgccaaccccaacgccaacccaaacgcaaacccaaacgccaacccaaacgccaaccccaacgcaaacccgaacgcaaaccccaacgcaaacccaaacgcaaacccaaacgcgaacccgaacgccaacccaaauaagaacaaccaaggaaacggacaaggccacaacaugccaaacgaccccaaccgcaacgucgacgaaaacgcaaaugccaacuccgcagucaaaaacaacaauaacgaagaacccucggacaaacacaucaaagaauaccucaacaagauccaaaacucacucuccaccgaauggucacccugcagcguaacuugcggcaacggcauccaaguccgcauaaaaccaggcuccgcaaacaaacccaaagacgaacucgacuaugccaacgacaucgaaaaaaaaauaugcaaaauggaaaaaugcagcucagucuucaacguagucaacagcucuaucggacuaauaaugguacucuccuuccuauucuuaaacuaaggacuagucccuguucccagagcccacuuuuuuuucuuuuuuugaaauaaaauagccugucuuucagaucucaaaggcucuuuucagagccaccaaaaaaaaaaaaaaaaaaaaaaaaaaaaaaaaaaaaaaaaaaaaaaaaaaaaaaaaaaaaaaaaagaauu

SEQ ID NO: 6774 - RNA, 1435 nt, Artificial Sequence
  mRNA Design a-1 (hSL-A64-N5) comprising derived and/or modified sequence from Pf(3D7)__XP_001351122.1__IgE_Pf-CSP(19-397) (opt11)
aggagagucccgcagucggcguccagcggcucugcuuguucgugugugugucguugcaggccuuauucaagcuuaccauggacuggacauggauccucuuccucgucgccgcggccacacgcguacacucacucuuccaagaauaucaaugcuacggcucaagcucgaacacgcgcguacucaacgaacuaaacuacgacaacgccggcaccaaccuauacaacgaacucgaaaugaacuacuacggcaaacaagaaaacugguacucacuuaagaaaaauucacgaucccucggagaaaacgacgaugggaacaacgaagacaacgaaaaacuacgcaaacccaaacacaagaaacuuaaacaacccgcagacggcaacccagacccaaacgcaaaccccaacguagaccccaacgcaaacccaaacguagacccaaacgccaacccaaacguagacccaaacgcgaacccaaacgccaacccaaacgccaaccccaacgcaaacccaaacgcaaauccaaacgcaaacccaaaugcaaacccgaacgccaauccaaacgcaaaccccaacgcaaacccaaacgcaaaccccaaugccaacccaaacgcaaaccccaacgcaaaccccaacgcaaaccccaacgcaaacccaaacgcgaacccaaacguagaccccaacgccaaccccaacgccaacccaaacgcaaacccaaacgccaacccaaacgccaaccccaacgcaaaccccaacgcaaacccgaacgcaaacccaaacgcaaacccaaacgcaaacccgaacgcaaacccuaacgcgaaccccaacgccaaccccaacgcaaacccaaacgcaaacccaaacgccaacccaaacgcaaacccaaacgcaaacccaaacaaaaacaaccaaggaaacgggcaaggacauaacaugccgaacgaccccaaccgcaacguagacgaaaacgccaacgccaacagcgcagucaaaaacaacaacaacgaagaacccuccgacaaacacaucaaagaauaccuaaacaaaauccagaacucacuauccaccgaauggucccccugcagcgugaccugcggcaacggcauacaaguccgcauaaaaccaggcuccgccaacaaacccaaagacgaacuagacuacgccaacgacauagaaaagaaaauaugcaaaauggaaaaaugcagcucagucuucaauguagucaacuccuccaucggacucauaaugguccuaucauuccucuuccuaaacuaaggacuagucccuguucccagagcccacuuuuuuuucuuuuuuugaaauaaaauagccugucuuucagaucucaaaggcucuuuucagagccaccaaaaaaaaaaaaaaaaaaaaaaaaaaaaaaaaaaaaaaaaaaaaaaaaaaaaaaaaaaaaaaaaagaauu

SEQ ID NO: 6775 - RNA, 1600 nt, Artificial Sequence
  mRNA Design a-1 (hSL-A64-N5) comprising derived and/or modified sequence from Pf(3D7)__XP_001351122.1__Pf-CSP_L(G4SG4)_TM domain HA (opt11)
aggagagucccgcagucggcguccagcggcucugcuuguucgugugugugucguugcaggccuuauucaagcuuaccaugaugcgcaaacucgccauccucagcgucagcucguuccucuucgucgaagcacuauuccaagaauaccaguguuacggcucauccucaaacacacgcgugcucaacgaacuaaacuacgacaacgccggcaccaaccucuacaacgaacuagaaaugaacuauuacggcaagcaagaaaacugguacucacucaaaaaaaacagccgaagccuaggcgagaacgacgacgggaacaacgaagacaacgaaaaacuacgcaaacccaagcacaaaaaacugaaacaaccagccgacggaaauccagaccccaacgcaaacccgaacguagaccccaacgcgaaccccaacguggacccgaacgcaaacccgaacguagacccaaacgcaaacccaaacgcgaacccaaacgcaaacccaaacgcuaacccaaacgcaaaccccaacgccaaccccaacgcgaacccaaacgcaaacccaaacgcaaacccaaacgcaaacccgaacgcaaacccaaacgccaacccaaacgcgaacccaaacgccaacccaaacgcaaacccaaacgcaaacccaaacgcaaacccaaacguagacccgaacgccaacccgaaugcaaacccaaacgcaaacccgaacgcaaacccaaacgcgaacccgaacgccaacccaaacgcaaacccgaacgcaaaccccaacgccaacccaaacgcaaaccccaacgcaaaccccaacgcaaacccgaacgcaaacccaaacgcaaacccaaacgccaaccccaacgccaaccccaacgcaaacccgaacgccaacccaaacaaaaacaaccaaggcaacgggcaaggacacaacaugccaaacgaccccaaccgaaacgucgacgaaaacgccaacgccaacuccgcagucaaaaacaacaacaacgaagaacccucagacaaacacauaaaagaauaccucaacaaaauccaaaacucacucucaaccgaguggucacccugcagugugaccuguggcaacggaauacaaguacgcauaaaacccggaucagccaacaaaccgaaagacgaacuagacuacgccaacgacauagaaaaaaaaauaugcaaaauggagaaaugcagcucugucuucaacgucgucaacagcucaaucggacucauaaugguccucuccuuccuauuccucaacggcggagggggcucaggcggcggaggaaaauuagaauccaccagaaucuaucagauucucgccauauacagcacagucgcaagcucgcuuguccuugucguaucacuaggcgcaaucucauucuggaugugcuccaacggaagccugcaaugccgcauuugcauauaaggacuagucccuguucccagagcccacuuuuuuuucuuuuuuugaaauaaaauagccugucuuucagaucucaaaggcucuuuucagagccaccaaaaaaaaaaaaaaaaaaaaaaaaaaaaaaaaaaaaaaaaaaaaaaaaaaaaaaaaaaaaaaaaagaauu

SEQ ID NO: 6776 - RNA, 1474 nt, Artificial Sequence
  mRNA Design a-1 (hSL-A64-N5) comprising derived and/or modified sequence from Pf(3D7)__XP_001351122.1__Pf-CSP(199-377)_L(PVTN)_HBsAg (opt11)
aggagagucccgcagucggcguccagcggcucugcuuguucgugugugugucguugcaggccuuauucaagcuuaccauggaccccaacgccaaccccaacgccaaccccaacgccaaucccaacgcuaaccccaacgccaaccccaacgcaaaccccaacgccaacccaaacgccaaccccaacgcaaaccccaacgccaaucccaaugccaaccccaacgccaaccccaacgcgaaccccaacgccaaccccaacgcaaacccaaacgccaaccccaacgccaaccccaacgccaaccccaacaaaaacaaccaaggcaacggccaaggccacaacaugcccaacgaccccaaccgcaacguagacgagaacgccaacgccaacagcgcugucaaaaacaacaacaacgaggaacccuccgacaaacacaucaaagaauaccuuaacaaaauccaaaacucucucuccaccgaguggucccccugcucagucacaugcggcaacggcauacaaguucguaucaaacccggcucagcaaacaaacccaaagacgaacucgacuacgcaaacgacauagaaaagaaaaucugcaaaauggaaaaauguucauccguccccgucaccaacauggaaaacaucacuuccggauuccucgguccccuacucguacuccaagccggcuucuuccuccucacccgcauccucaccaucccccaaucacuugacuccugguggaccucccucaacuuccucggcggcucccccgucugccuaggccaaaacagccaaucccccacuagcaaccacucccccacauccugcccacccaucugccccggauaucgauggaugugccuucgccgauucauaaucuuccucuucauccuccuacucugccucaucuuccuccucguccuucuagauuaccaaggcaugcuccccgucugcccccuuauccccggcuccaccaccacaaacaccggccccugcaaaaccugcacaacccccgcccaaggcaauagcauguuccccuccugcugcugcacuaaaccaacagacggcaacuguaccugcaucccaaucccaucaucaugggccuucgccaaauaccucugggaaugggcaucuguacgauucuccuggcucucccuucucguacccuucguccagugguucgucggccucucccccaccguauggcuauccgccaucuggaugaugugguacuggggccccucccuauacuccaucgucuccccauucauaccacuccuacccaucuucuucugccucugggucuacaucugaggacuagucccuguucccagagcccacuuuuuuuucuuuuuuugaaauaaaauagccugucuuucagaucucaaaggcucuuuucagagccaccaaaaaaaaaaaaaaaaaaaaaaaaaaaaaaaaaaaaaaaaaaaaaaaaaaaaaaaaaaaaaaaaagaauu

SEQ ID NO: 6777 - RNA, 1516 nt, Artificial Sequence
  mRNA Design a-1 (hSL-A64-N5) comprising derived and/or modified sequence from Pf(3D7)__XP_001351122.1__Pf-CSP(199-387)_L(PVTN)_HBsAg (opt11)
aggagagucccgcagucggcguccagcggcucugcuuguucgugugugugucguugcaggccuuauucaagcuuaccaugauggcccccgaccccaacgcaaauccaaacgcaaaccccaacgccaacccuaacgcaaaccccaacgccaacccaaacgccaaucccaacgccaacccuaacgccaaccccaacgcaaaccccaacgccaaccccaacgccaacccuaacgcaaaccccaacgccaacccaaacgcaaaccccaacgccaaccccaacgccaaccccaacgcaaacccaaacgcaaaccccaacaaaaacaaccaaggaaacggacaaggccacaacaugccuaacgaccccaaucgcaacgucgacgaaaacgcaaacgccaacuccgccgucaaaaacaacaacaacgaagaacccucugacaaacacaucaaagaauaccucaacaagauccaaaacucccuauccaccgaauggucccccugcuccgucacuugcgguaauggcauccaaguccgcauaaaaccaggauccgcaaacaaacccaaagacgaacuagacuacgccaacgacauagaaaagaaaaucugcaaaauggaaaaaugcuccucagucuucaaugucguaaacuccuccauuggccuaggccccgucaccaacauggaaaacauuaccuccggauuccucgguccucuccucguccuccaagccggauucuuucuccucacacgaauccucacuaucccucaaucccuggacucaugguggaccucccucaacuuccugggcggcucccccgucugccucggccaaaacagccaauccccaaccuccaaucacucccccacaagcugcccucccauaugccccggcuaccgcuggaugugccuccgucgcuucaucauauuccucuucauacuucuccucugccucaucuuccuccuuguccugcuagacuaccaaggcaugcuccccgucugcccacucauccccgguuccaccacaacaaacaccggccccugcaaaacaugcaccacacccgcccaagguaacuccauguuccccuccugcugcugcaccaaaccaaccgacggcaacugcacuugcauucccauccccucauccugggccuucgccaaauaccucugggaaugggcauccguccguuucucauggcuaucucuccuaguaccauucguacaaugguucguuggccucucccccaccguauggcucuccgccauauggaugaugugguacuggggcccuucacuuuacuccaucgucucacccuucaucccacuccuacccaucuucuucugccuuuggguauacaucuaaggacuagucccuguucccagagcccacuuuuuuuucuuuuuuugaaauaaaauagccugucuuucagaucucaaaggcucuuuucagagccaccaaaaaaaaaaaaaaaaaaaaaaaaaaaaaaaaaaaaaaaaaaaaaaaaaaaaaaaaaaaaaaaaagaauu

SEQ ID NO: 6778 - RNA, 700 nt, Artificial Sequence
  mRNA Design a-1 (hSL-A64-N5) comprising derived and/or modified sequence from Pf(3D7)__XP_001351122.1__HsALB_Pf-CSP(19-152) (opt11)
aggagagucccgcagucggcguccagcggcucugcuuguucgugugugugucguugcaggccuuauucaagcuuaccaugaaaugggucaccuucaucucccuccucuuccucuucuccagcgcauacucccucuuccaagaauaccaaugcuacggcuccuccuccaacacccgcguccucaacgaacucaacuacgacaacgccggcaccaaccucuacaacgaacucgaaaugaacuacuacggcaaacaagaaaacugguacucccucaaaaaaaacucccgcucccuaggcgaaaacgacgacggaaacaacgaagacaacgaaaaacuccgcaaacccaaacacaaaaaacucaaacaacccgccgacggaaaccccgaccccaacgccaacccaaacgucgaccccaacgccaaccccaacgucgaccccaacgccaaccccaacgucgaccccaacgccaaccccaacgcaaacccaaacgcaaacccaaacgccaaccccaacgccaaccccaacgccaaccccuaaggacuagucccuguucccagagcccacuuuuuuuucuuuuuuugaaauaaaauagccugucuuucagaucucaaaggcucuuuucagagccaccaaaaaaaaaaaaaaaaaaaaaaaaaaaaaaaaaaaaaaaaaaaaaaaaaaaaaaaaaaaaaaaaagaauu

SEQ ID NO: 6779 - RNA, 820 nt, Artificial Sequence
  mRNA Design a-1 (hSL-A64-N5) comprising derived and/or modified sequence from Pf(3D7)__XP_001351122.1__HsALB_Pf-CSP(19-192) (opt11)
aggagagucccgcagucggcguccagcggcucugcuuguucgugugugugucguugcaggccuuauucaagcuuaccaugaaauggguaaccuucauaucccuccucuuccuauucucgagcgccuacucccucuuccaagaauaccaaugcuacggcucauccuccaacacccgcguccucaacgaacucaacuacgacaacgccggcaccaaccucuacaacgaacuagagaugaacuacuacggcaaacaagaaaacugguacucacucaaaaaaaacucccgaucccuaggagaaaacgacgacggcaacaacgaagacaacgaaaaacuacgaaaacccaaacacaaaaaacucaaacaacccgccgacggcaaccccgaccccaacgccaaccccaacgucgaccccaacgccaacccaaacguagaccccaacgccaaccccaacgucgacccaaacgccaaccccaacgccaaccccaacgccaacccaaacgcaaacccaaacgcaaacccaaacgccaacccaaacgccaaccccaacgccaaccccaacgcaaaccccaacgcaaaccccaacgccaacccaaacgcaaaccccaacgccaacccaaacgccaacccaaacgccaaccccaacgcaaaccccuaaggacuagucccuguucccagagcccacuuuuuuuucuuuuuuugaaauaaaauagccugucuuucagaucucaaaggcucuuuucagagccaccaaaaaaaaaaaaaaaaaaaaaaaaaaaaaaaaaaaaaaaaaaaaaaaaaaaaaaaaaaaaaaaaagaauu

SEQ ID NO: 6780 - RNA, 1060 nt, Artificial Sequence
  mRNA Design a-1 (hSL-A64-N5) comprising derived and/or modified sequence from Pf(3D7)__XP_001351122.1__HsALB_Pf-CSP(19-272) (opt11)
aggagagucccgcagucggcguccagcggcucugcuuguucgugugugugucguugcaggccuuauucaagcuuaccaugaaauggguaaccuucaucucccuccucuuccuauucucaucagcauacucacucuuccaagaauaccaaugcuacggcucgagcucaaacacacgcguacucaacgaacugaacuacgacaacgccggaaccaaccucuacaaugaacucgaaaugaacuacuacggcaaacaagagaacugguacucacucaaaaaaaacagcagaagccucggagaaaacgacgacggaaacaacgaagacaacgaaaaacuccgcaaacccaagcacaaaaaacuaaaacaacccgcagacggaaaccccgaccccaacgcaaacccgaacgucgacccaaacgccaacccaaacguagaccccaacgcgaacccaaacguagacccaaacgccaacccaaacgcaaaccccaacgccaaccccaacgcaaacccaaacgccaacccaaacgcaaaccccaaugcaaaccccaacgcaaacccaaacgccaaccccaacgcaaacccaaacgcaaacccaaacgcaaacccaaacgcaaacccaaacgcgaacccaaacgcaaacccaaacgcaaacccgaacgcaaacccaaacguagacccaaacgcaaaccccaacgccaacccaaacgcaaacccaaacgcaaacccaaacgcaaacccaaacgcgaacccaaacgccaacccaaacgcaaacccaaacgcaaacccaaacgcaaacccaaacgcaaacccaaacgcaaacccaaacgcaaacccgaacgcgaacccaaacgcaaacccaaacgcgaacccgaacgcaaaccccaacgcaaacccauaaggacuagucccuguucccagagcccacuuuuuuuucuuuuuuugaaauaaaauagccugucuuucagaucucaaaggcucuuuucagagccaccaaaaaaaaaaaaaaaaaaaaaaaaaaaaaaaaaaaaaaaaaaaaaaaaaaaaaaaaaaaaaaaaagaauu

SEQ ID NO: 6781 - RNA, 1222 nt, Artificial Sequence
  mRNA Design a-1 (hSL-A64-N5) comprising derived and/or modified sequence from Pf(3D7)__XP_001351122.1__HsALB_Pf-CSP(19-272)_L(AAY)_Pf-CSP(310-3 27)_L(AAY)_Pf-CSP(346-375) (opt11)
aggagagucccgcagucggcguccagcggcucugcuuguucgugugugugucguugcaggccuuauucaagcuuaccaugaaaugggucaccuucaucucacuccuauuccuauucuccuccgcauacucacucuuccaagaauaccagugcuacggaucaagcuccaacacacgcguacuaaacgaacugaacuacgacaacgccggaaccaaccucuacaacgaacucgaaaugaauuacuacggcaaacaagagaacugguacucacucaaaaaaaacagcagaucccuaggcgaaaacgacgacggaaacaacgaagacaacgaaaaacuacgcaaacccaaacacaaaaaacuaaaacaacccgcagacggaaacccagauccaaacgcaaacccaaacguagacccaaacgccaacccaaacguagacccaaacgcaaacccaaacguagaccccaacgcaaacccaaacgcaaacccgaacgccaacccaaacgcaaaccccaacgccaacccaaacgcaaacccaaacgcaaacccaaacgcaaacccaaacgccaaccccaacgcgaacccaaacgcaaacccuaacgccaacccaaacgcaaacccaaacgcaaacccgaacgcaaacccaaacgcaaacccaaacgcaaacccgaacguagacccaaacgcaaacccaaacgcaaacccaaacgcaaacccaaacgccaacccaaacgccaacccaaacgcaaaccccaacgcaaaccccaacgcgaacccaaacgccaaccccaacgcaaacccaaacgccaacccaaacgccaacccgaacgcaaacccaaacgccaacccaaacgccaacccgaacgcaaacccaaacgccaacccaaacgccaacccagccgcguacgaacccucagauaaacacauaaaagaauaccucaacaaaauccaaaacucacuagcagccuacaucaaaccaggauccgccaacaaacccaaggacgaacucgacuacgcaaacgacaucgaaaaaaaaaucugcaaaauggaaaaaugcucaugaggacuagucccuguucccagagcccacuuuuuuuucuuuuuuugaaauaaaauagccugucuuucagaucucaaaggcucuuuucagagccaccaaaaaaaaaaaaaaaaaaaaaaaaaaaaaaaaaaaaaaaaaaaaaaaaaaaaaaaaaaaaaaaaagaauu

SEQ ID NO: 6782 - RNA, 1183 nt, Artificial Sequence
  mRNA Design a-1 (hSL-A64-N5) comprising derived and/or modified sequence from Pf(3D7)__XP_001351122.1__HsALB_Pf-CSP(19-272)_L(AAY)_Pf-CSP(346-3 65)_L(AAY)_P2 (opt11)
aggagagucccgcagucggcguccagcggcucugcuuguucgugugugugucguugcaggccuuauucaagcuuaccaugaaaugggucaccuucaucucacuccuauuccuauucucgagcgcauacucacucuuccaagaauaccaaugcuauggcuccagcucaaacacacgcguccuaaacgaacucaacuacgacaacgccggaacaaaccucuacaacgaacucgaaaugaacuacuacggcaaacaagaaaacugguacucgcucaaaaaaaacucccgaagucuaggcgaaaacgacgacggaaacaacgaagacaacgaaaaacuacgcaaacccaaacacaaaaaacuaaaacaacccgcagacggaaaccccgacccaaacgcaaaccccaacguagacccaaacgcaaaccccaacguagacccaaacgcaaacccgaacguagacccaaacgccaacccaaacgccaaccccaacgcaaacccaaacgccaaccccaacgcaaacccaaacgcaaacccaaacgcaaacccaaacgcaaacccaaacgccaaccccaacgccaacccaaacgccaaccccaacgcgaaccccaacgcgaacccaaacgccaacccaaacgcaaaccccaacgcaaacccaaacgcaaacccaaacgucgacccaaacgcaaacccaaacgcaaacccgaacgcaaacccaaacgcaaaccccaacgccaacccaaacgcgaacccaaacgccaacccaaacgccaacccaaacgcaaacccaaacgccaacccaaacgcaaacccaaacgcaaaccccaacgcaaaccccaacgcaaacccaaacgccaaccccaacgcaaaccccaacgcaaacccaaacgccaacccagccgcauacauaaaacccggcuccgccaacaaaccaaaagacgaacuagacuacgccaacgacauagaagcagccuaccaauacaucaaagccaacagcaaauucauaggaauaaccgagcuauaaggacuagucccuguucccagagcccacuuuuuuuucuuuuuuugaaauaaaauagccugucuuucagaucucaaaggcucuuuucagagccaccaaaaaaaaaaaaaaaaaaaaaaaaaaaaaaaaaaaaaaaaaaaaaaaaaaaaaaaaaaaaaaaaagaauu

SEQ ID NO: 6783 - RNA, 1177 nt, Artificial Sequence
  mRNA Design a-1 (hSL-A64-N5) comprising derived and/or modified sequence from Pf(3D7)__XP_001351122.1__HsALB_Pf-CSP(19-272)_L(AAY)_Pf-CSP(346-3 65)_L(AAY)_PADRE (opt11)
aggagagucccgcagucggcguccagcggcucugcuuguucgugugugugucguugcaggccuuauucaagcuuaccaugaaauggguaaccuucaucucgcuacuguuccucuucucauccgcauacucccucuuccaagaauaccaaugcuacggcucauccucaaacacacgaguacuaaacgaacucaacuacgacaacgccggaaccaaccuauacaacgaacucgaaaugaacuacuacggcaaacaagaaaacugguacucacucaaaaaaaacucccgaucccucggcgaaaacgacgacggaaacaacgaagacaacgaaaaacugagaaaacccaaacacaaaaaacuaaaacaaccagccgacggcaacccagaccccaacgcaaaccccaacguagacccaaacgccaaccccaacguagacccaaacgcaaacccaaacguagaccccaacgccaacccaaacgccaacccaaacgccaaccccaacgcaaacccaaacgcaaacccaaacgcaaacccaaacgccaacccaaacgcaaacccaaacgccaacccgaacgcaaaccccaacgcaaacccaaacgcaaaccccaacgccaacccaaacgcaaacccaaacgcaaaccccaacgcaaacccaaaugcgaacccaaacguggacccgaacgcaaaccccaacgccaacccaaacgcaaaccccaacgccaaccccaacgccaaccccaacgcaaaccccaacgccaaccccaacgccaacccaaacgccaacccaaacgcgaacccaaacgcaaaccccaacgcaaacccaaacgcaaacccaaacgcaaacccaaacgcaaaccccaacgcaaacccaaacgcaaacccaaacgcaaaccccgcagccuacauuaaaccaggcuccgccaacaaacccaaagacgaacucgacuacgccaacgacauagaagcagccuacgccaaauucguagccgcauggacacucaaagccgcagccuaaggacuagucccuguucccagagcccacuuuuuuuucuuuuuuugaaauaaaauagccugucuuucagaucucaaaggcucuuuucagagccaccaaaaaaaaaaaaaaaaaaaaaaaaaaaaaaaaaaaaaaaaaaaaaaaaaaaaaaaaaaaaaaaaagaauu

SEQ ID NO: 6784 - RNA, 1234 nt, Artificial Sequence
  mRNA Design a-1 (hSL-A64-N5) comprising derived and/or modified sequence from Pf(3D7)__XP_001351122.1__HsALB_Pf-CSP(19-272)_L(G4S)_Pf-CSP(310-3 27)_L(G4S)_Pf-CSP(346-375) (opt11)
aggagagucccgcagucggcguccagcggcucugcuuguucgugugugugucguugcaggccuuauucaagcuuaccaugaaaugggucaccuucaucucccuacuauuccucuucucaucagccuacucacucuuccaagaguaccaaugcuacggcucaagcucaaacacacgcguacucaacgaacuaaacuacgacaacgcaggcaccaaccucuacaacgaacucgagaugaacuacuacggcaaacaagaaaacugguacucacucaaaaaaaacucccgcagccucggcgaaaacgacgacggcaacaacgaagauaacgagaaacuacgcaaacccaaacacaaaaaacuaaaacaacccgccgacggaaacccagacccaaacgccaacccaaacguagacccaaacgcaaacccaaacguagacccaaacgccaaccccaacguagacccaaacgccaacccaaacgccaacccaaacgcaaacccaaacgcaaacccaaacgcgaacccaaacgcaaaccccaacgccaacccaaacgcaaacccaaacgccaaccccaacgcaaacccaaacgcaaaccccaacgcaaacccaaacgccaaccccaacgcaaaccccaacgcaaacccaaacgcaaacccaaacgcaaacccaaacgucgacccaaacgcaaaccccaacgcaaacccaaacgcaaacccaaacgccaacccaaacgcaaacccaaacgccaacccaaacgcaaaccccaacgcaaaccccaacgccaacccaaacgcaaaccccaacgcgaacccaaacgcaaacccaaacgcaaacccaaacgcaaaccccaacgcaaaccccaacgcaaacccaaacgcaaacccaaacgcaaacccaggcggcggcggaagcgaacccucggacaaacacauaaaagaauaccucaacaaaauccaaaacucccucggaggcggaggcuccaucaaacccggaagcgcaaacaaacccaaagacgaacucgacuacgcaaacgacaucgagaaaaaaauaugcaaaauggaaaaaugcucauaaggacuagucccuguucccagagcccacuuuuuuuucuuuuuuugaaauaaaauagccugucuuucagaucucaaaggcucuuuucagagccaccaaaaaaaaaaaaaaaaaaaaaaaaaaaaaaaaaaaaaaaaaaaaaaaaaaaaaaaaaaaaaaaaagaauu

SEQ ID NO: 6785 - RNA, 1219 nt, Artificial Sequence
  mRNA Design a-1 (hSL-A64-N5) comprising derived and/or modified sequence from Pf(3D7)__XP_001351122.1__HsALB_Pf-CSP(19-272)_L(G4S)_Pf-CSP(310-3 27)_Pf-CSP(346-375) (opt11)
aggagagucccgcagucggcguccagcggcucugcuuguucgugugugugucguugcaggccuuauucaagcuuaccaugaaauggguaaccuucaucucacuccuauuccucuucuccuccgcauacucgcucuuccaagaauaccaaugcuacggcucaagcucaaacacccgcguccucaacgaacucaacuacgacaacgccgguaccaaccuauacaacgaacucgaaaugaacuacuacggcaaacaagaaaacugguacucacucaaaaaaaacuccaggucccuaggagaaaacgacgauggcaacaacgaagacaacgaaaaacuccgaaagccaaaacacaaaaaacuaaaacagcccgcagacggcaacccagacccaaacgcaaacccaaacguagacccaaacgcgaaccccaacguagacccaaacgcaaacccaaacguagacccaaacgcaaaccccaacgcaaacccaaacgcaaaccccaacgcaaaccccaacgcaaacccaaacgcaaacccaaacgcaaacccaaacgcaaacccaaacgcaaaccccaacgccaaccccaacgcaaacccaaacgcaaacccaaacgcaaacccaaacgcaaacccaaacgcaaaccccaacgccaacccaaacgcaaacccaaacguagacccaaacgcaaacccaaacgcaaacccaaacgcaaaccccaacgccaacccaaacgcaaacccaaacgcaaacccaaacgcaaacccaaacgcaaauccaaacgcuaacccaaacgcaaacccgaacgcaaaccccaaugcaaaccccaacgcaaacccaaacgccaacccaaacgcaaacccaaacgcgaacccaaacgcaaacccaaacgcaaacccaggcggaggcggauccgaacccuccgacaaacacauaaaagaauaccuaaacaaaauccaaaacucucucauaaaacccggaucagccaacaaaccaaaagacgaacuagacuacgccaaugacauagaaaaaaaaauaugcaagauggaaaaaugcagcuaaggacuagucccuguucccagagcccacuuuuuuuucuuuuuuugaaauaaaauagccugucuuucagaucucaaaggcucuuuucagagccaccaaaaaaaaaaaaaaaaaaaaaaaaaaaaaaaaaaaaaaaaaaaaaaaaaaaaaaaaaaaaaaaaagaauu

SEQ ID NO: 6786 - RNA, 1219 nt, Artificial Sequence
  mRNA Design a-1 (hSL-A64-N5) comprising derived and/or modified sequence from Pf(3D7)__XP_001351122.1__HsALB_Pf-CSP(19-325) (opt11)
aggagagucccgcagucggcguccagcggcucugcuuguucgugugugugucguugcaggccuuauucaagcuuaccaugaaauggguaaccuucaucucacuccuguuccuauucucauccgcauacucacucuuccaagaauaccaaugcuacggcucgucuucaaacacccgcguacucaacgaacucaacuacgacaacgccggaaccaaccucuacaacgaacucgaaaugaacuacuacggcaaacaagaaaacugguacucacucaaaaaaaacagccgaagccuaggcgaaaacgacgacggaaacaaugaagacaacgaaaaacuccgcaaacccaaacacaaaaaacucaaacaaccagcagacggaaaccccgacccgaacgcaaacccaaacguagacccaaacgcaaacccaaacguagacccaaacgcgaacccaaacguagaccccaacgcaaacccaaacgcaaacccaaacgcaaacccaaacgccaaccccaacgccaacccaaacgccaacccaaacgcaaacccgaacgcgaacccaaacgcaaaccccaacgcaaacccaaacgcaaacccaaacgcgaacccaaacgccaacccaaacgccaacccaaacgcaaacccaaacgccaacccaaacgcaaaccccaacguggaccccaacgcaaacccaaacgcaaacccaaacgccaaccccaacgcaaacccaaacgcaaacccuaacgcaaacccaaacgcaaaccccaacgcgaacccaaacgcaaacccaaacgcaaacccaaacgcaaaccccaacgcaaacccaaacgccaacccaaacgccaacccaaacgcgaauccaaacgcaaaccccaacgcaaacccaaacgcaaacccgaacaaaaacaaccaagggaacggacaaggacacaacaugccaaacgaccccaaccgcaacgucgacgaaaacgccaacgccaacuccgcaguaaaaaacaacaacaacgaagaacccuccgacaaacacauaaaagaauaccucaacaagauacaaaacuagggacuagucccuguucccagagcccacuuuuuuuucuuuuuuugaaauaaaauagccugucuuucagaucucaaaggcucuuuucagagccaccaaaaaaaaaaaaaaaaaaaaaaaaaaaaaaaaaaaaaaaaaaaaaaaaaaaaaaaaaaaaaaaaagaauu

SEQ ID NO: 6787 - RNA, 1396 nt, Artificial Sequence
  mRNA Design a-1 (hSL-A64-N5) comprising derived and/or modified sequence from Pf(3D7)__XP_001351122.1__HsALB_Pf-CSP(19-384) (opt11)
aggagagucccgcagucggcguccagcggcucugcuuguucgugugugugucguugcaggccuuauucaagcuuaccaugaaauggguaaccuucaucucacuacucuuccuauucucaagcgcguacucacucuuccaagaauaccaaugcuacggcucgagcucaaacacccgcguucucaacgaacuaaacuacgacaacgccggaaccaaccuauacaacgaacuugaaaugaacuacuacggcaaacaagaaaacugguacucgcucaaaaaaaacuccaggagccuaggcgaaaacgacgacggaaacaacgaagacaacgagaaacuaagaaaacccaaacacaaaaaacucaaacagcccgcggacggaaaccccgacccaaacgcaaaccccaacguagacccgaacgccaacccaaacguagacccaaacgcaaacccaaacguagaccccaacgcaaacccgaacgccaacccaaacgcaaacccaaaugcgaaccccaacgcgaacccaaacgcaaacccgaacgcaaaccccaacgccaacccaaacgcaaacccaaacgcaaaccccaacgcaaacccaaacgcgaacccaaacgcaaacccaaacgcgaacccgaacgcaaacccaaacgcaaacccgaacgcaaacccaaacguagacccaaacgccaacccaaacgcaaacccaaacgcaaaccccaacgcaaacccaaacgcaaacccgaacgcaaacccaaacgcaaacccaaacgcgaacccaaacgcaaaccccaacgcaaacccaaacgcaaacccuaacgcaaacccgaacgcaaacccaaacgccaacccaaacgcgaaccccaacgcaaacccaaacgccaacccaaacgccaacccgaacaaaaacaaccaaggaaacggacaaggacacaacaugccaaacgaccccaaccgaaacgucgacgaaaacgcaaacgccaacagugccgucaaaaacaacaacaaugaagaacccucagacaaacacauaaaagaauaccuaaacaaaauccagaacucgcucucaaccgaauggucacccugcagcgucaccugcggcaacggaauacaaguacgcaucaaaccaggcucggccaacaaaccaaaagacgaauuagacuacgcaaacgacaucgaaaaaaaaauaugcaaaauggaaaaaugcagcucagucuucaacguagucaauagcucauaaggacuagucccuguucccagagcccacuuuuuuuucuuuuuuugaaauaaaauagccugucuuucagaucucaaaggcucuuuucagagccaccaaaaaaaaaaaaaaaaaaaaaaaaaaaaaaaaaaaaaaaaaaaaaaaaaaaaaaaaaaaaaaaaagaauu

SEQ ID NO: 6788 - RNA, 1534 nt, Artificial Sequence
  mRNA Design a-1 (hSL-A64-N5) comprising derived and/or modified sequence from Pf(3D7)__XP_001351122.1__HsALB_Pf-CSP(19-384)_TM domain HA (opt11)
aggagagucccgcagucggcguccagcggcucugcuuguucgugugugugucguugcaggccuuauucaagcuuaccaugaagugggucaccuucaucucccuccuauuccucuucucuagcgcguacucacucuuccaagaauaccaaugcuacggauccagcucaaacacacgcguccucaaugaacugaacuacgauaacgccggaaccaaccucuacaacgaacucgaaaugaacuacuacggcaaacaagaaaacugguacucacuaaagaaaaauagcaggucccucggcgaaaacgacgacgggaacaacgaagauaacgaaaaacuacgcaaacccaagcacaagaaacuaaaacagccagcagacggaaacccagaccccaacgccaacccaaacgucgaccccaacgcaaacccaaacguagauccgaacgcaaacccaaacgucgauccaaacgcaaacccaaacgcaaacccaaacgcuaaccccaacgccaacccaaacgcaaacccgaacgcaaaccccaacgcgaacccgaacgcaaacccaaacgcaaacccaaacgccaacccaaacgcaaacccaaacgcaaacccaaacgccaacccaaacgcaaaccccaacgcgaaccccaacgcaaaccccaacgcaaacccaaacgucgacccaaacgcaaaccccaacgcaaaccccaacgcaaaccccaaugcaaacccaaacgcgaaccccaacgcaaacccaaacgcgaacccaaaugcaaaccccaacgccaaccccaacgccaacccgaacgcaaacccaaacgccaacccaaacgccaacccaaacgcaaaucccaacgccaacccaaacgcgaacccgaacgcaaacccaaacgcaaacccgaacaaaaacaaccaaggaaacggucaaggacacaacaugccaaacgaccccaaccgcaacgucgacgaaaacgccaaugccaacagcgccgucaaaaacaacaacaacgaagaacccucagacaaacacaucaaagaguaccuaaacaagauccaaaacucccucuccaccgaauggucccccugcagcguaaccugcggaaacggcauccaaguccgcauaaaaccaggcucagccaacaaaccaaaagaugaacucgacuacgcaaacgacauagaaaagaaaaucugcaaaauggaaaaaugcagcuccguauucaacgugguuaacuccucaaaacuagaauccacccgcaucuaccaaauacucgcaauauacagcacaguagccagcucacucguccuagucgucucccucggagccaucagcuucuggaugugcuccaacggaaguuuacaaugucgcauaugcauauaaggacuagucccuguucccagagcccacuuuuuuuucuuuuuuugaaauaaaauagccugucuuucagaucucaaaggcucuuuucagagccaccaaaaaaaaaaaaaaaaaaaaaaaaaaaaaaaaaaaaaaaaaaaaaaaaaaaaaaaaaaaaaaaaagaauu

SEQ ID NO: 6789 - RNA, 1246 nt, Artificial Sequence
  mRNA Design a-1 (hSL-A64-N5) comprising derived and/or modified sequence from Pf(3D7)__XP_001351122.1__HsALB_Pf-CSP(82-397) (opt11)
aggagagucccgcagucggcguccagcggcucugcuuguucgugugugugucguugcaggccuuauucaagcuuaccaugaaaugggucaccuucaucucacuccuguuccucuucucauccgccuacagcgacaacgaaaaacugcgcaaacccaaacacaagaaacucaaacaaccagccgacggcaaccccgaccccaacgccaacccaaacguagaccccaacgccaaccccaacguagacccaaacgccaacccaaacguggaccccaacgcaaacccaaacgccaacccaaacgccaauccaaacgccaacccaaacgcaaacccaaacgcaaaccccaacgccaacccuaacgccaaccccaacgcaaacccaaacgccaaccccaacgccaaccccaacgcaaaccccaacgcaaacccuaacgccaaccccaacgccaaccccaacgcaaacccaaacgccaaccccaacguagacccaaacgccaaccccaacgcaaaccccaacgccaacccaaacgcaaacccaaacgccaaccccaacgccaaccccaacgcaaacccaaacgcaaacccaaaugcaaaccccaacgccaaccccaacgccaaccccaacgcaaaccccaacgcaaaccccaacgcaaacccgaacgccaacccaaacgccaacccaaacgccaaccccaacgcaaaccccaacaaaaacaaccaaggcaacggacaaggacacaacaugcccaacgaccccaaccgcaacgucgacgaaaacgccaacgccaacuccgccgucaaaaacaacaacaacgaagaacccuccgacaaacacaucaaagaauaccucaacaaaauccaaaacucccucucaaccgaauggucacccugcuccguaaccugcggcaacggcauccaaguccgcaucaaacccggcucagccaacaaacccaaagacgaacucgacuacgccaaugacaucgaaaagaaaauaugcaaaauggaaaaaugcuccuccgucuucaacgucgucaacuccuccaucggccucaucaugguccucucguuccuauuccuaaacuaaggacuagucccuguucccagagcccacuuuuuuuucuuuuuuugaaauaaaauagccugucuuucagaucucaaaggcucuuuucagagccaccaaaaaaaaaaaaaaaaaaaaaaaaaaaaaaaaaaaaaaaaaaaaaaaaaaaaaaaaaaaaaaaaagaauu

SEQ ID NO: 6790 - RNA, 598 nt, Artificial Sequence
  mRNA Design a-1 (hSL-A64-N5) comprising derived and/or modified sequence from Pf(3D7)__XP_001351122.1__HsALB_Pf-CSP(93-192) (opt11)
aggagagucccgcagucggcguccagcggcucugcuuguucgugugugugucguugcaggccuuauucaagcuuaccaugaaauggguaaccuucaucucacuccuauuccuauucucaagcgcauacucaaaacuaaaacaacccgcagacggaaacccagacccaaacgcaaacccaaacguagacccaaacgcaaacccaaacguagacccaaacgcaaacccaaacguagacccaaacgcaaacccaaacgcaaacccaaacgcaaacccaaacgcaaacccaaacgcaaaccccaacgcaaacccaaacgcaaacccaaacgcaaacccaaacgcaaacccaaacgcaaacccaaacgcaaacccaaacgcaaacccaaacgcaaacccaaacgcaaacccaaacgccaacccaaacgcaaacccauaaggacuagucccuguucccagagcccacuuuuuuuucuuuuuuugaaauaaaauagccugucuuucagaucucaaaggcucuuuucagagccaccaaaaaaaaaaaaaaaaaaaaaaaaaaaaaaaaaaaaaaaaaaaaaaaaaaaaaaaaaaaaaaaaagaauu

SEQ ID NO: 6791 - RNA, 838 nt, Artificial Sequence
  mRNA Design a-1 (hSL-A64-N5) comprising derived and/or modified sequence from Pf(3D7)__XP_001351122.1__HsALB_Pf-CSP(93-272) (opt11)
aggagagucccgcagucggcguccagcggcucugcuuguucgugugugugucguugcaggccuuauucaagcuuaccaugaaaugggucaccuucaucucacuccuauuccuauucucauccgcauacucaaaacuaaaacaacccgccgacggaaacccagacccaaacgcaaacccaaacguagacccaaacgcaaacccaaacguagacccaaacgcaaacccaaacguagacccaaacgcaaacccaaacgccaacccaaacgcaaauccaaacgcaaacccaaacgcaaacccaaacgcaaacccaaacgcaaacccaaacgccaacccaaacgccaacccaaacgcaaacccaaacgcaaacccaaacgcaaacccaaacgcaaacccaaacgcaaacccaaacgccaaccccaacgcaaacccaaacgcaaaccccaacguagacccaaacgcaaacccaaacgccaaccccaacgcaaaccccaacgccaaccccaacgccaacccaaacgccaacccaaacgcaaacccaaacgcaaacccaaacgcaaacccaaacgcaaacccaaacgcaaacccaaacgcaaacccaaacgcaaacccaaacgcaaacccaaacgccaacccaaacgcaaacccaaacgcaaacccgaacgcaaacccauaaggacuagucccuguucccagagcccacuuuuuuuucuuuuuuugaaauaaaauagccugucuuucagaucucaaaggcucuuuucagagccaccaaaaaaaaaaaaaaaaaaaaaaaaaaaaaaaaaaaaaaaaaaaaaaaaaaaaaaaaaaaaaaaaagaauu

SEQ ID NO: 6792 - RNA, 1213 nt, Artificial Sequence
  mRNA Design a-1 (hSL-A64-N5) comprising derived and/or modified sequence from Pf(3D7)__XP_001351122.1__HsALB_Pf-CSP(93-397) (opt11)
aggagagucccgcagucggcguccagcggcucugcuuguucgugugugugucguugcaggccuuauucaagcuuaccaugaaaugggucacauucaucucacuccuauuccuauucucaagcgccuacuccaaacucaaacaacccgccgacggcaacccagacccaaacgccaaccccaacgucgacccaaacgccaacccaaacgucgacccaaacgcaaacccaaacgucgaccccaacgccaaccccaacgccaaccccaacgccaacccaaacgccaaucccaacgccaaccccaacgccaacccaaacgcaaaccccaacgccaauccaaacgccaaccccaacgcaaaccccaacgccaaccccaacgcaaacccaaacgcaaacccaaacgcaaaccccaacgccaaccccaacgcaaaccccaacgccaaccccaacgucgaccccaacgccaacccaaacgccaacccaaacgccaaccccaacgccaaccccaacgcaaacccaaacgcgaaccccaacgcaaaccccaacgccaacccgaacgccaacccgaacgcaaacccaaacgccaaccccaacgcaaaccccaacgcaaacccaaacgcgaaccccaacgccaacccaaacgccaacccaaacgcgaacccaaacgccaaccccaacaaaaacaaccaagggaacggacaaggccacaacaugcccaacgaccccaaccgcaacgucgacgaaaacgccaacgccaacuccgccgucaaaaacaacaacaacgaagaacccuccgacaaacacauaaaagaauaccuaaacaaaauccaaaacucacucucuacugaauggucccccugcucagucaccugcggcaacggcauacaaguccgcauaaaacccggcucggccaacaaaccaaaagacgaacuagacuacgcaaacgacaucgaaaaaaaaauaugcaaaauggaaaaaugcuccucagucuucaacguaguaaacuccuccaucggccucauaaugguccucuccuuccuauuccucaacuaaggacuagucccuguucccagagcccacuuuuuuuucuuuuuuugaaauaaaauagccugucuuucagaucucaaaggcucuuuucagagccaccaaaaaaaaaaaaaaaaaaaaaaaaaaaaaaaaaaaaaaaaaaaaaaaaaaaaaaaaaaaaaaaaagaauu

SEQ ID NO: 6793 - RNA, 583 nt, Artificial Sequence
  mRNA Design a-1 (hSL-A64-N5) comprising derived and/or modified sequence from Pf(3D7)__XP_001351122.1__HsALB_Pf-CSP(98-192) (opt11)
aggagagucccgcagucggcguccagcggcucugcuuguucgugugugugucguugcaggccuuauucaagcuuaccaugaaaugggucacauucauaagccuacucuuccucuucagcucagccuacuccgcagacggaaacccagacccaaacgcaaacccaaacguagacccaaacgcaaacccaaacguagacccaaacgcaaacccaaacguagacccaaacgcaaacccaaacgcaaacccaaacgcaaacccaaacgcaaacccaaacgcaaacccaaacgcaaacccaaacgcaaacccaaacgcaaacccaaacgcaaacccaaacgcaaaccccaacgcaaacccaaacgcaaacccaaacgcaaacccaaacgcaaacccaaacgcaaacccaaacgcaaacccauaaggacuagucccuguucccagagcccacuuuuuuuucuuuuuuugaaauaaaauagccugucuuucagaucucaaaggcucuuuucagagccaccaaaaaaaaaaaaaaaaaaaaaaaaaaaaaaaaaaaaaaaaaaaaaaaaaaaaaaaaaaaaaaaaagaauu

SEQ ID NO: 6794 - RNA, 823 nt, Artificial Sequence
  mRNA Design a-1 (hSL-A64-N5) comprising derived and/or modified sequence from Pf(3D7)__XP_001351122.1__HsALB_Pf-CSP(98-272) (opt11)
aggagagucccgcagucggcguccagcggcucugcuuguucgugugugugucguugcaggccuuauucaagcuuaccaugaaauggguaaccuucauaagccuacucuuccuauucucaucagccuacagcgcagacggaaacccagaccccaacgcaaacccaaacguagacccaaacgcaaacccaaacguagaccccaacgcaaacccaaacguagacccaaacgccaacccaaacgcaaacccaaacgcaaacccaaacgccaacccaaacgcaaacccaaacgccaacccaaacgcaaacccaaacgcaaacccaaacgcaaacccaaacgcaaacccaaacgcaaacccaaacgcaaacccaaacgccaacccaaacgcaaacccaaacgcaaacccaaacgcaaacccaaacgccaaccccaacguagacccaaacgccaaccccaacgcaaacccaaacgcaaacccaaacgcaaacccaaacgcaaacccaaacgcaaacccaaacgcaaacccaaacgcaaacccaaacgcaaacccgaacgccaacccaaacgcaaacccaaacgcaaacccaaacgcaaacccaaacgcaaacccaaacgcaaaccccaacgcaaacccaaacgcaaacccaaacgcaaacccauaaggacuagucccuguucccagagcccacuuuuuuuucuuuuuuugaaauaaaauagccugucuuucagaucucaaaggcucuuuucagagccaccaaaaaaaaaaaaaaaaaaaaaaaaaaaaaaaaaaaaaaaaaaaaaaaaaaaaaaaaaaaaaaaaagaauu

SEQ ID NO: 6795 - RNA, 1129 nt, Artificial Sequence
  mRNA Design a-1 (hSL-A64-N5) comprising derived and/or modified sequence from Pf(3D7)__XP_001351122.1__HsALB_Pf-CSP(98-374) (opt11)
aggagagucccgcagucggcguccagcggcucugcuuguucgugugugugucguugcaggccuuauucaagcuuaccaugaaauggguaaccuucauaucccuacucuuccuuuucuccucggccuacuccgcagacggaaacccagacccaaacgcaaaccccaacguagacccaaacgcaaacccaaauguagacccaaacgcaaacccaaacguggacccaaacgcgaaccccaacgcaaaccccaacgcaaacccaaacgccaacccaaacgcaaacccaaacgccaacccaaacgcaaaccccaacgccaaccccaacgccaacccaaacgcaaacccaaacgcaaaccccaacgcaaacccaaacgccaacccaaacgccaacccaaacgccaaccccaacgcaaacccaaacgccaacccaaacguagacccaaacgcaaacccaaacgcaaacccaaacgcaaaccccaacgcaaaccccaacgcaaacccaaacgcaaacccaaacgcaaacccaaacgcaaacccaaacgccaacccaaacgcgaaccccaacgccaacccaaacgcaaacccaaacgccaacccaaacgccaacccaaacgcaaaccccaacgcaaacccaaacgcaaacccaaacgccaacccgaacaaaaacaaccaaggcaacggccaaggacacaacaugccaaacgaccccaaccgcaacguagacgaaaacgccaacgcaaacuccgcagucaaaaacaacaacaacgaagaacccuccgacaaacacauaaaagaauaccuaaacaaaauccaaaacucgcucucaaccgaauggucccccugcuccgucaccugcggcaacggcauccaaguacgcaucaaaccaggcucagcaaacaaaccaaaagacgaacucgacuacgccaacgacauagaaaaaaaaauaugcaaaauggagaaaugcuaaggacuagucccuguucccagagcccacuuuuuuuucuuuuuuugaaauaaaauagccugucuuucagaucucaaaggcucuuuucagagccaccaaaaaaaaaaaaaaaaaaaaaaaaaaaaaaaaaaaaaaaaaaaaaaaaaaaaaaaaaaaaaaaaagaauu

SEQ ID NO: 6796 - RNA, 1198 nt, Artificial Sequence
  mRNA Design a-1 (hSL-A64-N5) comprising derived and/or modified sequence from Pf(3D7)__XP_001351122.1__HsALB_Pf-CSP(98-397) (opt11)
aggagagucccgcagucggcguccagcggcucugcuuguucgugugugugucguugcaggccuuauucaagcuuaccaugaaauggguaaccuucaucagccuacuauuccuauucagcuccgccuacagcgccgacggaaacccagacccaaacgccaaccccaacgucgacccaaacgccaaccccaacguagacccaaacgccaaccccaacgucgaccccaacgccaaccccaacgccaacccaaacgccaacccuaacgccaacccaaacgccaacccgaacgccaaccccaacgcgaacccaaacgccaacccaaacgcaaaccccaacgccaaccccaacgccaaccccaacgcaaaccccaacgcaaacccaaacgccaacccaaacgccaaccccaacgccaaccccaaugcaaacccaaacgucgaccccaacgccaacccaaacgccaaccccaacgccaaccccaacgccaaccccaacgcaaaccccaacgccaaccccaacgcgaaccccaacgccaaccccaacgccaacccaaacgccaaccccaacgccaaccccaacgccaaccccaacgcuaaccccaacgcaaacccaaacgccaacccaaacgccaacccaaacgccaaccccaacgccaacccaaacaaaaacaaccaaggcaacggacaaggacacaacaugccaaacgaccccaaccgcaacgucgacgaaaaugccaacgccaacuccgccgucaaaaacaacaacaacgaagaacccuccgacaaacacaucaaagaauaccuaaacaaaauacaaaacucucucucaaccgaauggucccccugcuccgucacaugcggcaacggcauccaaguccgcaucaaaccaggaucagccaauaaacccaaagacgaacucgacuacgccaacgacauagaaaaaaaaaucugcaaaauggaaaaaugcagcucagucuucaacgucgucaacuccucaaucggacuuauaaugguccuauccuuccucuuccuuaacuaaggacuagucccuguucccagagcccacuuuuuuuucuuuuuuugaaauaaaauagccugucuuucagaucucaaaggcucuuuucagagccaccaaaaaaaaaaaaaaaaaaaaaaaaaaaaaaaaaaaaaaaaaaaaaaaaaaaaaaaaaaaaaaaaagaauu

SEQ ID NO: 6797 - RNA, 1525 nt, Artificial Sequence
  mRNA Design a-1 (hSL-A64-N5) comprising derived and/or modified sequence from Pf(3D7)__XP_001351122.1__HsALB_Pf-CSP(199-377)_L(PVTN)_HBsAg (opt11)
aggagagucccgcagucggcguccagcggcucugcuuguucgugugugugucguugcaggccuuauucaagcuuaccaugaaaugggucacauucaucucgcuccucuuccuauucuccuccgccuacuccgacccuaacgccaaucccaacgccaaccccaacgccaaccccaacgccaaccccaacgccaaccccaaugcaaacccaaacgcaaaccccaacgccaaccccaacgcaaacccaaaugcaaaccccaacgcaaaccccaacgccaaccccaaugccaaccccaacgcuaaccccaacgccaauccaaacgccaaccccaacgcaaaccccaacgccaacccuaacaaaaauaaccaaggcaacggccaaggacacaacaugcccaacgaccccaaccgaaaugucgacgaaaacgcuaacgcuaacagcgccgucaaaaacaacaacaacgaagaacccuccgacaaacacauuaaagaauaccucaacaaaauccaaaacucccucuccaccgaauggucccccugcucuguaacuugcggcaacggcauccaaguccgcauaaaacccggaucagcaaacaaacccaaagacgaacucgacuacgcaaacgacauugagaagaaaaucugcaaaauggaaaaaugcucaucaguacccgucacuaacauggaaaacaucaccuccggcuuccucggcccccuccuaguccuacaagccgguuucuuccuucuuacacgcauccuaaccaucccacaaucccuagacuccugguggacaucuuuaaacuuccuuggaggauccccugucugccucggccaaaacucccaauccccaaccucuaaccacucucccacauccugcccucccauaugccccgguuaccgcuggaugugccuccgccgcuucaucaucuuccucuucauacuccucuuaugccucaucuuccuccucguacuacucgacuaccaagguaugcuacccguaugcccucucauccccggcuccaccacaaccaacaccggccccugcaaaacaugcaccacccccgcacagggcaauuccauguuccccuccugcuguugcaccaaacccacagacggcaacuguaccugcauccccauccccuccucuugggcauuugccaaauaccucugggaaugggccuccguccgauucucuuggcuuucacuccucguucccuucguacaaugguucgucggccuaucacccaccgucuggcucuccgccaucuggaugaugugguacuggggcccuucacuuuacuccauagucagccccuucauaccacuccuccccaucuucuucugccuauggguauacaucuaaggacuagucccuguucccagagcccacuuuuuuuucuuuuuuugaaauaaaauagccugucuuucagaucucaaaggcucuuuucagagccaccaaaaaaaaaaaaaaaaaaaaaaaaaaaaaaaaaaaaaaaaaaaaaaaaaaaaaaaaaaaaaaaaagaauu

SEQ ID NO: 6798 - RNA, 1532 nt, Artificial Sequence
  mRNA Design a-3 (hSL-A64-N5) comprising derived and/or modified sequence from Pf(3D7)__XP_001351122.1__Pf-CSP (wt)
aggagagggcgcuuggcuugcaaggacccugagcugcggcauugaagcacacccaacccaacucgacugaagucagccucacugaaccggaucugagaaucuucucucucugggcuugccagggcucuccgaaccuagcuagcauccucuucaauuccaacuagaaagcuuaccaugaugagaaaauuagcuauuuuaucuguuucuuccuuuuuauuuguugaggccuuauuccaggaauaccagugcuauggaaguucgucaaacacaaggguucuaaaugaauuaaauuaugauaaugcaggcacuaauuuauauaaugaauuagaaaugaauuauuaugggaaacaggaaaauugguauagucuuaaaaaaaauaguagaucacuuggagaaaaugaugauggaaauaacgaagacaacgagaaauuaaggaaaccaaaacauaaaaaauuaaagcaaccagcggaugguaauccugauccaaaugcaaacccaaauguagaucccaaugccaacccaaauguagauccaaaugcaaacccaaauguagauccaaaugcaaacccaaaugcaaacccaaaugcaaacccaaaugcaaacccaaaugcaaacccaaaugcaaacccaaaugcaaacccaaaugcaaacccaaaugcaaacccaaaugcaaacccaaaugcaaacccaaaugcaaacccaaaugcaaacccaaaugcaaaccccaaugcaaauccuaaugcaaacccaaaugcaaacccaaacguagauccuaaugcaaauccaaaugcaaacccaaacgcaaaccccaaugcaaauccuaaugcaaaccccaaugcaaauccuaaugcaaauccuaaugccaauccaaaugcaaauccaaaugcaaacccaaacgcaaaccccaaugcaaauccuaaugccaauccaaaugcaaauccaaaugcaaacccaaaugcaaacccaaaugcaaaccccaaugcaaauccuaauaaaaacaaucaagguaauggacaaggucacaauaugccaaaugacccaaaccgaaauguagaugaaaaugcuaaugccaacagugcuguaaaaaauaauaauaacgaagaaccaagugauaagcacauaaaagaauauuuaaacaaaauacaaaauucucuuucaacugaaugguccccauguaguguaacuuguggaaaugguauucaaguuagaauaaagccuggcucugcuaauaaaccuaaagacgaauuagauuaugcaaaugauauugaaaaaaaaauuuguaaaauggaaaaauguuccaguguguuuaaugucguaaauaguucaauaggauuaauaaugguauuauccuucuuguuccuuaauuagggacuagucccuguucccagagcccacuuuuuuuucuuuuuuugaaauaaaauagccugucuuucagaucucaaaggcucuuuucagagccaccaaaaaaaaaaaaaaaaaaaaaaaaaaaaaaaaaaaaaaaaaaaaaaaaaaaaaaaaaaaaaaaaagaauu

SEQ ID NO: 6799 - RNA, 1463 nt, Artificial Sequence
  mRNA Design a-3 (hSL-A64-N5) comprising derived and/or modified sequence from Pf(3D7)__XP_001351122.1__Pf-CSP(1-374) (wt)
aggagagggcgcuuggcuugcaaggacccugagcugcggcauugaagcacacccaacccaacucgacugaagucagccucacugaaccggaucugagaaucuucucucucugggcuugccagggcucuccgaaccuagcuagcauccucuucaauuccaacuagaaagcuuaccaugaugagaaaauuagcuauuuuaucuguuucuuccuuuuuauuuguugaggccuuauuccaggaauaccagugcuauggaaguucgucaaacacaaggguucuaaaugaauuaaauuaugauaaugcaggcacuaauuuauauaaugaauuagaaaugaauuauuaugggaaacaggaaaauugguauagucuuaaaaaaaauaguagaucacuuggagaaaaugaugauggaaauaacgaagacaacgagaaauuaaggaaaccaaaacauaaaaaauuaaagcaaccagcggaugguaauccugauccaaaugcaaacccaaauguagaucccaaugccaacccaaauguagauccaaaugcaaacccaaauguagauccaaaugcaaacccaaaugcaaacccaaaugcaaacccaaaugcaaacccaaaugcaaacccaaaugcaaacccaaaugcaaacccaaaugcaaacccaaaugcaaacccaaaugcaaacccaaaugcaaacccaaaugcaaacccaaaugcaaacccaaaugcaaaccccaaugcaaauccuaaugcaaacccaaaugcaaacccaaacguagauccuaaugcaaauccaaaugcaaacccaaacgcaaaccccaaugcaaauccuaaugcaaaccccaaugcaaauccuaaugcaaauccuaaugccaauccaaaugcaaauccaaaugcaaacccaaacgcaaaccccaaugcaaauccuaaugccaauccaaaugcaaauccaaaugcaaacccaaaugcaaacccaaaugcaaaccccaaugcaaauccuaauaaaaacaaucaagguaauggacaaggucacaauaugccaaaugacccaaaccgaaauguagaugaaaaugcuaaugccaacagugcuguaaaaaauaauaauaacgaagaaccaagugauaagcacauaaaagaauauuuaaacaaaauacaaaauucucuuucaacugaaugguccccauguaguguaacuuguggaaaugguauucaaguuagaauaaagccuggcucugcuaauaaaccuaaagacgaauuagauuaugcaaaugauauugaaaaaaaaauuuguaaaauggaaaaauguugaggacuagucccuguucccagagcccacuuuuuuuucuuuuuuugaaauaaaauagccugucuuucagaucucaaaggcucuuuucagagccaccaaaaaaaaaaaaaaaaaaaaaaaaaaaaaaaaaaaaaaaaaaaaaaaaaaaaaaaaaaaaaaaaagaauu

SEQ ID NO: 6800 - RNA, 1316 nt, Artificial Sequence
  mRNA Design a-3 (hSL-A64-N5) comprising derived and/or modified sequence from Pf(3D7)__XP_001351122.1__Pf-CSP(1-325) (wt)
aggagagggcgcuuggcuugcaaggacccugagcugcggcauugaagcacacccaacccaacucgacugaagucagccucacugaaccggaucugagaaucuucucucucugggcuugccagggcucuccgaaccuagcuagcauccucuucaauuccaacuagaaagcuuaccaugaugagaaaauuagcuauuuuaucuguuucuuccuuuuuauuuguugaggccuuauuccaggaauaccagugcuauggaaguucgucaaacacaaggguucuaaaugaauuaaauuaugauaaugcaggcacuaauuuauauaaugaauuagaaaugaauuauuaugggaaacaggaaaauugguauagucuuaaaaaaaauaguagaucacuuggagaaaaugaugauggaaauaacgaagacaacgagaaauuaaggaaaccaaaacauaaaaaauuaaagcaaccagcggaugguaauccugauccaaaugcaaacccaaauguagaucccaaugccaacccaaauguagauccaaaugcaaacccaaauguagauccaaaugcaaacccaaaugcaaacccaaaugcaaacccaaaugcaaacccaaaugcaaacccaaaugcaaacccaaaugcaaacccaaaugcaaacccaaaugcaaacccaaaugcaaacccaaaugcaaacccaaaugcaaacccaaaugcaaacccaaaugcaaaccccaaugcaaauccuaaugcaaacccaaaugcaaacccaaacguagauccuaaugcaaauccaaaugcaaacccaaacgcaaaccccaaugcaaauccuaaugcaaaccccaaugcaaauccuaaugcaaauccuaaugccaauccaaaugcaaauccaaaugcaaacccaaacgcaaaccccaaugcaaauccuaaugccaauccaaaugcaaauccaaaugcaaacccaaaugcaaacccaaaugcaaaccccaaugcaaauccuaauaaaaacaaucaagguaauggacaaggucacaauaugccaaaugacccaaaccgaaauguagaugaaaaugcuaaugccaacagugcuguaaaaaauaauaauaacgaagaaccaagugauaagcacauaaaagaauauuuaaacaaaauacaaaauugaggacuagucccuguucccagagcccacuuuuuuuucuuuuuuugaaauaaaauagccugucuuucagaucucaaaggcucuuuucagagccaccaaaaaaaaaaaaaaaaaaaaaaaaaaaaaaaaaaaaaaaaaaaaaaaaaaaaaaaaaaaaaaaaagaauu

SEQ ID NO: 6801 - RNA, 1532 nt, Artificial Sequence
  mRNA Design a-3 (hSL-A64-N5) comprising derived and/or modified sequence from Pf(3D7)__XP_001351122.1__Pf-CSP (opt1)
aggagagggcgcuuggcuugcaaggacccugagcugcggcauugaagcacacccaacccaacucgacugaagucagccucacugaaccggaucugagaaucuucucucucugggcuugccagggcucuccgaaccuagcuagcauccucuucaauuccaacuagaaagcuuaccaugaugcgcaagcuggccauccucagcguguccagcuuccuguucgucgaggcccuguuccaggaguaccagugcuacggcuccagcuccaacacccgggugcucaacgagcugaacuacgacaacgcggggaccaaccuguacaacgagcucgagaugaacuacuacggcaagcaggagaacugguacagccugaagaagaacucccgcagccugggggagaacgacgacggcaacaacgaggacaacgagaagcuccggaagcccaagcacaagaagcugaagcagccggccgacgggaaccccgaccccaacgccaaccccaacguggacccgaacgccaaccccaacgucgaccccaacgccaaccccaacguggacccgaacgcgaaccccaacgccaaccccaacgccaaccccaacgccaacccgaacgcgaaccccaacgccaaccccaacgccaaccccaacgccaacccgaacgccaaccccaacgcgaaccccaacgccaaccccaacgccaacccgaacgccaaccccaacgccaaccccaacgcgaaccccaacgccaacccgaacgccaaccccaacguggaccccaacgccaaccccaacgccaacccgaacgcgaaccccaacgccaaccccaacgccaacccgaacgccaaccccaacgccaaccccaacgcgaaccccaacgccaacccgaacgccaaccccaacgccaaccccaacgcgaaccccaacgccaacccgaacgccaaccccaacgccaaccccaacgccaaccccaacgcgaacccgaacgccaaccccaacaagaacaaccagggcaacggccaggggcacaacaugcccaacgaccccaaccgcaacgucgacgagaacgccaacgccaacuccgccgugaagaacaacaacaacgaggagccgagcgacaagcacaucaaggaguaccugaacaagauccagaacucccucagcacggaguggucccccugcagcgugaccugcggcaacgggauccagguccggaucaagcccggcuccgcgaacaagcccaaggacgagcuggacuacgccaacgacaucgagaagaagaucugcaagauggagaagugcagcuccguguucaacguggucaacagcuccaucgggcugaucauggugcucagcuuccuguuccugaacugaggacuagucccuguucccagagcccacuuuuuuuucuuuuuuugaaauaaaauagccugucuuucagaucucaaaggcucuuuucagagccaccaaaaaaaaaaaaaaaaaaaaaaaaaaaaaaaaaaaaaaaaaaaaaaaaaaaaaaaaaaaaaaaaagaauu

SEQ ID NO: 6802 - RNA, 1463 nt, Artificial Sequence
  mRNA Design a-3 (hSL-A64-N5) comprising derived and/or modified sequence from Pf(3D7)__XP_001351122.1__Pf-CSP(1-374) (opt1)
aggagagggcgcuuggcuugcaaggacccugagcugcggcauugaagcacacccaacccaacucgacugaagucagccucacugaaccggaucugagaaucuucucucucugggcuugccagggcucuccgaaccuagcuagcauccucuucaauuccaacuagaaagcuuaccaugaugcgcaagcuggccauccucagcguguccagcuuccuguucgucgaggcccuguuccaggaguaccagugcuacggcuccagcuccaacacccgggugcucaacgagcugaacuacgacaacgcggggaccaaccuguacaacgagcucgagaugaacuacuacggcaagcaggagaacugguacagccugaagaagaacucccgcagccugggggagaacgacgacggcaacaacgaggacaacgagaagcuccggaagcccaagcacaagaagcugaagcagccggccgacgggaaccccgaccccaacgccaaccccaacguggacccgaacgccaaccccaacgucgaccccaacgccaaccccaacguggacccgaacgcgaaccccaacgccaaccccaacgccaaccccaacgccaacccgaacgcgaaccccaacgccaaccccaacgccaaccccaacgccaacccgaacgccaaccccaacgcgaaccccaacgccaaccccaacgccaacccgaacgccaaccccaacgccaaccccaacgcgaaccccaacgccaacccgaacgccaaccccaacguggaccccaacgccaaccccaacgccaacccgaacgcgaaccccaacgccaaccccaacgccaacccgaacgccaaccccaacgccaaccccaacgcgaaccccaacgccaacccgaacgccaaccccaacgccaaccccaacgcgaaccccaacgccaacccgaacgccaaccccaacgccaaccccaacgccaaccccaacgcgaacccgaacgccaaccccaacaagaacaaccagggcaacggccaggggcacaacaugcccaacgaccccaaccgcaacgucgacgagaacgccaacgccaacuccgccgugaagaacaacaacaacgaggagccgagcgacaagcacaucaaggaguaccugaacaagauccagaacucccucagcacggaguggucccccugcagcgugaccugcggcaacgggauccagguccggaucaagcccggcuccgcgaacaagcccaaggacgagcuggacuacgccaacgacaucgagaagaagaucugcaagauggagaagugcugaggacuagucccuguucccagagcccacuuuuuuuucuuuuuuugaaauaaaauagccugucuuucagaucucaaaggcucuuuucagagccaccaaaaaaaaaaaaaaaaaaaaaaaaaaaaaaaaaaaaaaaaaaaaaaaaaaaaaaaaaaaaaaaaagaauu

SEQ ID NO: 6803 - RNA, 1316 nt, Artificial Sequence
  mRNA Design a-3 (hSL-A64-N5) comprising derived and/or modified sequence from Pf(3D7)__XP_001351122.1__Pf-CSP(1-325) (opt1)
aggagagggcgcuuggcuugcaaggacccugagcugcggcauugaagcacacccaacccaacucgacugaagucagccucacugaaccggaucugagaaucuucucucucugggcuugccagggcucuccgaaccuagcuagcauccucuucaauuccaacuagaaagcuuaccaugaugcgcaagcuggccauccucagcguguccagcuuccuguucgucgaggcccuguuccaggaguaccagugcuacggcuccagcuccaacacccgggugcucaacgagcugaacuacgacaacgcggggaccaaccuguacaacgagcucgagaugaacuacuacggcaagcaggagaacugguacagccugaagaagaacucccgcagccugggggagaacgacgacggcaacaacgaggacaacgagaagcuccggaagcccaagcacaagaagcugaagcagccggccgacgggaaccccgaccccaacgccaaccccaacguggacccgaacgccaaccccaacgucgaccccaacgccaaccccaacguggacccgaacgcgaaccccaacgccaaccccaacgccaaccccaacgccaacccgaacgcgaaccccaacgccaaccccaacgccaaccccaacgccaacccgaacgccaaccccaacgcgaaccccaacgccaaccccaacgccaacccgaacgccaaccccaacgccaaccccaacgcgaaccccaacgccaacccgaacgccaaccccaacguggaccccaacgccaaccccaacgccaacccgaacgcgaaccccaacgccaaccccaacgccaacccgaacgccaaccccaacgccaaccccaacgcgaaccccaacgccaacccgaacgccaaccccaacgccaaccccaacgcgaaccccaacgccaacccgaacgccaaccccaacgccaaccccaacgccaaccccaacgcgaacccgaacgccaaccccaacaagaacaaccagggcaacggccaggggcacaacaugcccaacgaccccaaccgcaacgucgacgagaacgccaacgccaacuccgccgugaagaacaacaacaacgaggagccgagcgacaagcacaucaaggaguaccugaacaagauccagaacugaggacuagucccuguucccagagcccacuuuuuuuucuuuuuuugaaauaaaauagccugucuuucagaucucaaaggcucuuuucagagccaccaaaaaaaaaaaaaaaaaaaaaaaaaaaaaaaaaaaaaaaaaaaaaaaaaaaaaaaaaaaaaaaaagaauu

SEQ ID NO: 6804 - RNA, 1532 nt, Artificial Sequence
  mRNA Design a-3 (hSL-A64-N5) comprising derived and/or modified sequence from Pf(3D7)__XP_001351122.1__HsALB_Pf-CSP(19-397) (opt1)
aggagagggcgcuuggcuugcaaggacccugagcugcggcauugaagcacacccaacccaacucgacugaagucagccucacugaaccggaucugagaaucuucucucucugggcuugccagggcucuccgaaccuagcuagcauccucuucaauuccaacuagaaagcuuaccaugaagugggugaccuucaucagccugcucuuccuguucuccagcgccuacucccuguuccaggaguaccagugcuacggcuccagcuccaacacccgggugcucaacgagcugaacuacgacaacgcggggaccaaccuguacaacgagcucgagaugaacuacuacggcaagcaggagaacugguacagccugaagaagaacucccgcagccugggggagaacgacgacggcaacaacgaggacaacgagaagcuccggaagcccaagcacaagaagcugaagcagccggccgacgggaaccccgaccccaacgccaaccccaacguggacccgaacgccaaccccaacgucgaccccaacgccaaccccaacguggacccgaacgcgaaccccaacgccaaccccaacgccaaccccaacgccaacccgaacgcgaaccccaacgccaaccccaacgccaaccccaacgccaacccgaacgccaaccccaacgcgaaccccaacgccaaccccaacgccaacccgaacgccaaccccaacgccaaccccaacgcgaaccccaacgccaacccgaacgccaaccccaacguggaccccaacgccaaccccaacgccaacccgaacgcgaaccccaacgccaaccccaacgccaacccgaacgccaaccccaacgccaaccccaacgcgaaccccaacgccaacccgaacgccaaccccaacgccaaccccaacgcgaaccccaacgccaacccgaacgccaaccccaacgccaaccccaacgccaaccccaacgcgaacccgaacgccaaccccaacaagaacaaccagggcaacggccaggggcacaacaugcccaacgaccccaaccgcaacgucgacgagaacgccaacgccaacuccgccgugaagaacaacaacaacgaggagccgagcgacaagcacaucaaggaguaccugaacaagauccagaacucccucagcacggaguggucccccugcagcgugaccugcggcaacgggauccagguccggaucaagcccggcuccgcgaacaagcccaaggacgagcuggacuacgccaacgacaucgagaagaagaucugcaagauggagaagugcagcuccguguucaacguggucaacagcuccaucgggcugaucauggugcucagcuuccuguuccugaacugaggacuagucccuguucccagagcccacuuuuuuuucuuuuuuugaaauaaaauagccugucuuucagaucucaaaggcucuuuucagagccaccaaaaaaaaaaaaaaaaaaaaaaaaaaaaaaaaaaaaaaaaaaaaaaaaaaaaaaaaaaaaaaaaagaauu

SEQ ID NO: 6805 - RNA, 1550 nt, Artificial Sequence
  mRNA Design a-3 (hSL-A64-N5) comprising derived and/or modified sequence from Pf(3D7)__XP_001351122.1__HsIns-iso1_Pf-CSP(19-397) (opt1)
aggagagggcgcuuggcuugcaaggacccugagcugcggcauugaagcacacccaacccaacucgacugaagucagccucacugaaccggaucugagaaucuucucucucugggcuugccagggcucuccgaaccuagcuagcauccucuucaauuccaacuagaaagcuuaccauggcccuguggaugcgccuccugccccugcucgcccugcuggcgcucuggggcccggaccccgccgccgcccuguuccaggaguaccagugcuacggcuccagcuccaacacccgggugcucaacgagcugaacuacgacaacgcggggaccaaccuguacaacgagcucgagaugaacuacuacggcaagcaggagaacugguacagccugaagaagaacucccgcagccugggggagaacgacgacggcaacaacgaggacaacgagaagcuccggaagcccaagcacaagaagcugaagcagccggccgacgggaaccccgaccccaacgccaaccccaacguggacccgaacgccaaccccaacgucgaccccaacgccaaccccaacguggacccgaacgcgaaccccaacgccaaccccaacgccaaccccaacgccaacccgaacgcgaaccccaacgccaaccccaacgccaaccccaacgccaacccgaacgccaaccccaacgcgaaccccaacgccaaccccaacgccaacccgaacgccaaccccaacgccaaccccaacgcgaaccccaacgccaacccgaacgccaaccccaacguggaccccaacgccaaccccaacgccaacccgaacgcgaaccccaacgccaaccccaacgccaacccgaacgccaaccccaacgccaaccccaacgcgaaccccaacgccaacccgaacgccaaccccaacgccaaccccaacgcgaaccccaacgccaacccgaacgccaaccccaacgccaaccccaacgccaaccccaacgcgaacccgaacgccaaccccaacaagaacaaccagggcaacggccaggggcacaacaugcccaacgaccccaaccgcaacgucgacgagaacgccaacgccaacuccgccgugaagaacaacaacaacgaggagccgagcgacaagcacaucaaggaguaccugaacaagauccagaacucccucagcacggaguggucccccugcagcgugaccugcggcaacgggauccagguccggaucaagcccggcuccgcgaacaagcccaaggacgagcuggacuacgccaacgacaucgagaagaagaucugcaagauggagaagugcagcuccguguucaacguggucaacagcuccaucgggcugaucauggugcucagcuuccuguuccugaacugaggacuagucccuguucccagagcccacuuuuuuuucuuuuuuugaaauaaaauagccugucuuucagaucucaaaggcucuuuucagagccaccaaaaaaaaaaaaaaaaaaaaaaaaaaaaaaaaaaaaaaaaaaaaaaaaaaaaaaaaaaaaaaaaagaauu

SEQ ID NO: 6806 - RNA, 1529 nt, Artificial Sequence
  mRNA Design a-3 (hSL-A64-N5) comprising derived and/or modified sequence from Pf(3D7)__XP_001351122.1__HsSPARC_Pf-CSP(19-397) (opt1)
aggagagggcgcuuggcuugcaaggacccugagcugcggcauugaagcacacccaacccaacucgacugaagucagccucacugaaccggaucugagaaucuucucucucugggcuugccagggcucuccgaaccuagcuagcauccucuucaauuccaacuagaaagcuuaccaugcgcgccuggaucuucuuccugcucugccuggccggccgggcccuggcccuguuccaggaguaccagugcuacggcuccagcuccaacacccgggugcucaacgagcugaacuacgacaacgcggggaccaaccuguacaacgagcucgagaugaacuacuacggcaagcaggagaacugguacagccugaagaagaacucccgcagccugggggagaacgacgacggcaacaacgaggacaacgagaagcuccggaagcccaagcacaagaagcugaagcagccggccgacgggaaccccgaccccaacgccaaccccaacguggacccgaacgccaaccccaacgucgaccccaacgccaaccccaacguggacccgaacgcgaaccccaacgccaaccccaacgccaaccccaacgccaacccgaacgcgaaccccaacgccaaccccaacgccaaccccaacgccaacccgaacgccaaccccaacgcgaaccccaacgccaaccccaacgccaacccgaacgccaaccccaacgccaaccccaacgcgaaccccaacgccaacccgaacgccaaccccaacguggaccccaacgccaaccccaacgccaacccgaacgcgaaccccaacgccaaccccaacgccaacccgaacgccaaccccaacgccaaccccaacgcgaaccccaacgccaacccgaacgccaaccccaacgccaaccccaacgcgaaccccaacgccaacccgaacgccaaccccaacgccaaccccaacgccaaccccaacgcgaacccgaacgccaaccccaacaagaacaaccagggcaacggccaggggcacaacaugcccaacgaccccaaccgcaacgucgacgagaacgccaacgccaacuccgccgugaagaacaacaacaacgaggagccgagcgacaagcacaucaaggaguaccugaacaagauccagaacucccucagcacggaguggucccccugcagcgugaccugcggcaacgggauccagguccggaucaagcccggcuccgcgaacaagcccaaggacgagcuggacuacgccaacgacaucgagaagaagaucugcaagauggagaagugcagcuccguguucaacguggucaacagcuccaucgggcugaucauggugcucagcuuccuguuccugaacugaggacuagucccuguucccagagcccacuuuuuuuucuuuuuuugaaauaaaauagccugucuuucagaucucaaaggcucuuuucagagccaccaaaaaaaaaaaaaaaaaaaaaaaaaaaaaaaaaaaaaaaaaaaaaaaaaaaaaaaaaaaaaaaaagaauu

SEQ ID NO: 6807 - RNA, 1532 nt, Artificial Sequence
  mRNA Design a-3 (hSL-A64-N5) comprising derived and/or modified sequence from Pf(3D7)__XP_001351122.1__IgE_Pf-CSP(19-397) (opt1)
aggagagggcgcuuggcuugcaaggacccugagcugcggcauugaagcacacccaacccaacucgacugaagucagccucacugaaccggaucugagaaucuucucucucugggcuugccagggcucuccgaaccuagcuagcauccucuucaauuccaacuagaaagcuuaccauggacuggaccuggauccuguuccucguggccgccgcgacccgcguccacagccuguuccaggaguaccagugcuacggcuccagcuccaacacccgggugcucaacgagcugaacuacgacaacgcggggaccaaccuguacaacgagcucgagaugaacuacuacggcaagcaggagaacugguacagccugaagaagaacucccgcagccugggggagaacgacgacggcaacaacgaggacaacgagaagcuccggaagcccaagcacaagaagcugaagcagccggccgacgggaaccccgaccccaacgccaaccccaacguggacccgaacgccaaccccaacgucgaccccaacgccaaccccaacguggacccgaacgcgaaccccaacgccaaccccaacgccaaccccaacgccaacccgaacgcgaaccccaacgccaaccccaacgccaaccccaacgccaacccgaacgccaaccccaacgcgaaccccaacgccaaccccaacgccaacccgaacgccaaccccaacgccaaccccaacgcgaaccccaacgccaacccgaacgccaaccccaacguggaccccaacgccaaccccaacgccaacccgaacgcgaaccccaacgccaaccccaacgccaacccgaacgccaaccccaacgccaaccccaacgcgaaccccaacgccaacccgaacgccaaccccaacgccaaccccaacgcgaaccccaacgccaacccgaacgccaaccccaacgccaaccccaacgccaaccccaacgcgaacccgaacgccaaccccaacaagaacaaccagggcaacggccaggggcacaacaugcccaacgaccccaaccgcaacgucgacgagaacgccaacgccaacuccgccgugaagaacaacaacaacgaggagccgagcgacaagcacaucaaggaguaccugaacaagauccagaacucccucagcacggaguggucccccugcagcgugaccugcggcaacgggauccagguccggaucaagcccggcuccgcgaacaagcccaaggacgagcuggacuacgccaacgacaucgagaagaagaucugcaagauggagaagugcagcuccguguucaacguggucaacagcuccaucgggcugaucauggugcucagcuuccuguuccugaacugaggacuagucccuguucccagagcccacuuuuuuuucuuuuuuugaaauaaaauagccugucuuucagaucucaaaggcucuuuucagagccaccaaaaaaaaaaaaaaaaaaaaaaaaaaaaaaaaaaaaaaaaaaaaaaaaaaaaaaaaaaaaaaaaagaauu

SEQ ID NO: 6808 - RNA, 1697 nt, Artificial Sequence
  mRNA Design a-3 (hSL-A64-N5) comprising derived and/or modified sequence from Pf(3D7)__XP_001351122.1__Pf-CSP_L(G4SG4)_TM domain HA (opt1)
aggagagggcgcuuggcuugcaaggacccugagcugcggcauugaagcacacccaacccaacucgacugaagucagccucacugaaccggaucugagaaucuucucucucugggcuugccagggcucuccgaaccuagcuagcauccucuucaauuccaacuagaaagcuuaccaugaugcgcaagcuggccauccucagcguguccagcuuccuguucgucgaggcccuguuccaggaguaccagugcuacggcuccagcuccaacacccgggugcucaacgagcugaacuacgacaacgcggggaccaaccuguacaacgagcucgagaugaacuacuacggcaagcaggagaacugguacagccugaagaagaacucccgcagccugggggagaacgacgacggcaacaacgaggacaacgagaagcuccggaagcccaagcacaagaagcugaagcagccggccgacgggaaccccgaccccaacgccaaccccaacguggacccgaacgccaaccccaacgucgaccccaacgccaaccccaacguggacccgaacgcgaaccccaacgccaaccccaacgccaaccccaacgccaacccgaacgcgaaccccaacgccaaccccaacgccaaccccaacgccaacccgaacgccaaccccaacgcgaaccccaacgccaaccccaacgccaacccgaacgccaaccccaacgccaaccccaacgcgaaccccaacgccaacccgaacgccaaccccaacguggaccccaacgccaaccccaacgccaacccgaacgcgaaccccaacgccaaccccaacgccaacccgaacgccaaccccaacgccaaccccaacgcgaaccccaacgccaacccgaacgccaaccccaacgccaaccccaacgcgaaccccaacgccaacccgaacgccaaccccaacgccaaccccaacgccaaccccaacgcgaacccgaacgccaaccccaacaagaacaaccagggcaacggccaggggcacaacaugcccaacgaccccaaccgcaacgucgacgagaacgccaacgccaacuccgccgugaagaacaacaacaacgaggagccgagcgacaagcacaucaaggaguaccugaacaagauccagaacucccucagcacggaguggucccccugcagcgugaccugcggcaacgggauccagguccggaucaagcccggcuccgcgaacaagcccaaggacgagcuggacuacgccaacgacaucgagaagaagaucugcaagauggagaagugcagcuccguguucaacguggucaacagcuccaucgggcugaucauggugcucagcuuccuguuccugaacggcgggggcgggagcggcgggggcggcaagcucgaguccacgcggaucuaccagauccuggcgaucuacagcaccgucgccagcucccuggugcucguggucagccugggggccaucuccuucuggaugugcagcaacggcucccugcagugccgcaucugcaucugaggacuagucccuguucccagagcccacuuuuuuuucuuuuuuugaaauaaaauagccugucuuucagaucucaaaggcucuuuucagagccaccaaaaaaaaaaaaaaaaaaaaaaaaaaaaaaaaaaaaaaaaaaaaaaaaaaaaaaaaaaaaaaaaagaauu
